United States Patent Application Publication US 2006/0134663 A1 - sequence listing, part 4

SEQ ID NO: 12666 - DNA, 553 bp, Homo Sapiens
tgtctgtggtgttgaaaaggcattcgagttttcaatgacacgtagggggtcaatgttctcttgctccaccatcatgaactgactccaatactccagaggcaaggaaagcaggcgctcaaccaccttgggttgacgcttgatgtcctgtaacattgtcactgggtctggattgggcacagcatgggccactattgtagggccaaagactttagccagattggcaacatccattttagtatgtggactctgagccactctctgcaagtgaatcatgaggaaagctaatgtgtccctgttggcctggggcagttcaccaacagcttggtacatggcagctatgctgttgtcttcatctgtgatttctgctgcttccataaaggctctgttaaggcgaaaggtcagaagaggttctttgaggtttcgaaaaaagtcttttagaaggctacagatagcatggatatcatcccctttgctgaggaggggtacagttttcactctgaggaatttctctttcagctcttttactgtgcggtcacagccagagatcctatac

SEQ ID NO: 12667 - DNA, 385 bp, Homo Sapiens
actgagagggcgatgcgaggtttgagagagagtagggaagccacagctgcttgggtgcagctcggtcatggacatccctttgagtttaggcttggtggagtcagtggaacagggacatgcttaaagctcatcatgaaagattatggtagtgtggccagtgaaatttggggcgaggggggtggtttatgtgtcagcaaagcagtttctctgctatctaaattttcattacagttctcttagagagatgatgtttttatatgtctttattggaaaagtcctatgtaaaactaaattattttcctgggatggaagaaatgtgaaagagaaacagccatgcttgcaggaggtattgtcctctgctttatttagcttagaaaatcattcc

SEQ ID NO: 12668 - DNA, 554 bp, Homo Sapiens
  misc_feature (447)..(448): n is a, c, g, or t
  misc_feature (459)..(459): n is a, c, g, or t
  misc_feature (513)..(513): n is a, c, g, or t
  misc_feature (531)..(531): n is a, c, g, or t
actgacgagtcctcccaaagtgctgggattacaggcatgaaccaccatgcctggcccacacagcatataatttaaatggaatcacatcatgaggacagtaataaaaacagtcatattggtccacttaggctgccataacaagacaccaaaggctgggtggcttaaacagcagaaatgtgttttctcacagttctagagtctgggagtttgagaccagggagccagcatggttgagatctggtgagggctgtctctcttcctagcttgtggacagctactttctggccatgttctcacatggccttttctctgagtgtgaggggcacatatgagagagtgagatgtcttccttccccttcttataaagccaccaaccctcctggattaggaccccatccttatgacctcatttaaactcagttacctcctaaaacgccctgtgtccanngatatagtcanaattaggggttagggcttcaacataggactttttggtggacgcagttcagaccnatagaaacagcagatacnatagcacttacttgggaccccca

SEQ ID NO: 12669 - DNA, 371 bp, Homo Sapiens
tcaaatccaaaggcctactcgagaagtcaccgtcacagctgctcacgtcggatgtctatagaaatcatgcgctaagtatgatctgacagtgacgatgcctccatcgaccacggagtgctcgtctgtgccagcccattgatgcaaatctgaggactgagacgagaatatattatgcagaagcccagctctgggaagctgtgcacaggcagacacaacagcagccagcctgctcctgtccacttgcgcgtcagggccatacaagttgacggcacaaagctccgtcaatgctctgtgctgttattttctctctcagagggagctctaggatatctttgtatgggggcatctttagagctttcatcagattcaca

SEQ ID NO: 12670 - DNA, 268 bp, Homo Sapiens
cttccatgcttgttctctggacatttggggatgtgagtgttagagctggtgagagaggagtcaggcggccttcccaccgatggtcctggcctccacctgccctctcttccctgcctgatcaccgctttccaatttgcccttcagagaacttaagtcaaggagagttgaaattcacaggccagggcacatcttttatttatttcattatgttggccaacagaacttgattgtaaataataataaagaaatctgttatatacttttcaaa

SEQ ID NO: 12671 - DNA, 546 bp, Homo Sapiens
tttatctctgggtcgcacacataacccctcacgaataactggggttctggaccctatgccaaagcctctcgtgaactgcaatttggcccagtgttccggaggatgatggtcgagagcaaaaaggggggtagttttccaaaagataactcaggggacaaaatagtccacggggcttatgagcgttgagactcctgccctgattgtggcaaagcacctggagatgatagaacttcctagggaaaaggctgcatggagtccccagggatgctgggccctggtcaccaaggctccctgggaaggtctcttgtacctggggcacacagaccaacacttctgaatttgcaagcttaagagcatgtatgagcagaacctgtgcagaccaaggcttagagggctcacctcaatgttttgcactgtgtgagaccccaggaccttttcgtgattctggagaggggaacaaaccataataacaacaaaccaggtagcaggatagagactcattctcatctattttggttaaaagaaaataaatgtatttcttccaca

SEQ ID NO: 12672 - DNA, 1514 bp, Homo Sapiens
  misc_feature (236)..(248): n is a, c, g, or t
  misc_feature (803)..(889): n is a, c, g, or t
  misc_feature (1383)..(1469): n is a, c, g, or t
tgactggtaacacctgggcgagttttgaactactaccaaaaagatttcaccaatttacaactccatcattagtaagaatgcctgtttgcctatagtctgccaaccctgaatccttaaaaatctttgccaatctggtaggcaaaacttctttcttttctttgaatagtaatgaggaggaacatcttttcatgtttcttggccatttgcatttcctattatgaattgcttttgcccannnnnnnnnnnnnaattatgaaagtctaatgactaccttctcattgtataaaaaacacagttctttgaatagagagacccttttctccaatgctaccaatcacattccacttaccacagtttaacatacatcctctagtcacctttccgtacgaatatacatacacataaaaacactttttacataaataggatctcatattctgtagctttttaaaattttggtctcaaaaaaagataacaggtctttaaatttctttaatggttgaatatgattaaatactatgaaaatgccattatttattcccttaatttttttcctctcgctattacattgccaaagtaaacatcctattcagatgtctttgtgcatgtgtgtgaatatttctttagtctggagtccagtaacgtggaattttggatcaaagggtttgttctctgtccaccttcagtcttcccaaaggccttcataactgtattttcaccaagtgtatggagaatgttcatttccccatataaccatacctacacttgatagtttttatctgttgggcgaaaaagaacctttnnnnnnnnnnnnnnnnnnnnnnnnnnnnnnnnnnnnnnnnnnnnnnnnnnnnnnnnnnnnnnnnnnnnnnnnnnnnnnnnnnnnnnnttgtttgtatcccttacctgctttctattgggttatgtgtggatatattgtttttatttgttcagcatctccttccccatcttctggtaacacaacctttatttatttgtggggaacctattccctgtggcttaggtgagcatgtgaccaggcctggcctcctgagtcccacagcttcctagccacagtgataaaagaatgggtatataacttaagccaggctaaggaaagcccttaacagaacttctgctggaactactggaaagaaggctttatggagatcccaggaaccaaggaccatgtaagcctgaatttgtgccatgtggagagagtctgtctgaggagaaactcggatgctagcagaaatggaaagagaactaagttctgatgtcatttttctggaggccctagatccagctgtgcctaaagcctgccctacctccggactttaaagttttgtgagccaataaagtccctttcttgtttaagataannnnnnnnnnnnnnnnnnnnnnnnnnnnnnnnnnnnnnnnnnnnnnnnnnnnnnnnnnnnnnnnnnnnnnnnnnnnnnnnnnnnnnnctttatgccctatataagttaataaaattagcatggccttccatg

SEQ ID NO: 12673 - DNA, 398 bp, Homo Sapiens
aatctggggcctgctctgagcaggaccttatcccagctctactgcagctacggccccttgacctgagcttatgccgtgaaacagcccccagcccccgtctgtcccccaacccaggctagccagccttttaacaacatcttttggggtacaattagaatctaagtgtttgcagccatatgtgtcatgtagaagatgcctagccctggggaccttgtgaaatacgcaggaaccagggataccatctggtccagtggtttttaaacaaagctgcttagcacctggaattccctggtcagggagatggagtcagtggggcattgcagcttggaatctattttatgtcaccagttggtcctcatcaaataaaatttccttaggagtgcagagggctcattggg

SEQ ID NO: 12674 - DNA, 1289 bp, Homo Sapiens
  misc_feature (504)..(542): n is a, c, g, or t
tttgagcttgggcaacctttttattttgtgataaaaatgctttcatataaatttcatcttaactacctttagaatgaaacggaaaagtaaaaacaaagtgtgcattttccttactacgtttagtcaggaatatgcggtcattttattggttactgggtttctcatacaaacagatataatatcacttttaagagaaatgtacacaaggaagtaaccatagtaccacttattagtgggggcctctgggtacataaatgtgtcctcccaaatagtcatcatacattcaatgtattggttagggccaaaatccctaaaccacctctcaacaaaacattacacctttggttctttattatgcaaaaattacaaattggcaaattcaataagaggatgcaatggatttgagcatcacagccaattgcttatactaaaatattttaattctcagactctctttccctcatacctttcccttccccacctcacataagaaaatgatgcttnnnnnnnnnnnnnnnnnnnnnnnnnnnnnnnnnnnnnnnctatccccaaaggcaggcagaagaggagtcaaagaaagaaagcatttataacaataaaaataaaccaaaaatagcaggggaggatctatacatggcataaaagatgtgtctcataaaaactgagtctccaattcagaacccaaatgagaaagtgattatccatcttaccttcccttttattagataccacacaattcaagagttcttaaaatctaagagatcagtaaaaagtttgaaaggcagtgttgtcctcctcatcactgaaacctgttgtctgtaatgacagctttcacattccctttctccaaacccaaaggatccaaattaaagtagtccaagaaaaagaaacaagcaatttggtctgacattgtgcttaaggaaaagggaggatataaaatatccagtggctggatcagtagctgatactttcagaagtggggctggagcaggagggcagaaaggggcaggtacgctgtggtccacagaggtccatgcagataggttctccccatctgtgaataataaatgggtccaagggcagagagtcaccatttagaatgataaaatgtttgcacactatgaaagaggctgacagaatgttgccacatggagagaataaagcagagaatgaacaaacttaatctgcttatctcagggcagaagtaattatttttgttggttcaataaatttggataggactgaaaaaaccatttgtaaactattatgccaacagaccggacgcgtgg

SEQ ID NO: 12675 - DNA, 495 bp, Homo Sapiens
gcgactccggcaattcagcgatctgtgggtccgcctggaggagagtgacatagtcccgcaactccaggtccctgtcctggacaggcacatctccactgaactgcggctccctcgccgtgggcattcccaccacagccagatggtggccagcagtgcctgcctgtctctctggactcctgtgttctgggtgctggtgctggctttccaaacagagacacccctcctgtaacgactggaagcaccaggctaagaacctgacccctcggacttgaagaatggccattcctgtactccacattctggtctagccttgttgggcccaatccagaagagactgctcttgaaaaagcggcccagtgttgattcttctctttccaaggaatgtgactttgggttatccaactttgggggcaggtgtacagttttgtaacatagtgagttgtgtgaaaataaattataaatgagttgtatgaaaataaatacctttttttgtat

SEQ ID NO: 12676 - DNA, 502 bp, Homo Sapiens
aagtagtatctactttctaaatactactttgcttttcagtagtggatttgatatttataatgttctctaaagcttgcaactttttcagcaacgtttaaaaatagattaacctggaataacttacttgtttgctgctaaaatactcaagattttgccatttttaaacaaccagtccctgtgatacaactttgaaaaaacttttaaaaatctctgatgtatgggctctttttttcccataagaattatgtacatctgtgatgttttacagggggatccgcttttaaacagtgtacatattggaccacactgaaatgtcatatatcctttctctacttaaaattggttatttactgtgagttcatttccgatgtgttcttggttgttgctgttttctgcctgaagacgtgtatcataaagagctacatggtatggactatttatttgtaatttgacataaagtttgaagaataaagatctataaaagttgaagtttctgatatta

SEQ ID NO: 12677 - DNA, 543 bp, Homo Sapiens
gaacaaggctcaggccctcctctatcaggaagctgggtactttggaaatcaccacttcttccaagcctgtttcccatatcacagatgtggggccatggcctcgatgatggtctccacaggtctttccacctctgtgagtccaagtcaggtcaatcagcaaggacccatctctgccctgggtcagctcctcagaaccaacccccagcatctctaaagcaaaagcctcacctcaagggctgctcagaagagagcaccttcagcatgagttgttgctggaagatctaataagctgtgtttcctgggaagtggtgctttacttagccctgtggacaacttctctatgcatctgtgtgagcagatgatcattgtattaccttttatcggtagtaagcttggaaaaataatttaagaatacaatggagaaatgtaaataagtatctatgtaaatttgtttaaaataaactgaatgtatttaatggtccatttatatgttcttttatgtaacatgtagtttaataaagttcctgtttatgagaaaaaaaa

SEQ ID NO: 12678 - DNA, 611 bp, Homo Sapiens
  misc_feature (102)..(147): n is a, c, g, or t
gcctcaagatcctctccaaaggaaagcgaggtggacattcatctgtttccactgagtctgagtcttcaagttttcactccagctaacacagatgtaaaagannnnnnnnnnnnnnnnnnnnnnnnnnnnnnnnnnnnnnnnnnnnnncagatataaaagactgaccaatattgtacagtttttatgtgcttgttggatttttgtcttgtgtttctttagtttttgtgaagtttaaatgacttatttatataaattttttttgtttcatattgatgtgtgtctaggcaggacctgtggccaagttcttagttgctgtatgtctcgtggtaggactgtagaaaagggaactgaacattccagagcgtgtagtgaatcacgtaaagctagaaatgatccccagctgtttatgcatagataatctctccattcccgtggaacgtttttcctgttcttaagacgtgattttgctgtagaagatggcacttataaccaaagcccaaagtggtatagaaatgctggtttttcagttttcaggagtgggttgatttcagcacctacagtgtacagtcttgtattaagttgttaataaaagtacatgttaaacttaaaaa

SEQ ID NO: 12679 - DNA, 494 bp, Homo Sapiens
  misc_feature (115)..(124): n is a, c, g, or t
cggctctgtcctgtgccttaccagccctggggaggggggcatttggctggaagactggaatttaattgccatcgtctttgattttgtgacatttctgcttggaagtgtgaactannnnnnnnnngcttcctgctccttagcatgcgtgcagctctctcctgttttgggtgttaccccttggacactccagctcggggactgctggcgtgtgagtgtgcagattcccctgtgtggtcgaacctaagaactgtggcttggaagtgatgctccatgtgacgacgactttgctttctttcctcttagtgaggaggtgattcgtagatcccaactgcctatgtaatgtaaataatgtacatttaatttattgctatggtagcacattgtatttgttaatgtacaaaacaaattctaaaaggttgacaaatgtatattttgttgcttaaatgtgtctttgcagaaattgacaataaataacatattttgtgtcaaaaaaa

SEQ ID NO: 12680 - DNA, 482 bp, Homo Sapiens
tgcctgcaggagcttggcaagtcactaaattgcatgaaattgtgaggtgcacaccaaatgcagggatgggggagcccgtgggaagctctgtattctcaaaatttgacagctaattccggtttttagaaaatgcctgaggccagtagaggccctctagtcactcactgctgctgtttctgatataattattgagaaagctatctcacttaatagaagaaaacacgcactatcaaaaccagatagcctaacgtgcatgtgaaaatcgagaaagctgaaaacaaatccaggtacccttctctgaactggagtgtttccacagacttgaataatttatgaaattatcacaccagtatttctcatatcaccaagaagactttctctcctgcagtagaggattgttatatttgcctaaaaaacacgattccaatatatgacaagggcagataatttataagtgaatgttaataaaattggatgtgtat

SEQ ID NO: 12681 - DNA, 504 bp, Homo Sapiens
agctgtcactagaacattgattgatctatcaggcattgagatcttctagatgtactgtaaaaagaatgctttttaggtatgagctgctaccacagttaacactccataatgttcatgtcagccaaagaggactaaccaaagctgaaatctcagagaacaatttgctttactaagctgagtcaacttgagagcgaacttccaacaatgccgcactgtagtgtggctggttctaccactatgactttaaaacatgtttatatcatttttaatttttatgatacggcagtgtcagggagaaatgtaatgttctatatgaaattcctttttcaagtttgttcattaataacagttattaatttaaatcagcgttagagtttgtgctgctgcaactgctgtgaaaatttctctgagtaattctgatttgtgaatgatcccagaccaaccctgagattttgtcaacctgattaagtcaatatgaatgattaaaaagatgtgagaacactg

SEQ ID NO: 12682 - DNA, 403 bp, Homo Sapiens
tttttgcccccacttcacaggatggcagctctactgatgtctcccagttttctctcatagacccagacctgcaagaactcgagggaaaggaagatcttgaaagcctctcattcactgggtgcttccagctccaagtgtgtggtaatggtttcaaagggatttggaaaaaaacagaatagtcgaacttacctcatcaaacgactccagttttttattgtccccccataaaaatagtctaaacctgctcccctgcttgtgaactcaaagtcctgttgggggactcaaaaggttgtacatatatatgtgtgaatagttttcaaatgtttcacacatgtatgtataaataattttaaatgtttgtgtatattgtcatgattaataaaaagcccattcatttaaaagc

SEQ ID NO: 12683 - DNA, 411 bp, Homo Sapiens
acatataaagaatatgtctattttcatatgtgtgatactgacagagccatggtattcctaaaatataggtttctcttttttcttgtattcttagcaaattgcatttattcactacattacaaaccatcactgatgtatccaaaatagcacacatagttcagtatgaaaataagagaataaaatctgttataagcaagtgatttaggtattttcttttgtgtttatgcattatctgactatattaaaacctgtttttctatttaccttctatcagttttctctaccaattatgttttttcaatgctctataagaatgaatatggaaattatatttcttttttctgtaaaagagttgcaactactttattatatttagaaatccaataaacttcttattacatttaaaaaaaa

SEQ ID NO: 12684 - DNA, 850 bp, Homo Sapiens
ggaagatggcggactcggtggctagccgatgaggaggccgcggggtggaacccggcccccgggccccgagaccgactgagggagcgacctgcgcagggcccggggagtcatggtctccatcacccaactccatgcttcgagtcctgctctctgctcagacctcccctgctcggctgtctggcctgctgctgatccctccagtacagccctgctgtttggggcccagcaaatggggggaccggcctgttggaggaggccccagtgcaggtcctgtgcaaggactgcagcggcttctggaacaggcgaagagccctggggagctgctgcgctggctgggccagaaccccagcaaggtgcgcgcccaccactactcggtggcgcttcgtcgtctgggccagctcttggggtctcggccacggccccctcctgtggagcaggtcacactgcaggacttgagtcagctcatcatccgaaactgcccctcctttgacattcacaccatccacgtgtgtcttgcaccttgcagtcttacttggctttccatctgatggtcccctggtgtgtgccctggaacaggagcgaaggctccgcctccctccgaagccacctccccctttgcagccccttctccgaggtgggcaagggttggaagctgctctaagcctgcccccgttttctgcggtatccacggcagcatctgatcagcagcctggcagaggcaaggccagaggaactgactccccacgtgatggtgctcctggcccagcacctggcccggcaccggtttgcgggagccccagcttctggaagccattgcccacttcctggtggttcaggaaacgcaactcag

SEQ ID NO: 12685 - DNA, 471 bp, Homo Sapiens
agtaagtaaggtgcaatgaagaagtgttgattgccaaattgacatgttgtcacattctcattgtgaattatgtaaagttgttaagagacataccctctaaaaaagaactttagcatggtattgaaggaattagaaatgaatttggagtgctttttatgtatgttgtcttcttcaatactgaaaatttgtccttggttcttaaaagcattctgtactaatacagctcttccatagggcagttgttgcttcttaattcagttctgtatgtgttcaacatttttgaatacattaaaagaagtaaccaactgaacgacaaagcatggtatttgaattttaaattaaagcaaagtaaataaaagtacaaagcatattttagttagtactaaattcttagtaaaatgctgatcagtaaaccaatcccttgagttatataacaagatttttaaataaatgttattgtcctcaccttct

SEQ ID NO: 12686 - DNA, 621 bp, Homo Sapiens
ttcagttttaagtggagtttataacactaagagataaagggttgttaacaaacacaataacaaatggacatctgattgggatgaggcattatcctgtacacatcatattggtatttttgtgtatcctcagtgcatagcatttacacacagagccactgctgcacagcacaagagtatctgaagaggctgaatcagagtaaggctgtttaacagactgaaattttttagtatatatattctatatgaaaacaggttgaacttttgaactggcaggtagaaggcaactctgccaaatactacagttaaagcccccactttagtgcacagttccaccccttccatctgcatgcatgacacattaacagtatttaaaggtaaacgaggcactttgtggcaaccacagccatcgttatgaacatattgcacaaaatttctagaactaaacattaaacttgtaccctacttttattttttaaagctgaaacatttgatgctgccggtaaactccacttaagtttataacctgtgccacagcaaagaatggtgatgctatttattcaactacccttttaaaagtatggcaaacatgttcaagaggagctacaaaggacttgggatggt

SEQ ID NO: 12687 - DNA, 280 bp, Homo Sapiens
gatctccatgttctggaaacatgatttgacgtgtgtgatgtggggaaaatcgagtaagtgtgtcatggcgacaaagggatggttcagggtttcgattggagtgattctcttgtcagcatcaatggacagcatcttcttcaacaggtcaatgaactcccgccggacagccttttctaccaacatgtcgctcccttccaaatctgtcgacatgttcacctgggccatatcatctaaacagttgaaaatgtactttattgcttattatgacttaatccctgtc

SEQ ID NO: 12688 - DNA, 878 bp, Homo Sapiens
gaaagaggtattaaggaagaccagatggatgagaaactaatggaccttttaaatatgcgaacactttcctgtagctcaaataatacaccagaaaccgaagctgaaagactggcatcctccggggggctttattctgggattatgggcacttattatcatggttttcttcaaaacttatggaattaagcatatgaagttcattttttagagttgatgatgaatgaagaatgcatggaggcctgcaaacttggataataatttatgtcattatatatttttaaaaatgtgtttctcttgtatgaattggaaataagtataaggaaactaaatttgaatcaactattaattttataacttaaagaaaaataattgttaatgcaactgcttaatggcactaaatatattccagttttgtattttgtgtattataaaagcgaatgagacagagatcagaatacattgactgtttttgaaaatagtaatttccccttatccccttttcatttggaaaagaaacaattgtgaagacattaaattctcactaacagaagtaactttggttaattattttttgtatatcctcccaatcttttgacttatgcacatattttttcccaatatggagatcatatggaatgtactattttgtaatgtcttttttcattttacaatgtattatcaaccttttccctctcaaaaatacattgtgaatgactgcatagtattcactttatgaatatttaattcatttcacagtcttctattgttggaccacttacattgtaccaaatgttttcctttggtttattctttaatgtattaatattttactgctggtcactcatggaatcctgcagctttaattaaaagcaaagatg

SEQ ID NO: 12689 - DNA, 503 bp, Homo Sapiens
  misc_feature (419)..(435): n is a, c, g, or t
ctctgagcctttgaacacttgccgtttctattcctcacagcagccctttcagacggaacgggtgttaccagattaggaggagagtggccactgtattctcagtgcccagcccagggaggcagatctgagtggagttgctaatgaaacatggaaggtgcttgagagctaactggaagggagggaaggtgtgcattcctgcaccagggcctttgcatgtacttgttactttctcctgctggccagctggagtgtctggaaagatctgccttactcagggaagccttctcactcgcactctgcccagttaggaccactgccctctagagaccctatagaattacagaggaggccgggcgtgatagctcacacctggaatcccagcactccagcctgggcgacagagtgagactccatctctnnnnnnnnnnnnnnnnngaataaaccccacacacctttgccttccctttgctttccctcaccacacccccattctccccacctcc

SEQ ID NO: 12690 - DNA, 438 bp, Homo Sapiens
ttctgtataaaactgtaatcctttgtattcatgtttacagtgctattactataattcaaaattatgtatgtgacttagagttatataatcataatttatgtttatttcaaatatctaagtttattgcttggatttctagtgagagctgttgaatttggtgatgtcaaatgtttctagggtttttttagtttgtttttattgaaaaatttaattatttatgctataggtgatattctctttgaataaacctataatagaaaatagcagacaacataaacatctttgtaaatatcaaacctaatacatttcttgtccagtgataaaacaactggtagaattatttaaacactttagatttttaaataatatacatggctttaatttttactatgtgtatagctacatgatgaaattaattaaatattaagaggtaaaaaa

SEQ ID NO: 12691 - DNA, 486 bp, Homo Sapiens
aagatgggcaagtccatccacaaatatgtccatctgtttcacaagttgtagttgtcagtgcgcctgcagcctatcacacgctacacccggaaggtggagctgaccatcacgccagtcttgcagtggaatgaaaaggtgcatggttcatccgaggctttttggattctggtggaggatgtggacagcgaggtgattatgcaccatgagtattttctcctcaaggccaagtacgcacaggacgagcacctcattacattcttctgtgcctgtctttgaaccgctgccccctcagtacttcatccgagtggtgtctgaccgctggctctcttgtgagacccagctgcctgtctccttccggcacctgatcttgccggagaagtacccccctccaaccgaacttttggacctgcagcccttgcccgtgtctgctctgagaaacagtgcctttgagagtctttaccaagataaatttcctttcttcaatcc

SEQ ID NO: 12692 - DNA, 882 bp, Homo Sapiens
ccagaccgagagccccagcaggggtttgattcaggatatgagcggcgatgcttctgtgtgcccggataaaagtaaaggaagttaccggcagcatttttttcaagcacggtggcacagcggaactgaaatgctcccaaaaatccaacctggcccgggtcttttggaagttccagaatggcgtgttgaaggccgagagccccaagtacggtcttatgggcagaaaaaacttgctcatcttcaacttgtcagaaggagacagtggggtgtaccagtgcctgtcagaggagagggttaagaacaaaacggtcttccaagtggtcgccaagcacgtcctggaagtgaaggtggttccaaagcccgtagtggcccccaccttgtcagttgttcagacagaaggtagtaggattgccaccaaagtgttggtggcatccacccaagggtcttctcccccaaccccagccgtgcaggccacctcctccggggccatcacccttcctcccaagcctgcgcccaccggcacatcctgcgaaccaaagatcgtcatcaacacggtcccccagctccactcggagaaaaccatgtatcttaagtccagcgacaaccgcctcctcatgtccctcttcctcttcttctttgttctcttcctctgcctctttttctacaactgctataagggatacctgcccagacagtgcttgaaattccgctcggccctactaattgggaagaagaagcccaagtcagatttctgtgaccgtgagcagagcctgaaggagacgttagtagagccagggagcttctcccagcagaatggggagcaccccaagccagcctggacaccggctatgagaccgagcaagacaccatcaccagcaaagtccc

SEQ ID NO: 12693 - DNA, 377 bp, Homo Sapiens
  misc_feature (20)..(20): n is a, c, g, or t
ctcggtaccccacggctgancgagtcctcaggaaacaaaaaagagaccaaaaggtcacctacaaagacatcagactttggactcaatagcagcactgggaacaagacgatgaagcactacctttaaaattctgcaggaacacctttttctgacctagaattgtgtgtttagctaaaccctctatcaagtataaataaaaaaatcatttccacacctgcagattctcaaaaaacttgccttctgttgtggcctgaatatttgtgtttccccaacatcctctaaaggttgtcctgacagatgtgtcccatagacagccatggttctcggcttattatgaccccacagtgcactaaggaaacctccactaactaaaaccc

SEQ ID NO: 12694 - DNA, 392 bp, Homo Sapiens
caggcgggcagcccggccgacgggcagggcatccaggagggagatcagattctgcaggtgaatgacgtgccattccagaacctgacacgggaggaggcagtgcagttcctgctggggctgccaccaggcgaggagatggagctggtgacgcagaggaagcaggacattttctggaaaatggtgcagtcccgcgtgggtgactccttctacatccgcactcactttgagctggagcccagtccaccgtctggcctgggcttcacccgtggcgacgtcttacacgtgctggacacgctgcaccccggccccgggcagagccacgcacgaggaggccactggctggcggtgcgcatgggtcgtgacctgcgggagcaagagcggtgcattattgc

SEQ ID NO: 12695 - DNA, 410 bp, Homo Sapiens
acgcgctgagagcatacccgtagcgctggaacaggtaatgacgggcacggcctccccacggcctgtccgggaaagaccaggacctgctcgagcctcctggccgctccttggccgctctccgtccacccctgcaaagccaagacccttctgcagccacgaatgtccacggagcccgccggcaggaaggaagacaccatgctttagagatccatctttctccactcaccgcagcgtacttggcacttcagtttcaaacacgtagtcctttaaaacttgatccgatagctttaatgcggccggtcctctctcagtcaggaaaattgcacagaccgacagtcgtgaggatggcagagctgctgcattcccccacatggggatttctgtatctgctcgggcagccgggtaccgag

SEQ ID NO: 12696 - DNA, 307 bp, Homo Sapiens
cgatctgactacgcggctcgatctgactacgcggctcgatctgactacgcggctcgatctgactacgcggctcgatctgactacgcggctcgatctgactacgcggctcgatctgactacgcggctcgatctgactacgcggctcgatctgactacgcggctcgatctgactacgcggctttgtaactgcagcagctttaatatacactatagaagctggaattaccgcggctgctggcaccagactggccctccaatggatcctcgttaaagcatgtaaagtggactcattacaattacaggtcct

SEQ ID NO: 12697 - DNA, 478 bp, Homo Sapiens
cagaccccgagctgcatgggattaatcttaaccgagcgttcgaagcactctacacactcttgaaactccttgttccgaagatgaaggagggctttggagcgctgagcacgagcactgcggtaccgggacaactcccaggccttgtcatagcaagaatggtctccgaggacatctccaagcaagcagtataaactaggcgtttcttttttctccagctcttgtctaaggatttcttctgcctttccgtgctgcccggctctttcataacaaatgacaacatcttcccacatttctagcttttcaaatatctgaagggctgaactggtacatcccaactcaaagagcaaacttgcaagttggcgctgaatggcccagtgaggtggtacttgacagcaatagaaaatcttcaggcgttccaatacagatgtagttttatcttcaaattggtctgcaagagcctgtgtctgcctcgctgccc

SEQ ID NO: 12698 - DNA, 183 bp, Homo Sapiens
gccagctcttcatttcaacaaactccccgatgatgtgagtgcacattcaagtctgagaagggcttctttgaggtgagccttagtgcccatccccctttggtggccccggataccaagggtgtgtgaaaggagtggataaggaatatgggtctcacctgccaatctgcttataataacacttgt

SEQ ID NO: 12699 - DNA, 448 bp, Homo Sapiens
ctgtgctttgggacggcgaggatggggacagcaggtgatgggggcatggaatcgagtgcgtggaatcaagtgccacttgtgttgagatgcccactaggtggcctggtggagagggttagctacccaggtctggctcagggcagtggttggggccgacgcagcagataaaggagggtgttcaggagaccagatgtgagccccagagcaagaattgggccaaaaatagaacctgggcagagggaactgttcctacctcattgggctgagcaagaatcaatggagagtcatggaaagcactcagcccagtgccaggcaaggagtggacacccatgactgtcgcctggtgttccgctatactgctgaggagctggacccaagatccagagagggccagcagctgacccagggtcacacagctggacgagggtctgaacccagtttctttttg

SEQ ID NO: 12700 - DNA, 247 bp, Homo Sapiens
gacttttggtactaagctttctcgtatgatttttctgtaatcttatattaatagacgtgggatgacgattatgaaaaataactttttagtcattcggtaggttgtcatgtagtcagagttaagtctctctttactttgaagatgtagagttctgaaaagttgatttgtgcctgcagaatctcttagtgtttaccacaagtcatttctcagagtgtctgtagatgtttaggctgtacttaagtactgc

SEQ ID NO: 12701 - DNA, 749 bp, Homo Sapiens
gtccgccaagccgtcggggacccccatcagcccagcccccgttccctccacgttgccatcagcatcctcggccctggcaggggaccagccgtcttccaccgccttcatccctctcatatcaacccgagtgtctcttcggaaaacccgccagcctccagagcggatcgccagcggcgccatcaccaagggcgtggtcctggacagcaccgaggcgctgtgcctcgccatctctaggaactccgagcagatggccagccacagcgcagtgctggaggccggcaaaaacctctacacgttctgcgtgagctatgtggattccatccagcaaatgaggaacaagtttgccttccgagaggccatcaacaaactggagaataatctccgggagcttcagatctgcccggcgacagcaggcagtggtccagcggccactcaggacttcagcaagctcctcagttcggtgaaggaaatcagtgacatagtgcagaggtagcagcagtcaggggtcaggtgtcaggcccgtcggagctgcctgcagcacatgcgggctcgcccatacccgtgacagtggctgacaagggactagtgagtcagcaccttggcccaggagctctgcgcaaggcagagctgagggccactgtggagtccagctctactacatacgtctgcaccgcatgccctcccgcaccttccgcctccccgtggccatttttatcacctcaagagctgaagccatctccctcgtgaaa

SEQ ID NO: 12702 - DNA, 431 bp, Homo Sapiens
  misc_feature (401)..(401): n is a, c, g, or t
tacatcggcgtcatctggggggtgtagcacggtgtccagtcccggtagggaggggttgctggaggggtggcccacgaccgggtcgagtgactcggtgagtacttctgggctttacttgaatctaggccggcaactgccatgatctgttgctgcattagatgcagaggcagggccgtgcgatgggggaagatgggagacgacgggacctcttcctggctgctctgccggcgcaggcactcaaagttgaaggaggatctccggtgggatgctggggtgggaggtagtaggcgtctccttggagatctccgtgaatcatagcaaacgggcgagtcatcgtcctccaagaatccttggggatgatggtagcctcggggcctctcagagtcgatgtttctgcctgngtatctgctcgggcgagccggtaccgagct

SEQ ID NO: 12703 - DNA, 485 bp, Homo Sapiens
cctcgccgaccagatacaaaggaagacaaatctagactgacgggattttcattgacataagcaatagaggcaatcagtgagatttgtttggacatcttgagtttgaggagcccatagattaccccagcaggattgcccagttagtaactggatagacaggtctggagctcagaaaagaagccgaggctggagatgcagatctggaaatcagtaacatataactgaagccatggtagtaagtggaatcatccacagagactgtgtagcatgaggaccaaaagccaaggagagagcctgagaaattcctaatgcttaaaggatggccagaagaagagagatcagaggagactgtgaagaagtggtttattgaagttggagaaggtagcagacgttatttctcaaagtcaagagagggcagatttttgagaaatgaagagtggtcaatagtgttgaacggcattgagaagtcaagtaggatgaggcct

SEQ ID NO: 12704 - DNA, 645 bp, Homo Sapiens
tgcagcgagactatagaatatccgcgtctcggagcgcatactggttagaactagtgctgtaaccctgaccagagttaccttctagtgggtggagataaactgtcaacaaatacatgagaaaacttcaagtagtgctgagtacatgaagaaaattaaaacactgtaatgtgttagaaagtcactgggggagagaatgtggtgagtttctacggagaggtcaggtggctctctaaatgaaaacctaaacccatgctatctgcatctggaataacctgcacaaagtgaactgttaaccagataccagaggttgctagctttatagtcttatgaaatggaagaaccccgtgtttagagctacaaaatttccagctatgcaaagatcttggagaatagcattccaggcaaaggggacaaacagcacatgcaaaggtcctcaggccccctggttttggtgcatccaaggaagaaaaagaaggtcgtcatgaccgaggcacagtgagctgggtatcgaggggcatccagtggaggtgggtaagtgggcagggaccacagcaggtggcagtttgcagggtaaggggtacagattgattcaaagtgcaattggaaaccgctgaagagttttacaaaagcgaatgaatgatctgg

SEQ ID NO: 12705 - DNA, 865 bp, Homo Sapiens
atgggcaatgaagttggtgaagcccaggcctgtgtcttcctgggggtcaccgtgggggatttggccgccggggcatccttcttctctccatgacccttaccggcattgcttccctggtcctgctgggcctgtgggattatctgaacgaggctgccatcaccactttctctgtccttgggctcttctcctcccaagctgccgccatcctcagcaccctccttgctgctgaggtcatccccaccactgtccggggccgtggcctgggcctgatcatggctctaggggcgcttggaggactgagcggcccggcccagcgcctccacatgggccatggagccttcctgcagcacgtggtgctggcggcctgcgccctcctctgcattctcagcattatgctgctgccggagaccaagcgcaagctcctgcccgaggtgctccgggacggggagctgtgtcgccggccttccctgctgcggcagccaccccctacccgctgtgaccacgtcccgctgcttgccacccccaaccctgccctctgagcggcctctgagtaccctggcgggaggctggcccacacagaaaggtggcaagaagatcgggaagactgagtagggaaggcagggctgcccagaagtctcagaggcacctcacgccagccatcgcggagagctcagagggccgtccccaccctgcctcctccctgctgctttgcattcacttccttggccagagtcaggggacagggagagagctccacactgtaaccactgggtctgggctccatcctgcgcccaaagacatccacccagacctcattatttcttgctctatcattctgtttcaataaagacatttggaataaacg

SEQ ID NO: 12706 - DNA, 366 bp, Homo Sapiens
gtaaattcctcccttgcagcctccttcatgtggtgaggggatcaacttcagctgcctgctgtggacaaagaacatcaaattacagcatcacgagtgctattgttgcctgtggtggtctccctgtccaagcgggaccgctttgcagagaccagaggcatatcgcggcttgagctgaaaatgcatttgttgcagcttaggttgaattatttttcgtttgctctttcttctacacgcgcctgatggatagtgaacctattcatcaaaaaagtgcactgctcttctgtctattgtaccgacttaacctcttccacccaagtccgcatctgtgtgtatcatcaataaagttgtgtgctttgattggcaaaa

SEQ ID NO: 12707 - DNA, 285 bp, Homo Sapiens
atgagccaccacgcccggcccggcctactcttttttactgcatgtctttatagagaaaaaataaatatttatgttagaggtgaaaacttcaaaaaaacaaaccacagacaaatttagtatttaatttgcaagattaaaatttacaactggaaatatactgtttgctctcttccatgcttcacagctataatgcctagtagctaagtagctttcaaactgctcaggtattaatagcgttaactttcctccttgatcctctattcctttaatggttcaaaggctggc

SEQ ID NO: 12708 - DNA, 398 bp, Homo Sapiens
ggccttcaaagccaggcacgtggaccgtgtcaaaagcgccacctggtggtgactgggatgctggcagggaggagctgaggacaaaactctagtggaaatttcccaggtcggtcccacgccccggtgacagggtgaaccctgagaggagcccccaaactggaggcaattgtctttgaggtaaccactcaccccagcctttcagagaccagaggcaagacatttctggctaagagccatggatagttgttccatgcgttttgtggtttcttatcccaaaagggcatgaagtcacagtaggcagtgacatggtaaacagccagggcctgagaaggagtcctgatgggcacaccttgtctaaactggtttggcctggaaactgaaatgctgtcctcttgcac

SEQ ID NO: 12709 - DNA, 661 bp, Homo Sapiens
ttttcacatgttaaatgctggaatatattatgaaaatgttttcaagaaatcacttaagtgttcatagaccagtatttctgacaggtaaaatgctaaaataagctacctgtaataagtgtggattatatttttgggttttgtagaatattgcaaattaaccacacaaaaaatgtttaatttatgcaacaagcatgtttgtgcaaatttcatgggactttaaaaagaataagtatttgagaaaatatctggttcacttacactacatttactgtattattcttttatagcattaggtgccttgtattttaaatctgtgacaaaccatggcaaatttttaaaggggaagtattattataaaatgaagaaatatgtatttctaaaggctatattgctgtaaacttaattgataaagctctgtttaatttagagttttgaagaaatagtctcccttcaattaagaaattttcataatggaatgatttaaattgaagtgacaaagagtattattaaaatacaatgtttatacgtctatttgtgtactgtagatgtatcaagtgatttctaatttttttcacatatgaatgtgccagattactctagaactagatgtctcttctttaaataattttagttttcctgaataaatttgtaatggttaaag

SEQ ID NO: 12710 - DNA, 316 bp, Homo Sapiens
ccagcctgggcaaaagagcaagacgccatctcaaaaaatatacatatataaggagataaagtttcccattttccaatacagtttcacatttgaacagccctaattgatacaactttatggcagggttttagtgtgtgagtgggatccaaaacactcaatcctgtaaaagggtacagtcctattgtatgttaacacactgatgatgtgagcctgtgagatgagccaatcaccagttgttatgttcgaatctgctttgtgttgggacgctttaatgtcagggtttcactaaataaatgaattttcatatactgaactg

SEQ ID NO: 12711 - DNA, 352 bp, Homo Sapiens
  misc_feature (278)..(293): n is a, c, g, or t
gcagctctctctctcgggagagggaggggacttccgagaggaaaaggcctgcaagagcctttgggttaactgagaaagcacagcccggccaacgcttgggaagaaagacaggcaagcactggaaacaggagctattagggtgaggagagagccttgcctttcacagcacagtgaggatgacattgcaccagggacagagattgtatgtgacaaggctggggctccttctttcctagacaatcaaagtatcagtgatgggttttggttggtgattttgnnnnnnnnnnnnnnnngtatgttatactagtgtatgctgtactgaattgaaataaaaccaaaatctgcatcttca

SEQ ID NO: 12712 - DNA, 989 bp, Homo Sapiens
  misc_feature (588)..(596): n is a, c, g, or t
tatcaccactgcgggaaagactatgttacatccggcatcacaggtgagcccttagaagcatacatctattttggccccgtgtactatcagaagctgacacacatggtgctagataaaatgcatgcccgggcccggggcccacgagccgtccttaccaggcaacccactgaaggacggtctcgtgatggtggcttgcgtctcggggaaatggaacgtgactgtttaatcggttatggagccagtatgcttttgctagagagactaatgatttcaagtgatgcctttgaggttgatgtctgtgggcagtgtggacttctggggtattctggctggtgccattactgcaagtcatcctgccacgtgtcttccctccgtattccgtatgcctgcaagctgctcttccaggaactacagtctatgaacatcatccccaggttaaaactgtccaagtacaacgaatgaggatggaaaaaatgattattaaagagaacaagtgatacatccaatgcaacggaaagcagaagggatttaggactacgtctcctcctgtgaagaattcccttgcgtattctctctctaaaacaaccnnnnnnnnntggagaggctttttatatactctaagactggctaaacaaccttgatcattgagcctcgagccatgggagagatgctgaccatgtggactgcaaggctgcttgattcacagatggatgtgacctaaaggataaataagctattacttatgtgctgatctcttgacattcactcattagaagaccttactccttcaagcaaatgtttggggtcagatttaccatatcttctggctaaccatattcaagattcttctgaaacttggaggatgtaaagaatccattctcatttggtcagcctggcttttgtcgtggtggctggctcggataaattttcccaacaattaaatcttgcctttacacatagttcagcgtctgacgggtgccgagctcgaa

SEQ ID NO: 12713 - DNA, 1197 bp, Homo Sapiens
cagaaaatgccatttattttatcattttaataccggaaatgccagaccaatcaacagggaggacagaccagacacaaatgcctgtgctcacaacacggatgggaggatcatcacggctcagggcacacatgcatttccttagaaacaggcagacaaagagagcataaataccacacaacagccaggctcagggggctgcgggccacagagggctgcgcttcaaaggcagtcagaggcattaaatacgggacctacacaatacactccacttcaccatacataatttatatattaaaagaaaggggaccacagtatctatacgtgcaagcggctgtggtggagaaaatgaacgggggggcagccatgcacgggaggggctccctgtataccctcccgacgcctcgtccccacccttcccacagagtcacttgggatcacaaaacgcatgggccggccggggcgcagcctcgggaggtcctgcctggtctcctcggcatggacctctgagctccccgtgagccgggaggtgcctggaaccaagaacacttgaaccctgcatgtcaccacatccctgggagattgccctggaacgggaccgggccaggcgtgaggggaggaatgtcgcagtggtcacgatggaggagaggaggcgcaagcaccgggaccgggcaggatgcaccctcatgccccaaggcccaggggcccagggagagcacagaccgaatagctgggcatccactctatgcacccaaagccttcaccgcacgaccagcctgtgttgctactgcagactgtccatggggcccgctccggctctgaaactgcactggccatgcttgcggttcgcacatgcagcactcgcgagaactcacggagcgggatccacctagagacctcggatgacatcttcgaaaggaacagttgccgacctcgataagtgtcacacgggcacaacaacctggacaaggcccacacaccacggaatacgcacaaacaagcggagaataataaactacgaccacaacacacctttagcagggccttcaacaaatgacgaagaaaaagctgcacggacgtgaacacccatcgacgatcagacataaagaaggaagggaacaaaaaacatgcactggataccgacgagccacaaccgcaaaaaaaggaagccccaacaaacaaaagaacagcagaatcggt

SEQ ID NO: 12714 - DNA, 555 bp, Homo Sapiens
tagctggtttttcccaccaatcctcacctaacagttactttacaattaaactcaaagcaagctcttctcctcagcttggggcagccattggcctctgtctcgttttgggaaaccaaggtcaggaggccgttgcagacataaacctcggcgactcggccccgtctcctgagggtcctgctggtgaccggcctggaccttggccctacagccctggaggccgctgctgaccagcactgaccccgacctcagagagtactcgcaggggcgctggctgcactcaagaccctcgagattaacggtgctaaccccgtctgctcctccctcccgcagagactggggcctggactggacatgagagccccttggtgccacagagggctgtgtcttactagaaacaacgcaaacctctccttcctcagaatagtgatgtgttcgacgttttatcaaaggccccctttctatgttcatgttagttttgctccttctgtgtttttttctgaaccatatccatgttgctgacttttccaaataaaggttttcactcctcaaaataaa

SEQ ID NO: 12715 - DNA, 1113 bp, Homo Sapiens
tataggggagacacgattctactacgcactacacagactaatacatactattgtatataaaacccgaaatatggatatgacacgtcttatcatggttctaggctggagcttctgaatacgatcctcagctataataaagatgccacaagcagaccaacggataatattctaataccacagctaatcagagaaattggcagcattaatttaaagaagaatgagcctccacttacctgcccatatagcctgaaggccagagttcttttactgtctcatcttgctagaatgaaaattcctgagacccttgaagaagatcagcaattcatgctaaaaaagtgtcctgccctacttcaagaaatggctaatgtaatctgacaactaatagtaatggcccggaaacgtgaagaaagggagtttctgtgctccaactttggcatacctagaaaactgcatgaagctttctcagatggccgttcagggactacagcaatataagtctccccttctgcagctccctcatattgaagaggacaatcttagactggtttctaatcataagaagtataaaattaaaactatccaggatttggtgagtttaaaagaatcagatcgtcacactctactgcacttccttgaagatgaaaaatatgaagaggttatggctgtcctttgggagttttccatatgtgaccatggatataaaatcacaggtgttagatgatgaagatagcaacaacatcacagtaggatccttagttacagtgttggttaagttgacaaggcaaacaatggctgaagtatttgaaaaggagcagtccatctgtgctgcagaggaacagccagcagaagatggggtaaaaacttgggtttccgaacctatttttcctagtgaaagaaatattttatttacttttccaattgacttatattgctctgggagagtaattcagtttagctatttccacctaaaaattactacaaccttcaattgaatctgttgctataacttaagagtgtgacgtgttatgattcacagcagggtgaaactaacaagaacaggacaaaaggaggatggcaacagaagagtaaaggacccaagaaaactgctaaatc

SEQ ID NO: 12716 - DNA, 1331 bp, Homo Sapiens
agacttattaaatttatttcatgtcattgtggtcacttttacagctgtttagacttattttcaatcacattactcttcacagaattcacagaattcattaactaactagtatgttacatccaagggttcttagtagcacattgaaatagaaaagaggcccacgagttgttgcttgtgtgtggaacctgagtctgattacttagacagatgtctagaacattattgctttattaggcctatttttaaaaataataaattattcctaggaaacccaccctgccaggtgctcattctgcgactgctgtgggttcactcagaacatacctgactggtgggtgctgaatgaacctcccacccatgtaccctgctggctccggacgctctgagggctggagcaatgcccctccatgcgtgtaaacattttctacagcttgccactttcctccctggtcttgcagccaatgggctgcagtcatacatgggtctctatgtaaaacttaaattagacctaaacaacagggttcagcgaatgaggactaatgctcctataaaagccactgcccatgcaagggaatacacctgatgcaacaaaaatatcttgagtctccaactataaggaatgtctcaaagaaaatgtccttgatttaattatggtccaaggtggctgctttgcacaagcttgtcagtgacatgaacttgaagacttcatggtagatttcatggctggggtttcttattttgttccatatgagtttctattttgtgaaaaaatatcttggaggttttcgcgtggtccccaaagctctggggaaccgtggataccagggataagcggacgggcttcctcagggtcactggcgctccgaccgcatttgggtgcaggatccctgagagtggtggctgcgtcagacttgcggggatgggagcagatgctgtgtgccaaaatgcaggctgcactccgggcctcagtccagcttcttgttgttgtctgtgttgtgcaccgagagctagcaacagtcgattatgagcttgggctgtcttcctgggtctttcccatcactacttgagtgcccccgttttccagaagctcctcctggcagttcggccaattgacttggccacatgtcttcccccagacaggatccagcactgctggtctttttccccccgaggatctgcgttggaacctggatcctgtcctggttctgattggacgagttcccggcttcccctgacatttccaggcacgttcgtcgaatggttgtgggtgcggactccgcaaggcctcggacggggggccttaacggctagggcggttggcttcccacttg

SEQ ID NO: 12717 - DNA, 481 bp, Homo Sapiens
gaagacggtggcctctgctgccgggccacgttagtccgcagctcacccgaacagaggacaaccctgaggtgtggcatatgggcacctggcactgggagtcgggggagcacgtccaggcgtggtgcatcctggggcagaacgccatggctcctccccgctctcttggcttctgcctgttggggtctcattcctttctgttccccagtgccccggggcggcattttactgctcagaatttggagggagggagcagtaccttcccggagtccacgcatgtgagttgggtcaagtgcattggacctagggaaagagaaagaaagaataaaagctggagagagagtgaagtgaatgcaagatacaaagtgggatggaagaattaaatccagagttccaggcaatcaaaatgagtgcaggttgaaagaaaacaggtgaattttagtggcatatggatgataaagctgtaaataaaattcttttgatg

SEQ ID NO: 12718 - DNA, 692 bp, Homo Sapiens
  misc_feature (149)..(149): n is a, c, g, or t
atagctttgggggctttgcagcagggaactaactgcttcgccacttttggaacactttgctgatggtgtggttggagtttatgaatgtcacaatgctgggggaaaccaggaatgggctttgacgaagaagaagtcggtgaagcacatgnatttgtgccttactgtggtggaccgggcaccgggctctcttataaagctgcagggctgccgagaaaatgacagcagacagaaatgggaacagatcgagggcaactccaagctgaggcacgtgggcagcaacctgtgcctggacagtcgcaactgagtgacacccagcgacaaccgactggggagtggtagaagcaactgaacggatgcgtgcgagctgaggacagggcgggaggagggggcacacatgccccaggggagcgaggagaactcttgaaatctccattttcaatcccttcgaaatcacgtatggtttccacaaagccgagtcgtgtcacgtggcaggtttacgtcaatagtccctctctctgctcctccattcgcaagtgtcttcctgggccagactcccctccacctcatgtacttgctatattgaggatgaagttttctatggtgggacactaaatataaagctatatagagaaagaatgtacggtcagttccctatggtttctgtagatcatcgtcatcttgtatattccccc

SEQ ID NO: 12719 - DNA, 910 bp, Homo Sapiens
  misc_feature (341)..(349): n is a, c, g, or t
  misc_feature (406)..(470): n is a, c, g, or t
  misc_feature (678)..(705): n is a, c, g, or t
ataatttttttaacactgtaacaactttgagaccacctctgaatcgtcgcattataactgttgtagaatcttaaatgttaccaagatgattccaatgaggggttggaattaaatgcattgaagtagtgaattcatgtgtttgtttccaacttgattttccaactctaataaaggtttctgtccatcttattacatttgtgtagtaaatggtacttcccagcctctcttttgccccattctggaatactccccagagtttgggggtgttcatgttttatacatgtaagtctgttggcatgaaggaccattttctacataatatgacatggatacttgacccnnnnnnnnntgtttagtgctaatgagcagaaaatgaatggttccataataaattgatatctgattnnnnnnnnnnnnnnnnnnnnnnnnnnnnnnnnnnnnnnnnnnnnnnnnnnnnnnnnnnnnnnnnnaaaaatatatcccacgagaggggggcccacagtttaagcggggcgaccaaaggtttcttggaacaaggggggcccacataagagggagagggcagtattataaaacagatgaagcaaggggcgcggggtttacaaacaagtgggtgagggggaaaacaggtgaacagggggaaacctgcgggagagagagaaaaccctcaagacggcnnnnnnnnnnnnnnnnnnnnnnnnnnnncaacaacgtatctcctacagagagaaagtttttatgaggcgccttaagaggggagaaaattgtacaaattttcaagggggtggataaatggggggggtaaaaaacacgagggtggaacaataatgtgcgatcggggcatagaaaaaattgtgcgctacaaggagaaattatgtgattcttgatagaagatttttttacagggagc

SEQ ID NO: 12720 - DNA, 1039 bp, Homo Sapiens
ttccgggttggcttccttcctgggacgctggcacagaggcacggtcgccacagtcccttggatccccgaaaggcggcaaactctttgtccttcccagtgggttttgatcaatacaatcaccccacgttgcagctgtgagtcctcgttcagcaaacttcaagaaacggagcagatggtgctggagttctgactctgtagtgcttgctgcctctgaatctccttcgaaatccgtcttttaattcctagtaagtacagttctctatcaaatttgccagctgccaacggaatgttgtctcgccccggcctcactttcacccggaagaggccatacacagggcggtggtcggacgtcttgatcccggggcaggaagagtagctcacaggacagatgtcacccttgtggcggcttctgtacaagacgcggtccgtgtatgagggcgtcctctgcttggaggtgctgtcgtacgtgtccttcccgatgtcaaacttgtatgatgggaggaagtggatgtccggctcctggaagcccttgaagatggaccctttccgcatctcccggatgagctggtcaatgctgcaagcagcgccggcacggtcccaccaccagggccctggcacaggagggcgtccacgactgtgcgcccgccactcaggcggaagttgaagtctccaaaccagaacacctcatcgaagcgggtggtgacgtccgctgcgctggagcgataggggttggtgtcgggcacatttctgggcaggaccagggcttgtacagtcctggtgtagtccagcagccgctccgccaccttcccgtcgcctgaggtgaagtgggacgtgatgaagaggaaggaggtgccaaaaaaggtgaagctgatgcccaaggcccccttggtcttgatctgagacacgatgcgtgtggtcaccgtggagcactccacctctgagcagaaccagatgaggtccctgcggatgaagagcgacatgtagagcacgccgtggccgccgaggacagcagcacatagtgcgggcccagcgtctcctg

SEQ ID NO: 12721 - DNA, 438 bp, Homo Sapiens
aaggtgacctacggctccttcgactacacctcgctgctgtacctctccaactacctggaggacttcggcggagggcggttcatgttcatggaggagggtgccaacaagacggtggagccgagagctggtcgcgtctccttcttcacctcggggtccgagaacctacaccgcgtggagaaggtccactggggcacccgttacgccatcaccatcgccttcagctgcaaccccgaccatggcatcgaggacccagcgttcccgtagccagcagccgggccaaggtaacttcaggagggcccgtgtggaggcagccgcgccagtcgtgcacccacccccacgtccacccgctcctgttgcacagagtgccttaggaattctctgattttgatttgctgacgtgttaatcttttcatctgtgagtaaatgaagggaaccagc

SEQ ID NO: 12722 - DNA, 429 bp, Homo Sapiens
ggtgggactcccgatgctagcaggggtctctgatgtatgacgcttcccgaagaccctcgctgggagctgcctcgggacagactggtcttagtcaaaccccttgggagagggctgctttgtggcaggtggtgttggcagaggctatcgggctggacaaggacaaacccaaccgtgtgaccaaagtggctgtgaagatgttgaagtcggacgcaacagagaaagacttgtcagacctgatctcagaaatggagatgatgaagatgatcgggaagcataagaatatcatcaacctgctgggggcctgcacgcaggatggtcccttgtatgtcatcgtggagtatgcctccaagggcaacctgcgggagtacctgcaggcccggaggcccccagggctggaatactgctacaaccccagccacaacccagagg

SEQ ID NO: 12723 - DNA, 417 bp, Homo Sapiens
gcccaaataataattgtgtcagcattttcaactaatggttattcatccaacccttggatctctttgagtctactgataatctccactggaaaggtggaattgaaatgtggtccacattttaactagctatttcctggggctgtatttttcagaatatgctgagctacatttgctgcaatctgttgctattcagagtttaagtttcaggagaaaacaggaacaatagaacactctgcctgttatttttgttgtaatcaagcttttccacagttcttgaaaagtactatgtttcaaatttcaggaacaccagcgttagctgtaaaagttgcagcaatttattggctagtcatagaaaatttttgaacttttaactgtattttaattgatgtttattaaaaacactttgctatcagaaaa

SEQ ID NO: 12724 - DNA, 523 bp, Homo Sapiens
gttcgcggttgccgtgaagattccatgagatacacgtgtaaagggcttagccaagtgccgtgctgggcacataataagcagtcagcaacgtctgctaatgatgcagggagggcaggtgccccaaatcccagttagccgacagggaaagtgaggcttggtgatttcaaggctagtaaatatcagggacaaaaaccaaggtcacctgacccagaaatctagggctctgagctcacctgcaccaagatgcctctctttgttgggcacccccttgggaggaggaaagaaaggacagtggtacttgttccatgtctttggatggcaaaacccaccttctttgagcagcctccccagctgcctctggaacacccaacaacagacttaggggctggctctggagttgcgtctatgccgttgtctgcctccaaccccaggcccccacatccacccctgcagcctggctttcagagagtccttctaggatacaaccgtagagtaggaagttagcctttgtgatctcagcctc

SEQ ID NO: 12725 - DNA, 437 bp, Homo Sapiens
aacgtgtccgggggtgatcatggtaggcacgttctccttgctctggaggtttgtgaagtacagctttccccgctcggccttcttcctctctgcatcgaggaacattaggcgagccacgttgtaacacgggcgggcttcaagaactgcgcagttggggtaggcttccgtcaaaaatgcttcttgatcttttctgactctgcatatttggagattccattgatgaagagggtccgcttcaccagatcatccttcccttgtagcgcattcttggaggtgtgtcttacagcatgctgtacaacggtgagcaagcagatacagcaaggcgaacggaggtgtgcagccatagcaggttgttccctgattttcaagttggcaatggtggttctcctcaaagctggtaacattgttcttccagcaggtcccctgagaagttgaca

SEQ ID NO: 12726 - DNA, 596 bp, Homo Sapiens
  misc_feature (211)..(211): n is a, c, g, or t
agaagccccagggcagcctcgtgcgtgtgatccagcgagcgggcctggtgttccccaacatggaagcatatgccgtctctcccggccgcatgcggcaatttgacgacctcttccggggtgagacgggcaaggacagggagaagtctcattcgtggttgagcacaggctggtttaccatggtgatcgcggtggagttgtgtgaccacgtgcnatgtctatggcatggtcccccccaactactgcagccagcgcccccgcctccagcgcatgccctaccactactacgagcccaaggggccggacgaatgtgtcacctacatccagaatgagcacagtcgcaagggcaaccaccaccgcttcatcaccgagaaaagggtcttctcatcgtgggcccagctgtatggcatcaccttctcccacccctcctggacctaggccacccagcctgtgggacctcaggagggtcagaggagaagcagcctccgcccagccgctaggccagggaccatcttctggccaatcaaggcttgctggagtgtctcccagccaatcagggccttgaggaggatgtatcctccagccaatcagggcctggg

SEQ ID NO: 12727 - DNA, 434 bp, Homo Sapiens
cccaaacggggtcgggggtggtcgcagtcttcgtgtgcccagggaccctgcagatgttgctggagcccacctcgacacacgagtcagagcaccagtctggcgcatggtgcaaggacccgctgcaggcgggtgaccgcatctacgtgatgccctggatcccctaccgcacggacacactgactgagtatgcctcgtgggaggactacgtggccgcccgccacaccaccacctaccgactgcccaaccgcgtggatggcacaggctttgtggtctacgatggtgccgtcttctacaacaaggagcgcacgcgcaacatcgtcaagtatgacctacggacgcgcatcaagagcggggagacggtcatcaataccgccaactaccatgacacctcgccctaccgctggggcggaaaagaccgacattgacctggcggt

SEQ ID NO: 12728 - DNA, 413 bp, Homo Sapiens
acatctgtgagggcacggccatggtgacttgtacttagtcagatacaccccgaaggctcagctggcccctgccttctcaccaccgtcaaatctgtccacacacatgcccctacctcctagatgtatctgcatcccgaacccctgcattgttcatatgatttctcaaggactaaccaccctccacacctattgggctgtttgcctactcctggctcactccatcagaccttcagcagaggactccagaatgctttgtcaggaaacaggagtgtggagaccagtgaggcggctgacacggtcctctatgcaacatgtgacggtggcttccactaagctgtcactccccattcccactcccagccgtagacaactgctaatctattttctggaaatagaaggatcttatttcctat

SEQ ID NO: 12729 - DNA, 393 bp, Homo Sapiens
  misc_feature (22)..(22): n is a, c, g, or t
  misc_feature (34)..(34): n is a, c, g, or t
attggctgtggcctccgccccnactcctgtgacncctgctgctcatgttaccacacactccactctgacctcgtccctcggccctcagggcaactctccaagggggacacactacacacaatttacaaaaaggagcctgaggctcaggggagaaattgtgtgcaaagatccaagctggggccatggaccagtctggccctctcccagcttcacccaggtggaaggctgatcccctccccacaagacctggcaggtgagaaaggggggacaaaacacccacattccgaccacattaaggtctggagtgggacccccaatcccatgtcttcagcatcccatctcacagactgcatctgcagatgcacatgtgcacagcagtgtactcaccaacaa

SEQ ID NO: 12730 - DNA, 494 bp, Homo Sapiens
  misc_feature (437)..(445): n is a, c, g, or t
cagtggggggcctgcaggaagctcactctgtgagagtaagcctgcaaaactcagtgtgcaggcaccagccactcagagaaagtaaagaaaccctgctgatgagactctggacacccgctgagtcccagagccatttcctggctccatccctaagccccccaaaggaccctgcttgactacagagcacccccatgccatgctggcatatgaacatggggaatcctggaatgagaaagtctttgagctttcagggacctacatgaccaccttgtccagtttctccatttgtgtggagataatccaagcaagacaaggagggcttgggcaatcagaaggttttggagctcaggcctgccaaccctcatttcattcagactggtccactgtcacctgtttcagatatggtgcttctacgtaaacacttatttgaagactgnnnnnnnnngcatttgaaaaccattaaacttctccaaccactcatctttcactcgtgc

SEQ ID NO: 12731 - DNA, 737 bp, Homo Sapiens
  misc_feature (595)..(628): n is a, c, g, or t
ctgcagtcgggaacagtcaggactttgcacccagttgttttgggtgtttggccgacccttcctcttgtgtgattcatggacccgcagcattgcatcacccgtgagcttttggaattgaagactctcagggctcacccgggaggacctgctgggccagaatctgcattttaacaagatacccaggtaatttgtgtacaccttcagatctgagaagtgctggtaggagaggctttaaggtggtaattagatcttttctccacctgcaagaatcttagtttcttcatgttaaatctattaactgtggcaatggcatggggggttataaaacaaaacaaaatccttacatcaggaatgcaccctggcgtgttatggatgtgggtgaaatgaaatgtctggaatttgctttaaaatatcctaaaatagcaagaaggaaaagaaaagtgggtactggaatgagattggcgaaatgttgacaagttcttgcagtgggatgatgggtgcatgggggttcatggtataattctttccctgctttttgtgtatatgggaaatttccataatgaaaagttagaggtcgggcacggtggctcatgcnnnnnnnnnnnnnnnnnnnnnnnnnnnnnnnnnntagactgcccgaacccaggagttcaagaccatcctggacaacacggtgaaaacccatctctactaaaaatgcaaaaattaggcatgttgacaacatgcctgtagtcatg

SEQ ID NO: 12732 - DNA, 190 bp, Homo Sapiens
agagaggttgcctggggctgtctaggcttcagcctgggaaagggagcacccggggaaccaagacaaggtgcagggctggagacagctttgggctcggctgtcggggaagcatattggcaggaggggcctcctagatgtctggtcagagatggccacggggccaaggacatatgagaggcagctgagggtt

SEQ ID NO: 12733 - DNA, 408 bp, Homo Sapiens
  misc_feature (77)..(77): n is a, c, g, or t
tctggggctcaaacagatacttgcacaccaatgttcacagcagcgttagtcacaactgccaaaaggtggaaaagacncaaatgtccgttaatggatgaatgtataaacaaaatgttgtatatacataaatgaagtcttattcagccttacaaagaaaggaaattatggcacatgccacaacatggatgcaccttgaaaataagtgaaatgacacaagaggacaaatagtgattattccacctctatgaggcacctagagcaagttcatcaagataaaaagcagaatgcaggttcacagaggccgcgcggaagggaagtatggggagtgaccatttaatgggtacagagttcttgtttgggacaatgaaaagaattctggaaatgggcgtctctggttttgcttggcca

SEQ ID NO: 12734 - DNA, 433 bp, Homo Sapiens
ctggccatcggattggggatctatattggaaggcgtctgacaacctccaccagcaccttttgatgaagaactggagtctgacttggttcgttagtggattacttctgagcttgcaacatagctcactgaagagctgttagatcctggggtggccacgtcacttgtgtttatttgttctgtaaatgctgcgttcctaatttagtaaaataaaagaatagacactaaaatcatgttgatctataattacacctatgggatcaataagcatgtcagactgattaatgtctactgtgaaaatttggtagtaaattttcatttgatattagatataaatatctgaatataaataattttaatatactagtcatgatgtgtgttgtattttaaaaattatctgcaaccttaattcagctgaagtactttatatttcaaa

SEQ ID NO: 12735 - DNA, 479 bp, Homo Sapiens
  misc_feature (404)..(404): n is a, c, g, or t
  misc_feature (446)..(448): n is a, c, g, or t
tgggccctgatcacccagttacacaaatgagtaaaacaccggccttgccttcaaggaactcaagagaccctgcggcagccacagtcttacagagcaattaccaccctgggttgcaagagcctaacgtagggtggggacaggggaggtacaaaatgctatcagagctggagacgaaagtctctaatactcggagtggggctgtgaaggtgactttaaagttgtgccttgaaggaggccaggagcgcaccaggacaaggccatgggaaccgccggtgcaaagcagggagacctggaacagcaggctgggggggaccacgtgactgaacagcacagcgtgaacccaaagagtgtttggcttaagggtggggagagctgagccgactccctgaactgctaggacttanacctgagaaggcccagcagcgttttcactagaggattgctgnnngacagattgtgacttagaaactgagccgatg

SEQ ID NO: 12736 - DNA, 431 bp, Homo Sapiens
  misc_feature (409)..(409): n is a, c, g, or t
  misc_feature (421)..(421): n is a, c, g, or t
caaggctcaaactgtttagcacgaatcactatccttcacctgtacaaagcattctgccacaccaggttataggacagattgccaccttctgtctcccccctcctcccacagactacctactaacagttcattcttcactcacttttctgtctctgaaacatccctttctttagttttctctaaccattattagcacctaatcccacccagattaaggcacctagagtgcccccaagacacaaaggtttcaagtcagtgaaagaaggtctgaccctccccacagatggctcacctttttcaggcaaatatgctcccaatggtggaagctaagatgatcgcaaggataatacagcagatcatgatcatgatcttcttctgctcatccagacaaggaaagaatacatgaganacatcatcgcanaaagtattct

SEQ ID NO: 12737 - DNA, 480 bp, Homo Sapiens
  misc_feature (67)..(79): n is a, c, g, or t
ggtaaactgagccatgattgcagcactgcactccaacctggctggcaaaacaaggccctgtctcttnnnnnnnnnnnnnttctatgaaattagggttaaagaataattctgaaagcaagtttggattgagatatgtcaaataggttaaacaaaaattaactctcaggattcagaattttgttactcatgaatgacacatttcaagggggaaaagaaatgattgaggttttacatgatatgcttgtggctcagaaacccagcagtgaagtgcagctgttaggaacatggacttggggtatggtgtgaactgactactgagtggcaggaccttgggcaggtcacttagcctctctatgtcccagattccacacctgtactgtgatggaaatcatgaacatggggttttggggactgcagagttaatgctgcttcgaacagttcctaccacacgtttccatgacctgtaagtatctgctgcca

SEQ ID NO: 12738 - DNA, 365 bp, Homo Sapiens
actacagcctggtggtgcgggcggccgagcgcgctcgggcgcatgaccagaacctggcaaacctggccctgcaggcgctgcgcgacggggcagcggctggggaccgcgaccgggacagttcgccgtgcgtcggcctccctgcggcctcccgggggccccccagagcaggcgcccccgcgtcccggacgggcagtgctacctctgcgggcactgtcggggagcagggccggcccggcacccacgagcggccaggagccaagcccagggctggctccgagaagggcagtgccagcagcagggacgggaagaccaccgtgtggatctgagggcgctggcttgcgagctgggccagggaggaggagggt

SEQ ID NO: 12739 - DNA, 618 bp, Homo Sapiens
  misc_feature (403)..(470): n is a, c, g, or t
cacaccaccaatgccgcagctagttattctgtagttttctcatagagacagggtctcaccatgtcattcaggttggtcttgaactcctgggctcaagcagtctgcctgccttggcttcccagtgctgggattacaggcgtgagccaccgtgcccggctaaaaagtatttttaagttctgcatattgcttatttcacttaacactatattagagattgttttatatcaatacatatagatatgcttattcttgttgacagttgcataattttccattaaattgatgtatcatgggcagttaaccagttactcgttttactcttagcataactttagggaacaatgtggatgttttgtggttaaagctattaaaacagtggttcttgaccaaatgtgtgtttcannnnnnnnnnnnnnnnnnnnnnnnnnnnnnnnnnnnnnnnnnnnnnnnnnnnnnnnnnnnnnnnnnnntggtctccgattaagataaaccctactttatccaattctgtgctcctcttaatatcatatacagataggtttttgttttgtctgtgattaaatgtatcatctaagatcctacctactgatcaaaacgcccatattaaagtattgggtt

SEQ ID NO: 12740 - DNA, 436 bp, Homo Sapiens
atcaattaattaactttccaaagggactgataaaaaccaaaggatctggaggcattgctatcccatttgtggacagatttcatatgaagttgttttgcggtgtcagccttttcttcagagcatttgtttgactgacttccaaagcaatcaagagagccacgtctagcagactttacaataaaaggtcaatatgaaggactgtaattcctagcagtttattgagaatttcactggaaatggaccatgtgttgcaagactaattggctataattatatcctatcaaagaaatcgatacgtaatagcagattgttttatattcattccattttgatggtgttatttaaattgattctctgttataagagtaaactgatgagttgaagtctggagagaataacattcattataaataaaattattctgtgatcttttttc

SEQ ID NO: 12741 - DNA, 536 bp, Homo Sapiens
  misc_feature (127)..(160): n is a, c, g, or t
tttaatttttcagttgtttattggaaactatagattttttttaaactcactaattattttgccatacaagagcaaaattcaagtaatacaaatatttaacattttggtataaaattaacaatatggnnnnnnnnnnnnnnnnnnnnnnnnnnnnnnnnnnttttaacaataacactgtgtataaccatcttctattcaagtgaccatccaagctgatagtttattttccctttgttgacattttttaaaaagatagccctacactggagcaccaaaaagttttttccttcttttttaaaaggttggaacccttttatttacagatactcttctcagtactttaagtaagtgtgatgaaggaatcatctagcaacttccttcttagaaaaaaaggaagtgccttcatatttccttgaaatttaaactggttccattctattctaagcaaaaattaaaaggacacagttcagaagagctctttcagcaaataaataattgtttcacaaaagcactgctgtaaacaagatcactttgat

SEQ ID NO: 12742 - DNA, 466 bp, Homo Sapiens
gtccagtttagtactttttcttttcgtgtattcaaggttaaacacccaaacatttaaggatatgttgaaactacaccaatagagcatttcatatcataattaaaatgaatgttaggcttcttgtggccagttaatagttgatgagattggtgacattatttattgccacagcctattgtataaactatgcagagttaaatatttgcttgtaaaatattagccaatgttgtcattattttgatgtatttccttggttatgaccaaaaatatgttgagatactgaaactaatgtctgtgtgtttaaatgtttaccagcaaattgtcttatcatgttaatgagaatgttcaatgcctgtgtggtaaatagtaaatacaatggcataaaagtaactttctctgaagatgtgatgttcaggctgtgaaatatatatgtaaaagaaaaataaatgttatttgttagaaaaaa

SEQ ID NO: 12743 - DNA, 276 bp, Homo Sapiens
tccaaggccttagaccttacccagtgttataaacaaataaaagacatgcaagaacaagcccagtttgaaacagaaatgcttcaaaagaagattgtaaacctacagaaaatagttgaagaaaaagtggctgctgctcttgtcagtcaaatccaacttgaggcagttcaggaatatgcaaaattctgtcaagataatcaaacaatttcatcagaacctgaaagaacaaatattcagaatttaaatcaactaaaaagatgagttgtacctcacggcaac

SEQ ID NO: 12744 - DNA, 545 bp, Homo Sapiens
gcttactctgacttccctggggtgagtgtgctggccggcttcacttaaccttgcctagtgtatcttatccctgcactgtgttgagtatgtcaccaagagtggtagaaggaacaaccagccaatcacgagatacacatgggagggcatttgcattgtgatggaagacagagaagaaaagcagatggcaattgagtagctgataagctgaaaattcactggatatgaaaatagttaatcatgagaaatcaactgattcaatcttcctattttgtcagcgaagggaatgagactctgggaagttaaatgactggcctggcattatgctatgagtttgtgcctttgctgaggacactagaacctggcttgcctcccttataagcagaaacaatttctgccacaaccactagtctctttaatagtattgacttggtaaagggcatttacacacgtaactggatccagtgaatgtcttatgctctgcatttgcccctggtgatcttaaaattcgtttgcctttttaaagctatattaaaaatgtattgttg

SEQ ID NO: 12745 - DNA, 461 bp, Homo Sapiens
cagaattcgagacatacttaattttgaatttctccttgccacgttaataaagccaaaagcagcgggtgctattcgtggcaacacacttcactgaacccacttgcttccaaaacgatgccagcccgaggcactgttacgccagcagctgccacatgggatggtggctcaggcgctccctccaggattctgcccctgcctgtccacagactcctttgtgctggaacctgggctcctccagctgccaggcaggagtcggtaggactgtgcctgtgcctccctcagcggggccctgggcggggttccaaggcctgcgagctgggaaaggacagatgaggggacctcgtgccttcttgctgtcatgcaatgaccccgccttatgttgccgaaataagcaactcttaggtttgcctgactgccttatgctggtaaagaaaagggattcaactgtctcttttccaaat

SEQ ID NO: 12746 - DNA, 439 bp, Homo Sapiens
cagtgtcaggtctgggaaaacagttgctgatgttttcatggagtgtgaaatactgaaagctgcgggcatcccttggggaccactgacccacactttgaagaaccctcaatgagtctgaaagaggttcagtatctcttgggaaggatgtgttccaggctccaggcctagtcttacatggccagtggggttgaaagactgtgcccctgcaatggtcttttcctaagacagttgaacaaagttccaagtctgtctgtcctattttaaccatctttaagaagcacaaaggggatatgagaaaaacagatgctgaaatgaaaattttaactgatatcttacttatctcacaagtcgtgtaaagaaagaaatgatatggtcgaatattagattagatggtttaatgatgttttgagtgttatatatgagctatgatgagacctag

SEQ ID NO: 12747 - DNA, 726 bp, Homo Sapiens
  misc_feature (70)..(70): n is a, c, g, or t
  misc_feature (80)..(80): n is a, c, g, or t
  misc_feature (91)..(91): n is a, c, g, or t
  misc_feature (93)..(93): n is a, c, g, or t
  misc_feature (109)..(109): n is a, c, g, or t
  misc_feature (195)..(195): n is a, c, g, or t
atatctctatacagcttttctacccctttccccagacggctctggcaagtgaagggaggccagtcgctgnaggacatagnaataactgtgnanactgtactcattctgnaggagaaggagcagaccaactagaaaagaagggagagctccctgtttgcatgaagtcagttatgctatgaccttctggcacaatanaggcttcactttcaaatcacaccataccttgattgagctcatggcagtaaactttgaacattgatatccatgggaataggattagaaaaggattgctttctatatataataatctgtggactgtgccattttacagtgtaccaaatgagaatgaggttgaaatgtatgcagtaaggtactcagtaattaattggtattttttcccagctgacatgatttctcagtgttagaaaacaaacccttagaactttcctttctgcctcttcaatccatcttaccacacaatatttcatgattcaaattcttcaaagtcttatacgcaggaatgtttattctgctgtatttctgtgaaattaaaaacttggaagaagcttcaaagctcttggaggctttaaagttctttctgttgggtgtgcattacagtttacttaactgatgtttgcgatttatataattttgccttgtattaaatgttacaaagttccaaatgaatcagtattttaaaaaataaaactatgaaagcattaaaaa

SEQ ID NO: 12748 - DNA, 302 bp, Homo Sapiens
  misc_feature (111)..(132): n is a, c, g, or t
cctttctttgtttcttttcttttcccccaaacaaccagattaaacgctgagcgcttttaaaatatcaaaacttgttcaagtcataaaacaacaaaacataagttttatttnnnnnnnnnnnnnnnnnnnnnntagtaaattcccagaaattcagtgtttagacgagggaatttaattcctattttgtccatgttggtgatgtactgtacttcccttccttttctctgcatcccccatcacctcatagaagactctttgttgatcattgtatgttaataatgtataaaatggctatcttgtaa

SEQ ID NO: 12749 - DNA, 183 bp, Homo Sapiens
taagccagcctttcagaggattaattcctgctggaacacagcatagcatgattgcaaccacaggaaaaatgtctgaaatggaactaaaagcctttggaagtggcattgatataaaaccaggcacacctccaatcgctggtagaagaaacacaccaacatctagtcccttccgggctacttcta

SEQ ID NO: 12750 - DNA, 750 bp, Homo Sapiens
atatggaaagaccatgccagcctggtgcagtaattgaaagcagtgctgaggtctccaccaggtgccctggtggtggcagttgagggtgcgggtctcctggccggggtggtggctggcctgctgaaggtgggctggcagcatgtacccatcattgccatggagacccatggggcacactgcttcaatgcggccatcacagccggcaagctggtcacacttccagacatcaccagtgtggccaagagcctgggtgccaagacggtggccgctcgggccctggagtgcatgcaggtgtgcaagattcactctgaagtggtggaggacaccgaggctgtgagcgctgtgcagcagctcctggatgatgagcgtatgctggtggagcctgcctgtggggcagccttagcagccatctactcaggcctcctgcggaggctccaggccgagggctgcctgcccccttccctgacttcagttgtggtaatcgtgtgtggaggcaacaacatcaacagccgagagctgcaggctttgaaaacccacctgggccaggtctgaggggtcccatcctggccccaaagacccctgagaggcccatggacagtcctgtgtctggatgaggaggactcagtgctggcagatggcagtggaagctgccctgtgcaactgtgctggctgcctcctgaaggaagccctcctggactgcttcttttggctctccgacaactccggccaataaacactttctgaattgaa

SEQ ID NO: 12751 - DNA, 830 bp, Homo Sapiens
ggcatggacctattgcttgcctgccctctctcctcctgaactctctcatctgcagtggggcatcgtctgtcttgccttgtcactccttgctcctctccctcctgcctcaactggggctgctggaagggggccctctggattccctttggaggcatcaggttctgtgcacaacttgtgtgtctttgggagccctgggtctttcccacctgcctgttttcatatccctcagctttgggggccccagggaattggaactcttcccccaagacagagcaggggtgaactgtagcttgatgcagtaatctgggacaagactggttgctagcacatactttattatcccccaaggatggtcagccatttcttcccacagccaaagccccatccccttcatttccctccagtccctggaggggcttctagtattactgggacaatgaccacgctgcctgtttgtctgtgagttacgggcaaccagcctcttcagcctcacacccattcccctgagagcaagaagcctgtgtggtctgggccagtctctgccatgtcctgagtctgcttcagtctggagctgtttgtggggcgagtgccatgtggacagtggtggatgatgtgtgtgcttcaggctgctccctgacccctctgacctttccacgagtgtcacatgggaatgtgtggggcgcaggggcgggtgcggagagagcacctttttgcttttcgagctcttgaccacctccaattgtgtaggtccctccaagctggggcttgggactgcttatgatttggggatcaagcctccatggtctattcttgttgcctgtccgatgcca

SEQ ID NO: 12752 - DNA, 489 bp, Homo Sapiens
cgctgcccttcacaccttttggtgctacccctccccagagttaagcactggatgtctcctgatccaaggctgggacccctacccccaccccctttgatcctttctacttccacggtgaaaggactgaggtcggactacagagggaagagggacttcccttgactgggttgtgtttcttttcctgcctcagcccagctctgcaaatcccctccccctgcccctcacctccccaggctcaccttgccatgccaggtggtttggggaccaagatgttgggggggtgaatcaggatcctaatggtgctgccctatttatacctgggtctgtattaaaagggaaagtcccccctgttgtagatttcatctgcttcctccttagggaaggctgggatatgatgagagattccagcccaagcccggccccccaccgccaggccatagggcataatttgcatctcaaatctgagaataaactgatgaactgtgaaaa

SEQ ID NO: 12753 - DNA, 421 bp, Homo Sapiens
  misc_feature (37)..(37): n is a, c, g, or t
tagctttgtcagagctcatcaacaaagaaaaagaaanagaggtacagaaagtccctcaatacaacaagttgtctcaaatcgtcacagtgatacagacttatcagaaaccaatgaaacaatacaaattaaatactaataaaataaatactacagaagacagaagaacacaggggaatggagttggggggcgctcagagatctgggattttctcatttctcctcgggacaggccaaggccatccagggcccaggtttggtcttggtcatgaacaaggaggccagtccaagggaccccggcgccaccctcccaccacccccgggacctcttgtcctcagacatggagttcaactttccacccccatcagcaaccacgataaccaatgacgacgacagggagatgagaactaattgtaaccaaaa

SEQ ID NO: 12754 - DNA, 442 bp, Homo Sapiens
aagagaaaacactgaaaattgaattcttatcttccagaggctaccaattattataatggaccaatacttttacctttgtcctctaaagatcagattagttttatttggttcacttacgtgcttggattatcccctctgaattatagaccgagtcttgttgtttagcctaagagaagatttatgtagtaatttcttctcaggtatggaaccacggtcataactaacatgttggccagaatagaaccactggttaaacatattttattcaccattaagtgatctttatcaatattctggattagacaacaaattacctttctgggtgtttcttgtaaactatactcctgtttgaatgttaaactttgttgctaaagtttaattttaagatgtttgaatgttcagtttatgtatttgaactacaataaaccaaccctttttatat

SEQ ID NO: 12755 - DNA, 391 bp, Homo Sapiens
ggtgggtaggggcagggatgagccggaataatctcttccaccgaatgagtaagtaggttagtcttctggactgccataaaaggtctgtaaaatagttttaatcagacgctggtacagaagagaaggagggagtgtggggggaagaaagttgtaacatatttgaagttctttgggttgttgatttctctttcagacccaccgtgcggaggtcgtttgaataccaaagatgctggctatatcacctctcccggttacccccaggactacccctcccaacagaactgcgagtggattgtttaaacccccgaacccaaccagaagattgtcctcaaattcaaccctcactttgaaatcgagaagcacgactgcaagtaagcgccgtcccacagtt

SEQ ID NO: 12756 - DNA, 460 bp, Homo Sapiens
gctcggatcctatccggttcggggttgctgctgtggttgggactccagcaatgctacttaagtttggaggtactactggaaatgttggtcctgtatgactaaagtttggaggtgctgtgttggatccttctgtcatttgggcacgtctaagttcagaaaaggcctgttgtagactaagggatgatgcagagtgagacaagttcattccagggctctgagctgtagaggcagcaactgtatctgttatttcactggggaaaacttttgattctcgtaatcggctttctggcacaggactcactataaaccgccttcccgcagaatgaacaacttgagttaaagaactggtaggaatgcctatttgctgtggcatggaagacgcaggaattgggtgtttgaactctccttccaatttctgagaacctgaaaagccatagtcatcctttccttgtagactctt

SEQ ID NO: 12757 - DNA, 342 bp, Homo Sapiens
gagtggataaatgggtgggaacggggtaggtgaatttgcctgagggcagaagagcacatcacaggtgtctcttcagcagtgaagcaaacaaggcctcaggcatctcaccaccaaaacgtaccagcccccttggtgagccaagtaccaatcgatgccggctgctggcagcacagggcacacacagagaggggacaggacaacatcatgcggcccctttcaggtccatggtcctggcttctccagaaggaggaggtcatctagccatccacccctcaggtggtaactgaacacccatcatgcgctggggactgaggtgggcttggcaaccccggacacggatac

SEQ ID NO: 12758 - DNA, 421 bp, Homo Sapiens
cctatccggtccggggttgagaactgatgtgtgactgatatgactgcctttttatgcgagagggcactggggctttaaaccatgccgcgtcggggcctgcgaaacagctgccctgctacagaggctggaggggaaaggtctcgaggcgagagagacaggagggaggccgttgctcacagacctcagaagcgatcatgagactggaaacagagctcagcagcacaaatggttacagacacacggctttagtaactgatcacctaaagcagaacctgcctcaccgcggcaggctctgtgcacacattcagaccaccagctgctaagcgacaccccgaggaataaccaacatcgtgcccttcctgaggaccctgaaacaccaagcccctctgcaggatgagaccagggggtctgctcaaaacag

SEQ ID NO: 12759 - DNA, 418 bp, Homo Sapiens
gtaacaaacctgcacgttgtgcacatgtaccctagaccttaaagtataataaacaaaaagtaaacaaagaagaagtaaataatagcatccataaaaaggaatgaaagcatgtcctttgcagcaacatggatgcagctggaagccattatcctaagtgaattaacacagcaacaaaaaactgaataccacatgttctcatttataagtgggagctaaacatcagggacttgtggacataaagatggcaaaaatagacaatggggactattagacaggggcatgatagagggtggcaagagttggaaaactgactgttgggtactatgcttagtacctgggtgatgggattactcatacccaaacttgagcatcatgcaatataaccaggaaataaacctgcacatgcaaccctgaatct

SEQ ID NO: 12760 - DNA, 229 bp, Homo Sapiens
cgtatccgtgtccggggttgggtgggcggacacccagcccgtgcgtcaaggcccacctatctgagcggcagggtagggccatgcattcaggaggcgcagtagtgatggctccgaggaacgtcttgtctgccagagctgcctgcccttgctgtgagcgcagccccacgtctacctaagggagggatgtgacaggagcgaggacttctggtgccttctcaggtggcccgct

SEQ ID NO: 12761 - DNA, 783 bp, Homo Sapiens
gccgccggcgcgctgctgtgggtcctgctgctgaatctgggtccccgggcggcgggggcccgaaggcctgacccagactccgaccgaaatgcagcgggtcagtttacgctttgggggccccatgacccgcagctaccggagcaccgcccggactggtcttccccggaagacaaggataatcctagaggacgagaatgatgccatggccgacgccgaccgcctggctggaccagcggctgccgagctcttggccgccacggtgtccaccggctttagccggtcgtccgccattaacgaggaggatgggtcttcagaagagggggctgtgattaatgccggaaaggatagcatccagcagagagcttcccagtgcgactcccaatacagcgaccagttccagcacgaggtttatagccaatagtcaggagcctgaaatcaggctgacttcaagcctgccgcgctcccccgggaggtctacttgaggacctgccaggctcgcaggccaccctgagccagtggtccacacctgggtctaccccgagccggtggccgtcaccctcacccacagcatgccatctcctgaggatctgcggctggtgctgatgccctggggcccgtggcaactggcactggaagtcggggcaccatgagccggagccggtcttgggaagctgcacggcctttccgggcgccttcgagctggggcgctgagccagctccgacggagcacaagccttgcacctatcacaatgtccctgcaacgacttcggaagagtgccctgg

SEQ ID NO: 12762 - DNA, 1317 bp, Homo Sapiens
  misc_feature (12)..(12): n is a, c, g, or t
  misc_feature (1180)..(1180): n is a, c, g, or t
aatagctttccngttcttcttacccagggcttagaaagtaacgattttgaaatgctaaataaagtacttcaaactaggaatgtaaaccttataaagaagactgtattaaggatgcccctgcatactattattccgttgttacaagagcttacaaagaggttacaaggacatcctaatagtgctgtgctaatggttcagtggctaaaatgtgtgttaacagttcatgcatcatacctgtccacgttgcctgacctggtaccccagctggggacactctaccagttaatggaaagcagagtcaaaactttcaagaaactttcacaccttcaatggaaaagcttattcttctaattacacaagtaaaagcatcagagaagacaaagggagcaacttcccctggacagaaggcaaagttggtgtatgaagaagagtcttctgaagaggagtctgatgatgaaatagcagataaggattctgaagataattgggatgaagatgaggaggagagtgaaagtgaaaaagatgaggacgttgaagaggaagatgaggatgccgaaggaaaagatgaagaaaatggcgaggacagagatacagcaagtgaaaaagaattaaatggagattctgacttagatcctgaaaatgaaagtgaagaagaatgaagacagcaaagcaagccggtcaaactatataaactctggctcaccttgcccagtggtgagggctgcctctgtgccaggatgccaaggaccgctgcacatttccaaattcacagcagtggatcccatgccactttgctgtcctgagcaccccagacttgactgtgtaaataagagtgtttcattcaaatgttaataaactttacacagtatatagacacattttctgcaatgtactgacatcagtgtccaatatatggtatatttttataatataatatcctagtatgattggttatatcaagaattgacaagtgcagataaagacctttcccataggagttcaagaactggactgttgtgaagaagtcagctcttatctcaggttggtatctttcatcaaatccagatgcaaagcagcactagtgaaaatttttttaatttagtacatttaatttggtacattttcataaaatatgaagggataactacaaactggagtaaaaatgatggtaattaaaaanaatcctcagtatccctagcttgtctattaactgtgataatctgacttgagtcagattgaatatttggagtgcttccccagaataaccacttatttttgaagctatcatgtgaagtatttttttaaaacaaaacaaaa

SEQ ID NO: 12763 - DNA, 209 bp, Homo Sapiens
  misc_feature (85)..(95): n is a, c, g, or t
aataacattggaaatatattcaagagattatgattctgtaaagctgtggaatgaagctgcagatttagagaacattggcttctgnnnnnnnnnnngagtgaagatagtactagcaagtatacttattttttaaaacaggctagaatctcatgttttatatgaaagatgtacaattcagtgtttaaaaataaaaatatttattgtgaaaa

SEQ ID NO: 12764 - DNA, 523 bp, Homo Sapiens
tatgtgcagcggggctacagcgagtgggctagatccccagctgccactgaatctggctgcccttcaggcccacctggcccaggagaaccgtgtggtggccttcttcagcctggctctactgcttgccccactggtggagacgcttattctactggaccggctgctgtaccttcaggaacaggccctttctcccaggtttccatgctgagctcctgcccatcttcagtcctgaactctctcccagaaacctggttctggtggccaccaaaatgcccctgggtcaggctctttctgttctggagactgaagacagctgatgcagcctgaggagacatctcagaccccatcatctgaaagtgcccagagagcacagtggcagagtacatctcatccagagaaacagcatcctgcatcctccagagtcctggttccttcagtttcatcccctttctctccttccatggattatgtaatacattgtaaagttttaattaattaaaaattggatatctgtttccttccc

SEQ ID NO: 12765 - DNA, 637 bp, Homo Sapiens
gctggaatcatcctcagttttttgctgataatttttcaaataaagatacatggataattgtaaaatacactaactcttagggtgttgtagtagctgaaacatggagatgcgtagctgtcatgctttttctgaatggacaggagaaacataagctacggagtattcacttctgaggatgcttttccggaaaaagaaaggctagaaaatactcgcacttcctcagaaccctctttcttgttaacgggtatcttttgttggtgtgttttgctcttacattacagatagactatcatatatgactttatgaataatttcagttattttgcttttgtataagctgtctgaagccttgctatgctgtataagttgtgtttgatggatcagtgtgagtataaaataaagcaaatcacttttcttttgtattatctatggatgccactatgaaagctgacattaagccactaaagagttttctatgaataagtgtaagtaaatgctttgatatatataaacctaaataaaaagattgtattgatacagagacattggagaaggagattttaaggcagttctttaggtttaaaaaggcttgctgtaaaatggtgcgttattccgtttattaaagatcatattaatg

SEQ ID NO: 12766 - DNA, 879 bp, Homo Sapiens
ctctagagaatccggtgtcgacttctgctctggcagagagaagaggtcttacagaggctctttactgaccaactgaagtatagacttactgctggacaatctgcatgggaatcacccctccccgcatgtaacccaaaagaggtgtccagagccaaggcttctaccttcattgtccctctctgtgctcaaggagttccattccaggaggaagagatctataccctaagcagatagcaaagaagataatggaggagcaattggtcatggccttggtttccctcaaaacaacgctgcagatttatctgcacaaacatctccacttttgggggaaaggtgggtagattccagttccctggactaccttcaggaggcacgagagctgggagaagaggcaaagctacaggtttacttgggagccagctgagaagagagcagactcacaggtgctggtgcttggatttagccaggctcctccgagcacctcatgcatgtcccagcccctgggccctagccctttcctgccctgcagtctgcagtgccagcacgcaaatcccttcaccacagggtttcgttttgctggcttgaagacaaatggtcttagaattcattgagacccatagcttcatatggctgctccagccccacttcttagcattcttactcctcttctggggctaatgtcagcatctatagacaatagactattaaaaaatcaccttttaaacaagaaacggaaggcatttgatgcagaatttttgcatgacaacatagaaataatttaaaaatagtgtttgttctgaatgttggtagacccttcatagctttgttacaatgaaaccttgaactgaaaatatttaataaaataacctttaaacagtc

SEQ ID NO: 12767 - DNA, 552 bp, Homo Sapiens
  misc_feature (438)..(481): n is a, c, g, or t
ggcgtgtacgagtccgccaagttgatgaatgtgaccccagacagcgtgctcctctgcctcttgaccattgacgaggaggagcgaggatgacatctgccctgcaaatccacttcacgctcatccagtccttctgctgtgacaacgacatcaacatcgtgcgggtgtcgggcatcgcaagcctggcgcagctcctgggagagccggccgagacccagggcaccaccgaggcccgagacctgcattgtctcctggtcacgaaccctcacacggacgcctggaagagccacggcttggtggaggtggccagctactgcgaagaaagccggggcaacaaccagtgggtcccctacatctctcttcaggaacgctgaggcccttcccagcagcagaatctgttgagttgctgccacaaacaaaaaatacaataaatatttgaannnnnnnnnnnnnnnnnnnnnnnnnnnnnnnnnnnnnnnnnnnngaggaccatcgggggcagagtcgttggagactgaagaggaagaggaggaggagaaggggagtgagcggtcc

SEQ ID NO: 12768 - DNA, 669 bp, Homo Sapiens
  misc_feature (86)..(86): n is a, c, g, or t
ccatgctgggtcaagcagtcggccattctggcccatacggggtcctgctaacctgtcggccacgaccaatttgcagtacctcaaantagaatggcgtggctacgtgttagtgggcctggaatttcatggaccctcaaagcggcaccagcgcaaggtccccaacggctatctgcgcttccactatgggactgaagactcactgggtggctttgcctatgtggagatcagctccaaagagatgactgtcacttacatcgaggcctcgggcaagtccctctttaagaccaggctgccgaggcgagccaggccctgaactcccatgactgcccagctctgaggcccgatctccactgttgggtgggtgggccctgccgggaccctgctcacaggcaggcttttcctccaacctgtggcgctccagcagggcaggaaggggaaacacagctgatgaactgtggtgccacatgacccttgtggcacagatgcccacgtatgtgaaacacacatggacatgtgtcccagccacagtgttatgctctgtggctggctcacctttgctgagttccggggtgcaatgggggagggagggagggaaagcttcctcctaaatcaagcatctttctgttactgatgttcaataaaagaatagttgccaaggctgaaaaaaaa

SEQ ID NO: 12769 - DNA, 664 bp, Homo Sapiens
tttttgtatttgcacaaaggtgaagtgtgggggtgccagaggctctgccttctgtatagctcaacagtttcaatagcttgactcaggtgtgaaatttgccacatgttcatatctatgtgcaggaaggacaagactgtagacagacagtcggctcccttggacactgcccagaacatgtggtcatgggggaaagggtgttaaacctggatggcaagtgagatcttgtgacccttggggacatggtattgccgtgttgaacctgctgtcgcaccatggggtaggactggggaggaggagcagtctagagcggagaggccctgggtgcttatatgggactggcctccaacctgaggcactggcttcataagctcaactcagcctatccggaaagccatttagtttttattgctgcttctgagaagtgggggagaggtgagctatttgtggatttgttttaggcagtgttcacaatcatagcacctaaatatgaaggatcagaataagttatgaaatgaaggtcaggaaccttttgtacatagtttcttatttggaatgatgttctttaagccctatgagtatttggtatgtgctcctgatgctggcatctgagtctcatttttgtaccgtgttatttgagcaaataaatacattaacttgcaaaaaa

SEQ ID NO: 12770 - DNA, 453 bp, Homo Sapiens
ctaccctgcttcttgaggtccctggagccccaggtgggctgaggggcagggagccggctgtgcccagtatgcctcctggaccctccagttctgccacaggtctgccgatgccctgtccactgcctacacatgacagacaagtaaccccctcatgggggatggggacctacctggctcctcagccagcacccagcttaacccctgccatcccatgctgggccctccaggccaagagtctcagctggccgagagtccaggccttgcctcccccgaccgccatggagggggcagcccggcacagctgctgggagcccttgtgtgtctggtcacactttttaggcgtcacgccaaaggccagcctcctggccccaatacccattttggaagcccctgtggccgtgtggatgtcggtaacagttgtataaaataaattctatttatcgctattgtaaa

SEQ ID NO: 12771 - DNA, 502 bp, Homo Sapiens
actaagttgtcagttatcactgtagatgagcaactcatctttttaaagtatagttactgaactgattctgagaaatctttagagagaaaaaactcaacagtacaaattaactaattgggaaagttagaatgtcctttctgaatttttcattaaaaaaattacattatctgaaataacataaagctactaaactgctttgtattctattaagaaatagctcctaaggatgtagtcttgtttcatagttgttgcactatatcaaaacttaaaatgtaagcccagttcttctctgtatagaaaggaaacattgtgttacttaatgaattatttatacagagcatttgttgccaactgttgttccagccatccacacaggagtctgttctgaggtggcaatagcacatgggaagatgaactttccctgtttgtttacccgttcttctttggctgtatctgatgacagtataagatgttcttaataaagttttatgttctttttgaa

SEQ ID NO: 12772 - DNA, 988 bp, Homo Sapiens
aagcaggctggtactggtctggagttttaggatggtgagtgcctacatgtacccagcaggggccactggggcgcaggcggccccccaggcccaggccggacccaccgccagccccgcttactcatcctaccagccttactcgccacagcggggctaccagaacgtggcctcccagcccccacagagcctcccggccatctctcagcctccgcagtccagcaccatgggctacatggggagccagtcagtctccatgggctaccagccttacaacatgcagaatctcatgaccaccctcccaaaccaggatgcgtctctgccaccccagcagccctacatcgcggggcagcagcccatgtaccagcagatggcaccctctggcggtcccccacagcagcagccccccgtggcccagcaaccgcaggcacaggggccgccggcacagggcagcgaggcccagctcatttcattcgactgacccaggccatgctcacgtccggagtaacactacatacagttcacctgaaacgcctcgtctctaactgccgtcgtcctgcctccctgtcctctactgccggtagtgtcccttctctgcgagtgagggggggccttcaccccaagcccacctcccttgtcctcagcctactgcagtccctgagttagtctctgctttctttccccagggctgggccatggggagggaaggactttctcccaggggaagcccccagccctgtgggtcatggtctgtgagaggtggcaggaatggggaccctcaccccccaagcagcctgtgccctctggccgcactgtgagctggctgtggtgtctgggtgtggcctggggctccctctgcaggggcctctctcggcagccacagccaagggtggaggcttcaggtctccagcttctctgcttctcagctgccatctccagtgccccagaatggtacagcgataataaaatgtatttcagaaagcacaaaaaa

SEQ ID NO: 12773 - DNA, 481 bp, Homo Sapiens
  misc_feature (118)..(136): n is a, c, g, or t
ctgaacgggtgccgctataatttgtgacatctggcaagatttccctttatgtatatattttaacaatccgcttggacacgaacaaagccacacttctaactgcttctggcgaactgannnnnnnnnnnnnnnnnnncaataaagatattcttagatactgaaagaaatagttaatgagtttgcatttgtgcttgagaaaatttggctcaagtccatttggctgtagtgtcaacgatgtttccagtagtgtttagatttggtgtcttcaaaggtagttgattaaaaccaagtgtgtctttaatatcttgtatcagaataactttgtatgttaccaacttaaattgctagaataaggtaaattgatacacaactgctatttttaatttagaactttgacctaatttgggttttcaaaaccattttggctacttgtattctttatgctgttgtttatttcaataaaaaattcacaaataaatgt

SEQ ID NO: 12774 - DNA, 485 bp, Homo Sapiens
aatggtgttagaaatcaacaaaactcctttttaaaaagaaaagatattaagcctgcctacttctacaatgcattctgttacctatttgaacagtatgtttgtaactatggcaatgaagtcagtagataggaaaccagttattccttctacctttaaaaattttgagaacttgccaaccagggattaaagctattatcttgaacagagtccctaaagctagtctagtttttgccacatctgcaatgattattgtttaatttcaaaagaatcctcaggctctacaatctaggggtggtaaatgtgtttccactatacttgggaaaaggtcagtaggatgtgcatcctagggaagataaaatcgtatatggtaaaggcatttgagttaattttgcattatatctaggaaccatattatttaaaatttgaatcctattaatgctgagagatcctaagagctagtatgttgtaaaacctgccacctgaat

SEQ ID NO: 12775 - DNA, 604 bp, Homo Sapiens
  misc_feature (181)..(181): n is a, c, g, or t
aaactggtaactgttggaaaaaccattcttgaaagaaataatttcactgacttcacgaatgtgaggatgggttttcatatgccaccattctgttccatttcccacttgcaccttcatgttctggcaccagtggatcagcttggcttcttatccaagttggtttatagagtcaattcctatntggtttatcacagctgatcacttgattgaaaaactaagaacatgaaaatgtcaagagtggaagatttttctaatcttggttcagcatgaagtggtatttaggtcccttttaagtctatattgcaattttaagatttgttgggttttatgagaggctgttacttagtggccttaaatcttttctgaatgtctgtttcctaagatctgtgatacagttatgtgaatattttgttactgacttgtttcaatggttacttgtataaggattttatatatatgatactatagataaaatcctatttaagacaaattctgttaatcaacaagggctctgtatttttttaagttaaaatattttcatttctcagtaagtagtcagttataatagtgatttatttatgaagaataaactactatagaaagt

SEQ ID NO: 12776 - DNA, 590 bp, Homo Sapiens
aacggttccgggtgcaaaaaatgcttcttgggctactgtgttagtctgattattattcatgggactctgggaaagaaatatgttggttgactgctggtcttgaggaactgaagagccctgtaacacagcaatggtactttgagagtgaaacattggaggctgcatttgttcagaggaggttgtagaagtctgactgtggacaataggatttggactatgaaagagagaaccttgagtttcctgggaaaggttctgagcatcggcaataggattttgaggatagaaaaagttgggcctgtgaatagagaagactgctgcaaaaaatttccagattgaagtgacatcatctcatatcccttgcaagaataaaccatataccttgtagttgggtaccactattctgaacactcatcatactattttgtggataaaaaaaggttaactttgaggtttgatttgtccccactataataagcattttggaccataggtctgaaaagacactagtttctagaatactagtttaagcatagtagtatccagttatctatctaccatactacctagaactatgatagtacttggaaaca

SEQ ID NO: 12777 - DNA, 495 bp, Homo Sapiens
cactccgggaacgcctttgcgccgggactttttgtttctgaaggcagtcgatctgcagcggggccttatgctgccatgcactgccctggctcctgccggacccccagggtgggccgtggcaggtggctgagcaggagctcccaagtgccggccaccgctgtcagggattgcccacccctgggcatcatgtgtgtggggccggggagcacaggtgtgggagctggtgaccccagacccagaattctcagggctctacccccctttcctggtcctaggtggccagtgggtatgaggagggctggaaggcagagctttgggccaaaagcaggcgttggggggtcccccctcaagtttggagccgtttccgtggttgtagcagaggaccggaggttgggttcctgattaaacttcactgtgtgttttctatctcggatcccagtctctgcagacaactggctttgattcaacctaaaaaaacacaaacacacacaaaca

SEQ ID NO: 12778 - DNA, 386 bp, Homo Sapiens
cgtgctcggggttggtcagaatctcaggtggcaagaaatggagctctcttagccatctgaaaaccatcagtgtttccaagtctcacagcagttgggggattcgaacaacagtcacaggtaagccttaatcttagaggacaaatcaaggggagcccaggagaggagatccctgtctgcctttgttggtcacctatcttgggtaactaattcagctgagaaggaagtagaaaggtctttgtgtccagatgatcagtctccttcactggccctcagcagcactggactgccccagaagccactgggtatgtactttggctagggtgacagggggatactcaccctcagccaaacagcttgaaaccaagagaaggtacctgtaatgacaa

SEQ ID NO: 12779 - DNA, 819 bp, Homo Sapiens
gtttctaatgagttagtagcctgagcattcagccgcaagactagtgcaagcagccagcgacgtgccccaggacgggctgcttctgcacggccccttcgcacgcaagcccaagcggatccgcacggccttctcgccctcgcagctgctgcggctggagcgcgccttcgagaagaaccactacgtggtcggcgccgagcggaagcagctggccggcagtctcagcctctccgagacgcaggtgaaggtgtggttccagaaccggaggacaaagtacaaacggcagaagctggaggaggaagggcctgagtccgagcagaagaagaagggctcccatcacatcaaccggtggcgcattgccacgaagcaggccaatggggaggacatcgatgtcacctccaatgactagggtgggcaaccacaaacccacgagggcagagtgctgcttgctgctggccaggcccctgcgtgggcccaagctggactctggccactccctggccaggctttggggaggcctggagtcatggccccacagggcttgaagcccggggccgccattgacagagggacaagcaatgggctggctgaggcctgggaccacttggccttctcctcggagagcctgcctgcctgggcgggcccgcccgccaccgcagcctcccagctgctctccgtgtctccaatctcccttttgtaatgatgcatttctgttttaatttattttcccaggcaccactgtagttaagtgatccccagtgtcccccttccctatgggaataataaaagtctctctctaaatgacacgggcatccagctcag

SEQ ID NO: 12780 - DNA, 447 bp, Homo Sapiens
cgatgacatcagagattccgaccttcctgattggagggaccggactccgtggtgcctggagatcagttggacaacagtatcgtctcagagctgttctctactcctgacttctcctaggcttgagaattgataacatactcttctggatcctagaagtgtccagaagaaggccatggacagaacggagactaggttccgtaagaggggacagattacgggaaagatcacgaccagccgtcaaccccacccccagaatgagcagagtccccagcggagcacctcggggtaccccctccaggaggtggtggatgatgaaatgttgggaccatcaggtgagggaactggtccaagaagaggtgggataggattgactaagacgaaggaagggggccgggtgcggtggctcacgcctgcaaccccggacacggatagggaacgagccggatt

SEQ ID NO: 12781 - DNA, 694 bp, Homo Sapiens
  misc_feature (149)..(275): n is a, c, g, or t
  misc_feature (285)..(299): n is a, c, g, or t
ctctgctgttgtagtacaaaagcagcaggacatgatatgtaaatgaatgggtatggctgtgtgccataaaactttattcattgacactgagatttgaatttcttggaatttttgtgtctcacaaaatagtcttctttcttggtttttgnnnnnnnnnnnnnnnnnnnnnnnnnnnnnnnnnnnnnnnnnnnnnnnnnnnnnnnnnnnnnnnnnnnnnnnnnnnnnnnnnnnnnnnnnnnnnnnnnnnnnnnnnnnnnnnnnnnnnnnnnnnnnnnttatattttnnnnnnnnnnnnnnnctattagctcataggccatccaaaaacaggtggaagaggctgctggatttggcctgtgggcactgagcttactgagcttacatcttcccagctcagtaagcctggcagaaggtatctctttcccagtagttgggggaaaagtcccagggtggactctcattggacagacttgggtcacatgccccttcttgagccaatcagaggcagaggggcttggtgctttcaggggattggtcagtggtagacacagcctgatgagggtagggaagagggagaaaccataaggaaaagccacactgttgccgaagttggaggcagcagcgccgggtgggtggaagtcacaaaatccctgctgaggtggcagtagggatgatgttagctgaggaccatcgttg

SEQ ID NO: 12782 - DNA, 612 bp, Homo Sapiens
caatgtcgatgtagagctctgcctcatttcctgtggggtgcactaggcctggctggctgggcagtatgagcggtcacagccagatggggtacacgtggatgtcgttttgaagggtgtgcagggcctgctgcaggcacttcatgggcgccagcatgtcctgcaccacgtggtgctgctcgtacagcttgcgcagggtctcaccctgggttcagcttcaggagggagatcttgggaggcaccatccagccaaagaggtagcggaagatggggttgttcccaaaggggatgatgtcctggagctcccagaagatgctgcgcgtgtggcggtggtagtagtgtctcaagggaatgtactccaggccctctcggtttgtcttcagatagttctccacatgcttaaagaaccacggcttgtagtaattgccaatgctattcagcttgctgggctctgcctcatctgtcatgacccctgtcataatgacagcctcatccagggagtagagcagcccttccacgaagtgttctcctgccgctggactcgtggtgaacttgcacagatagcctccagccccgcactggctcgaacgcagcttacgtacttatggcagggat

SEQ ID NO: 12783 - DNA, 286 bp, Homo Sapiens
tgcccatgccggtgcgcgtcaacggctccagcaagaacaagccgcacgtcaagcggcccatgaacgccttcatggtgtgggcgcaggcggcgcgcaggaagctcgcggaccagtacccgcacttgcacaacgccgagctcagcaagacgctgggcaagctctggagacttctgaacgagagcgagaagcggcccttcgtggaggaggcggagcggctgcgcgtgcagcacaagaaggaccacccggattacaagtaccagccgcgtagtcaggggtaccgagctcg

SEQ ID NO: 12784 - DNA, 230 bp, Homo Sapiens
tttataagagagatcccctatccgtcgtatcgcgggttgggcgttatgggagatgcggtctggaggggcccaggatccgggcagggccgagtgtagagggtccccccaggctgggacatctcgtcgctgaacctggccgaggcgatgcggcgcgcgaaggtgctggactgggggctgcaggagcaactgtggccgcacatggaggccctgcggccccggccttctgttta

SEQ ID NO: 12785 - DNA, 506 bp, Homo Sapiens
  misc_feature (341)..(400): n is a, c, g, or t
gtacctgggaggatgtcaccaggctttggacttgaggctgaaggacttgaaagctagtagctgcattctggtatatcaaaggctgatggatgatcctcgactgcggagtggagctgaatgatggcgtgatcattaccgtctgttgttgcagctgaatttgaggttgaggctagcgctgggagcggagctgaagaataggagttgccctgcatgtgccgggaactgaggtggaagaaaccttgacttgcagagttggagcctgtggggaggccgccgagggagagaaggaaggtaatgtgacctgggtgaatgaccgttgcactgaagggtccacagctccnnnnnnnnnnnnnnnnnnnnnnnnnnnnnnnnnnnnnnnnnnnnnnnnnnnnnnnnnnnnaccactaccaccactgccaggaaaggagctacacagctgttctgaaaacaagtcagggaactctcccacttgattactgacaaattgcagcatctcgtcgatgtct

SEQ ID NO: 12786 - DNA, 365 bp, Homo Sapiens
atgagctgactacgcgggtggtcaccatatctcagaagacggtagagattgcatctcctgcaaatatggacaggactatagcactcactggaatgacctccttttctgcttgcgctgcaccaggtgtgattcaggtgaagcggagctaagtccctgcaccacgaccagaaacacagtgtgtcagtgcgaagaaagcaccttccgggaagaagattctcctgagatgtgccggaagtgccgcacagggtgtcccagagggatggtcaaggtcggtgattgaacaccctggagtgacatcgaatgtgtccacaaagaatcaggcatcatcataggggtcacagttgcaggccgagtcttgattgtgg

SEQ ID NO: 12787 - DNA, 381 bp, Homo Sapiens
tagctactatctggttctgtaacccaagagcagatacttcactctcacctttaacgtgaagatttatctttcaatcctttagagcttgaaaatgcaatcaacccatgaaaatgtttttaaagaccatgattctgttcatcaaggagacatttaaaggtatgtcattaacagaaatttaaaagggtattgtgggtaactgaattatcatagatacaatacagcaagtatatatggtatattcattactgagatgatttgaactttccatattcaatatggaaccttgagcaagctacttaaattcaggttttgtctattccatctacaaaatgggaacagtatcaccttccttcagtgagctgtcgtaaaggtgtgaaatat

SEQ ID NO: 12788 - DNA, 519 bp, Homo Sapiens
tgttgagaaaaggcaaccagttgatggcgggtgccaaggtctgcagctcggctgccgtcactttgtggtagatgagctcctcatcacggcgcttctcctgtgggatggtgatgttggccagtgccgtctcaaagtccaagatctgctgcatctggggccggatggcctcctcgtccccgccgcccagcagcttccccagctggaccatgtagttcagatatccggtcagcaccttctcgttttcagttttgttcaggtaatagtctctcgagggtaagcccaggccagactggtccacctggatcacgttgctgttggagttcttggaatcggcactgacatagacagagaagaagggtgaggtgcggtagtgggcggtgaccacctgcagggtgtcctggaagttgtccttggcccagggacctgtgatgttccagcccccgagcctctcaatcaactccattagaggtttggcctgagctccttgatcctggtctcgttcatgcacgcaacggtagt

SEQ ID NO: 12789 - DNA, 645 bp, Homo Sapiens
  misc_feature (240)..(260): n is a, c, g, or t
ttatttgtgggcaaatgttaaatttttttgtttccccttttacctcaattgtatcatagtactgggtttttttgtttgttttattgtgtggccaatgtctttgggcatgatgctatctaatcattgttaatgtgagaacatttctgaagatgggaaagacaaattatgtagctcacaaactggtttattatatatatggataaaaaacttttttcattgtggtcttaacacttttatatnnnnnnnnnnnnnnnnnnnnngtcccactgaactctctcttccttctccttttctttccttccctctccagagatgttggtttctacagcaaccctagatataaaattgtggctttaaaaatgcatgaaaccacctttaattatccagaatgaatagatttgtcttttcctcaccaccttccctccaaaacatgacataaacaatattttttgcacttgtgatccttggcccctttccccattctcaacaccatccatccctctggacaaaggatcatacaggtgttattagcaagcaagagatactgaagcgatcaaacagttttagggtggaagccattcccagtttgagtcttcatcctgtaagcccccaggggcagtccctgctttactgaacttcatcctg

SEQ ID NO: 12790 - DNA, 358 bp, Homo Sapiens
aactggaaagtataccaatttcactttattagcctaatttaggaataggatgaggagagcggggttgaggtcaggcatgaaggaagagggtaaaaacttgtgatggttaagatcccttcagaactctggtgcagtcctcaatcactgcagctttactgtcagtcagtggagctgcaatccaaaagacggaaaatcgactcctgttttccatttctgtgtccagtgactcttcagttacagtgtgatgaggtctaccaggttgcctttaggaggagtcatgctgtcaggaaagaaatttactaaggtgtcaaagagctgagttctttgagcataggtgtgatccacatcagaaaagccc

SEQ ID NO: 12791 - DNA, 190 bp, Homo Sapiens
tgaaaaatggaattctcagttcatttgaagaatacagattagcaattaaaaaatacagcagtatctcaggaaataaacattattctcattttacaaaaaagtgtatgtgaactttaaaaaaatctacactacaatatgaattgatattatctctgggtagaatgctaacaattttattttctcctttact

SEQ ID NO: 12792 - DNA, 483 bp, Homo Sapiens
gaactggtggagtggaagtggatccaggaaaatgccgtgtgaagggaggactcagatgcactctctgtggtctgggctcaaccagccaaaagagcaacaaagactccagaacccactctacctcctcaatcccttggccatctgtggagcccctagacgtgcggctgtggcaaggcctgtttctgcgctggacctgctcacctgagcctgcagaagctgcatgggggaagagtgtggcaaatagtgacaggaagggagaagacagaagcctctcagccaactgcttcagccgagcccctattctaagcactggctccttggatagcagctgagatgttcctgaaacctctgcaggccccttaggacctttacaccttggatgagggtgcctgcaacccaggttagccaaaagtactgagggtcttaagtttgaagtgtccaaagtatagggaggtctcaataataaaagtctccatgatcagc

SEQ ID NO: 12793 - DNA, 508 bp, Homo Sapiens
gaacttgctagccttggagaatacagagaatacccccgtttgcccaaaggaccagccaaaacctcacctcaagccacgcatatgataattttctggaacattcaaattcagtgtttctacagccagttagtctacaaaccattgcagcagcaccatcaaaccagagtctgccaccttggcccagcaatcatccagcgatgacaaaaagtgatctccagccacctaattactacgaggtaatggagtttgatcccttagctcctgctgtcactacagaagctatttatgaagaaattgatgctcaccagcacaaaggagctcaaaattgatggtgactgagaagaaagtggatgatcagctcactaccacatcaaaggtgccaactctctaaaacgtagactctgtgcagctttgaagcctggaagacaatacctaccaacatgtcaaagccatggtggcacatttctgctataatgaagattaaatagaataacagttccaggataac

SEQ ID NO: 12794 - DNA, 472 bp, Homo Sapiens
ggaaatgtagctgggtggcacctacctaggttgctacgtagtgagtagactttctcttgggtatagtaagcctcagacagctttcacttttatctactttacttgtggaaataaaacagtcattttgttctgaaagaataagatagctttctgtagagaaggaattcctacctctaaaagctgccttgagaactcagaactggcagttttctgaggtgatttttaaatttcagtattagggagagtccagcatttgctgacacagattctacataactaatgtatgatagcaaatgcaaaactattataatgtggtgtatcttgcgcatacacaggttagaacaagtagactctggcagcagatctccagagacccaagtttaggttctcatagtgtatttgaagtagttatactcctggcttaagtagtttagcgcctgggagaatccattactgaaaagcatttaactta

SEQ ID NO: 12795 - DNA, 1178 bp, Homo Sapiens
gatacttggaagcacgatgaaatatatgatggcctgtggcatgctgtgatatttattcgagaacggagcagtggccgactggtaattgatggtctccgagtcctagaagaaagtcttcctcctactgaagctacctggaaaatcaagggtcccatttatttgggaggtgtggctcctggaaaggctgtgaaaaatgttcagattaactccatctacagttttagtggctgtctcagcaatctccagctcaatggggcctccaccacctctgcttctcagacattcagtgtgaccccttgctttgaaggccccatggaaacaggaacttacttttcaacagaaggaggatacgtggttctagatgaatctttcaatattggattgaagtttgaaattgcatttgaagtccgtcccagaagcagttccggaaccctggtccacggccacagtgtcaatggggagtacctaaatgttcacatgaaaaatggacaggtcatagtgaaagtcaataatggcatcagagatttttccacctcagttacacccaagcagagtctctgtgatggcagatggcacagaattacagttattagagattctaatgtggttcagttggatgtggactctgaagtgaaccatgtggttggacccctgaatccaaaaccaattgatcacagggagcctgtgtttgttggaggtgttccagaatctctactgacaccacgcttggcccccagcaaacccttcacaggctgcatacgccactttgtgattgatggacacccagtgagcttcagtaaagcagccctggtcagcggcgccgtaagcatcaactcctgtccagcagcctgacatgacagagcacagctgcccaaatacaaagttctttagagcactgaaagaaacacaaagccagccaggaggaacagtaactcttccttcgggtggaagctttcatcgagttgaacaggacttaaacgaatcatcagggaccggatatttcttatttctcatttggattcttaaccttgaatccaaagtgtctgcaatggacaacaattgaaggagtggcaaacttacttgtattgagagcacacgcaattcctactggtgaaattactgtttctgtttctaataaaatagaagggattccaaataaacacttgcacacaaaaaaa

SEQ ID NO: 12796 - DNA, 638 bp, Homo Sapiens
tggccctgctggcctggcgattggcatcctggggttcttagggtcccagaacaagccccaggcaagctggaacttgggtggggaggggacatgaggaggataaacagctgactgtggcttcaaggacatcagggccaccccaagtcctcagtgtcctactcctggcaaggagttgggtttggatcaaaagtatttaaaattaatatgttgtcagtgataaaaacaacactgtttacataaaaaccatttttctaattctaacaagttagaatgtgaggaaggaatgaacatgagtgtttaggaacctgccctttggtgctgggctggcgtcccgcactggggtgtcctcgctgtctgggggctgctctgctgccccggcccaggtccccttgtggtgttgccagacgggcctcatggtctgctgtgcagagagaggcaggaaggatccctgaagagtcttggagaaaaggttctgtgccctcaggtggggcttaccccctcgtatttataatcttaatttatatagtgaccaccgtggaaacaaacgcctcttgtattgtcatgtacatagtccatacctgagtgctgtacataagttgttctgtgtataaataaaacaagcctgtttttgatcttcc

SEQ ID NO: 12797 - DNA, 404 bp, Homo Sapiens
  misc_feature (106)..(116): n is a, c, g, or t
ccaaatcagaagatattcatcctgcttcaagtcagcttcagaaatgttttaaaagggactttagctctggaactcaaaatcaatttattaagagccatattctttnnnnnnnnnnngctggataatattctctgtaatatttcagtcctttacaagccaaatacatgtgtcaatgtttctagtatttcaaagaagcaattatgtaaagttgttcaatgtgacataatagtattataattggttaagtagcttaatgattaggcaaactagatgaaaagattaggggcttccacactgcatagattacacgcacatagccacgcatacacacacagacacacagatgtggggtacactgaacttcaaagcccaaatgaatagaaacacattttctggctagcaga

SEQ ID NO: 12798 - DNA, 109 bp, Homo Sapiens
ggtgcccgacaaacctccactggatggtttgtcactggatggtttgttggggtggtggtcacaggcgcaaaggacatgcacacggccacgctacgctactgtaaccaag

SEQ ID NO: 12799 - DNA, 682 bp, Homo Sapiens
cccttatgttctaacccatgagaaccattttacctgccctctaagggccaccagcttcgacctgcctcaggggacagcagcacagaccagtggctccctgtccaaggccgcagagcagacgccatcccactgtacaatcgaatttgctggacaaacttgataggtttctctgcttagcaacgagcctatagttagttggcacatctgcgttttggcatctgaggctcccatctgagtggaggagaaagtgttgtgtttattagcaggaagttcttgtgaaaacagctcgctgctgtgtatgtttatggatttttctgatataacagccagcatggttaccgagtggtagagattctcgaacattctcaaactctctttttgggtaaatgattgtgctaaaaataaaatttattaataaagaaggggaaaaaggagtaactctacctgactaaatgttactctaatttatttatttctttactaattaagtaaaaccaggaagtatgattttacatcaaccagagaatttctgaatttatagggaaacactatgtccccataatgatgctataattctaatatatctagtccccataaacagtaagtacaaattatcattcctttaaagcatttttacacttcctggaatgagtatattatcagcaatcttttgtcaaaagcc

SEQ ID NO: 12800 - DNA, 364 bp, Homo Sapiens
cgtgtccatccccttagtgaagtatccgacaccatagctgagttacaggagctccagccttcggcaaaggacttcgaagtccagaagtcttgtaggttgtggtcactattgctgaagtgcaggtggtaagagagaaagcaaccggggacatctatgctatgaaagtgatgaagaagaaggctttattggcccaggagcaggtttcattttttgaggaagagcggaacatattatctcgaagcacaagcccgtggatcccccaattacagtatgcctttcaggacaaaaatcacctttatctggttctctattctcatgaaaaggtgaaaatggaaggcactatttctcaacaaaccaaactcat

SEQ ID NO: 12801 - DNA, 346 bp, Homo Sapiens
ggcagaatttctgctgtaggatctgcagaatgggctccatgaccttcggggtgtccctcaaggccaccgcaatgtgtcccaaggctcggattgtgtggtcgggaatcaagtgagcgtccttgtcgctctcctgagagatgtagagccggttggacaggctggccaagaacgcctccacaatcactgggtccaccgtcaatccagccttcaggcacctgcagatgttgtcaatagcgatgtctcggagctgcccgtacatggagggctggctcttcttacccgacatgacgttcagagttgactcggaatgctcattggtcacactgatttttatatcattgccagc

SEQ ID NO: 12802 - DNA, 505 bp, Homo Sapiens
atctgactctgcctccaccatggtgaacacaatctggtttctcttcctcatactttcagcatgaggagaacaaatgtaatcctgcacgatggtcttccatttccttctgcacaaccatcctcgcatgaagctctgaacctttttaatcttcttgatgtctggatcttcgtcatcttggttgcttcggtaaggtcgcattcgttctttggttttattaagagcaataatctctgatttaagcctttcgatttctgtgtcttgatcttcaagttgatgtcggagttggttagctgcaattttttctgtctctacgatctgaactagatgaatgtacttctgcattaatacttccctctcaatcaaaatgtctgcataactggcttggtgaatggcctccatccactctttaccatcctgctcctcctcacagcgcagctccagtggcttctgaccttcatggccaaaaagaacagtaaagtaatactgcttgtccagcgcgtctcgg

SEQ ID NO: 12803 - DNA, 627 bp, Homo Sapiens
ccctggtcaccccttccctggtgacatcatccctcacggacccgcggctcctgtccccccagcagccagcactacagaggaacagtgtgtctcctggcctgccccagcggccagctagtgcgggggccatgctggggggtgacctgaacagtgctaacggagcctgccccagccctgttgggaatggctacgtcagtgctcgggcttcccctggcctcctccctgtggccaatggcaacagcctaaacaaggtcatccctgccaagtctccgcccccacctacccacagcacccagcttggagcccccagccgcaagcccgacctgcgagtcatcacttcccaggcaggaaaggggttaatgcatcacttgaacaatgcccagcgccttggggtctccacagtctactcattcgctctaccaccccagtggttttctgtggcaacgccggagtttactcatgccagggcctccccttctcttccatgcccactgcctacaacacagattaccagttgaccagtgcagagctctcctccttaccagcctttagttcacctggggggctgtcgctaggcaatgtcactgcctgcaacacacagcagccccacaccgcagcaccatgcac

SEQ ID NO: 12804 - DNA, 365 bp, Homo Sapiens
aacccaaatcagtggagtttggccaaatctggacataagagatcaaatgagtattgaggtcagcggattctgccctggagagcgacctgcaaatcaagtgtggggttttttctctggcctatatgctgttctttctactaccactgttgtttaagtgtaatcactgaaatccactcctttatctgttcctgtactttgcatccctggtaccttccaaagcttcacactccaaagcctctttcatttgtaagatcgagttcctgttccgctgagtttccaaaccagggagtttatctctcccaggctcccaaagttttcacatttactttacattttagaagatgaggtttcaggctggcttcacc

SEQ ID NO: 12805 - DNA, 341 bp, Homo Sapiens
attccagctcggttccctgacaaccggggaccatcaggaaactgcttctccctggcgccaactgccgattatcatttttagagaggcagtgggataactgccaaaccatcacctgacggtcacctgacactcctggtgggtgggtaggtgggaaaccctttcctgcccacctcatgcctggctatagctacctactgtaacaataatatatcagtcaatacatgtaagatttgcattggtttgatctggaagggcaggacaaatcaaagagtggggacgcttccaggtcataggtagatttaaacatattctgattggtaattgggtgagttattatccgt

SEQ ID NO: 12806 - DNA, 263 bp, Homo Sapiens
gacaaaggctttgatatcagaatgaactgtcaagggaggtgctggagagggattaacctgtgctgcctgggaccctcagggtcttaggttggggagtgtgaataggagtttgcagatggagaataggaagggcattccaggcagagggaaaacctgtgcagagaccaagaggttgtcgaaggaaaagtggggttggggctgggtggtatggattatggcctggatgcaataaagtactgtgacagtagccgcgtagtcaatcg

SEQ ID NO: 12807 - DNA, 499 bp, Homo Sapiens
tggctgcttagaaaatcatttctacacttatgggaaaggccttctctgactactctacacaaaacacccctctgtcctctgtgcggatccatccccggcccaggtgggtgaggaaccatttgctctcttggtgacagcagagtggggaagggagaagcgcccactcagagctcctggggaaggagctcagcagacctgtctttctaccaggccctcgtcactggggagggggctgcctgccacctggaatgactccgagggctggctgccatagacagatcacatctggaaataacagaacaacgggagccagcgctgactggacccttccatgtggcgggcaccctgctgattgctctaggtgttgactgtccctaagccagcactcagcagccagactgagcttcctaatgtgcaaaccaggccacctcactcctgctcagagctcccccgcagtgacctccctctgaaatggaaataacacccaaatccttgccca

SEQ ID NO: 12808 - DNA, 439 bp, Homo Sapiens
ctgttgctcttatctgcaaggtggcaagcagttcttttcagcagatttggcccactattcctctgagctgaagttctttgcatagatttggcttaagcttgaattagatcctgcaaaggcttgctctgtgatgtcagatgtaattgtaaatgtcagtaatcacttcatgaacgctaaatgagaatgtaagtatttttaaatgtgtgtatttcaaatttgtttgactaattctggaattacaagatttctatgcaggatttaccttcatcctgtgcatgtttcccaaactgtgaggagggaaggctcagagatcgagcttctcctctgagttctaacaaaatggtgctttgagggtcagcctttaggaaggtgcagctttgttgtcctttgagctttctgttatgtgcctatcctaataaactcttaaacccaaaaaaaa

SEQ ID NO: 12809 - DNA, 454 bp, Homo Sapiens
tattttcataacattttctttaacatttaatagaaactatatacaataaatttttactatattttacataagatagcaaccacagaaatttacataggttaaaagcaagacggataaggaggacccagtcctgtgggctgttttctcagaggataaaaagccagagttcaccagggaaaggggttaaagactgcccaattaagtagaggtgaagaaaagctaaactgcaggtcttcagatagagataaccgatattagggccatcagtatctcaaagaccactcacaaagacagctcccacctagctacttaagtggatttctatccatgacttgggaaatcccattacaaagatgtcactttccttttaggtatagtcccaaataatcccagaagctttgatagggattatctctctttctcttccttgccctgagtgggaagaaacccacgg

SEQ ID NO: 12810 - DNA, 469 bp, Homo Sapiens
cctttagaagccgctgctgaaattgatactgggggaagggttccccttccttctagagcagaaaagggagagaggtgttgtattcctgtttggtaacctcagtctcctgtaagacctcctaccacatggcgagtatacaccaatcaggagagggtagctgcctgcataggagcctcgcttccgattattcccttcccaatattattcatccagacttagccacagtgcacaaaagcaaacctgctagagaggcagtgaacaccacagcttctccccagctaggtgccttttacatcgggtttgttctccttccatggtgtgttgctgacattgtcactgagtcccatgtgaggtgctggtgagtattacctttcatctgtgccatgctctagaaccttgaccttgatagttcaccacctctgatggatccctgttttaaataaaaacgattcactttaaagcctaaaaa

SEQ ID NO: 12811 - DNA, 392 bp, Homo Sapiens
gtgtgcttgtgattgccccgcccttctaggatctgagtgatgagacgtgtccccactgaggtgccccacagcagcaggtgttgagcatgggctgagaagctggaccggcaccctgtttggagctactgcaggaccagaagcacaaagtgcggtttcccaagcctttgtccatctcagcccccagagtatatctgtgcttggggaatctcacacagaaactcaggagcaccccctgcctgagctaagggaggtcttatctctcagggggggtttaagtgccgtttgcaataatgtcgtcttatttatttagcggggtgaatattttatactgtaagtgagcaatcagagtataatgtttatggtgacaaaattaaaggctttcatatatgtta

SEQ ID NO: 12812 - DNA, 607 bp, Homo Sapiens
agaggctttcttggtcagtgcctgtcaaggctccagtcctgctgagccaaaggctttgtcattcctttctcttcctgtacatctgagcagacccactccagctttctggtgtcacaggcgggaatgttagttagtaggtagacttagatcccatttctgtcctgctcccaggaagattcttaggtcctcttcaatccagcagcccctcccagaggtgtgatcagcaggatgctgaggaaccatgttgcctttcctgtcaatcacagccaccttcctgttatctcctaaatggatctggcttttcctggaggctgccatggttggaagatggtatcagagggcctgcctgggcagtctgtctccgggccagggtcagggaccctctgcctctggcagccttaacctgtcctctgctaggaccagggtgatttcaagccagggaagcaactgggaccctgaaaactgtccctccccagcccgctccccctctttgtgccctggtccccttgctgccatgtggatgctgttgtgattgctgtttgtatattatcaaaatgtttttatattaaaaatgtttggtctgaaaattaaaagcacttcatttaga

SEQ ID NO: 12813 - DNA, 558 bp, Homo Sapiens
  misc_feature (320)..(320): n is a, c, g, or t
ctgtcagctgtcccgagacaaccactcaaggtcatcgacctgcgtgtcagcaacatcgcccaggtgttcagggccgatggcttcaagtgtggttctgactggaccaaaactgtgttcagcccggacaaaaactatgcactggcaggctcctgtgatggggccctttacatttgggatgtggaccccgggaaactggaaaacaaactacagggaccccattgcgctgccgtcaaccccgtggcctggtgctactccgggaaccacatggtgagcgtggaccagggcaggaaggttgtgctctggcagtagggccacgaccntgcctgcctgggctggagctcttgcccgaagcctgaagcttccttcggcgccatgcaggggttggggttgggactggagctggccttgggatttaatggggaagaaggcctggcaggacctggcctgtttgtttaaaaatgaagtatgggttgggggattacgctagtttttctttgtatttttatctctatctatctcctcactttttctcccaaagtagaaaaaaatgatatctga

SEQ ID NO: 12814 - DNA, 906 bp, Homo Sapiens
  misc_feature (631)..(668): n is a, c, g, or t
  misc_feature (893)..(893): n is a, c, g, or t
tagctgcgtctctcgaggtggtcgctttagcaacgcagctggcatatgccgtgggtgtgtcttgtgacggaatacagatcgtgtcgctagcacgtgttgttaattgtgcgtctgggtgctggtatgtgtcggtgcatctctggcctatagcccgtatatatgatccagaaaaagtccccgcgggtagaaaaaaaatgtaggtgtccgcagataattcaataactctccggtttgggcccgcaactctcttccaaccgccccacgcaaaatatttccgcccggtgggggttaacacacccacggttgaacaccccggtgaaagtgttaaatatgttctcccttggagccgttataatcttcctgtcgagggatggttggtccgccaaatatgggctcccaccgcccgaagagttaggggtcccttccccaagggtgtccccacgcgtaggcgccgttgttttcccccatgctcccgaacggtgtgttaaacgcgcggcgcccgtggtcccttgcgcttattatatataccggcctccctatattggggcgccccctttgtaaccaagaaacctggggactggtataaccttggggcccctgagggggtactttttaggcgcgccccgccccnnnnnnnnnnnnnnnnnnnnnnnnnnnnnnnnnnnnnnataactcatcggcaatcatttattagtaccccaaaatgcaacagttgtctcaaaagtaagcctttttgtaaaactctaatacatggagtgggaaaaatagctacccacttcctacatgtctgcagagaaagctctggctgacactactgatctgagcatgagaacatgacttaacagtaaattaataaaaacggaatgacttacttttaaatcattttactgttntataccacagtcg

SEQ ID NO: 12815 - DNA, 529 bp, Homo Sapiens
gataagagcactgctgaccatctgctttcctccaagggttgctgtgtctagggtgaagtaggcaaaacgttgcccttaaaactgggccctgaagacggttccagccttgtccttcctgtgtgctccctgagagccattcctgtcccttacacattccagggcagggtgggggtgggtagccctgggggttcccctccctcttgtgcaccattaggactttgctgctgctattgcacttcaccagaggttggctctggcctcagtaccctcagtctcctctccccacattgtgtcctgtgggggtggggtcagccgctgctctgtacagaaccacaggaactgatgtgtatataactatttaatgtgggatatgttcccctattcctgtatttcccttaattcctcctcccgaccttttttacccccccagttgcagtatttaactgggctgggtagggttgctcagtctttgggggaggttagggacttatcctgtgcttgtaaataaataaggtcatgactctaaaaa

SEQ ID NO: 12816 - DNA, 474 bp, Homo Sapiens
agaggtcacctggagaatcaacgggatccctgtggaggagctggccaaagaccagaagtaccggattcagcgcggcgccctgatcctgagcaacgtgcagcccagtgacacaatggtgacccaatgtgaggcccgcaaccggcacgggctcttgctggccaatgcctacatctacgttgtccagctgccagccaagatcctgactgcggacaatcagacgtacatggctgtccagggcagcactgcctaccttctgtgcaaggccttcggagcgcctgtgcccagtgttcagtggctggacgaggatgggacaacagtgcttcaggacgaacgcttcttaccctatgccaatgggaccctgggcattcgagacctccaggccaatgacaccggacgctacttctgcctggctgccaatgaccaaaacaatggtaccatcatggctaacctgaaggttaaagatgcaactcagat

SEQ ID NO: 12817 - DNA, 1067 bp, Homo Sapiens
gctggaccggtccggattcccgggatgagacgggggccgggacgacggctggggcgccggggtcgccagctcctcgcccacctccctccctgtgggagaagaggaggaggggaagtgactgcggagttgatgaactttgcacatccagaaacgccattttgattccttttccggaacaagtttgcatctctcctcggtctctccctgaagcccaccggtccccaacgcatcatgccagggagccaagcgtcctgcccggccgtaagttgctccgactgtgtgttccaggagtggtggctctgaggtgtgaccctgcccacgtttgggcccagccaggttcagccccccaataaggagggcagcttgataacacaaagaaaacagtgtcaacgagtactaccaagagaagaagacaagaggtcaacacagactcattttctactccgtgtgaatgatagctacagcaggggaaagtttcatagtctatcagtgggtcagaaaatggagttttatagcagaggcttcttagaagcttaaacccctgtcccaatgacgtcaagttcgcccgctggcttggaaggttcagacctatcttccatcaacaccatgatgtcggcggtcatgagtgtagggaaggtcacagagaatggcgggagcccccaggggatcaagtccccctcgaagcctccaggaccaaatcggattggcagaaggaacccagaaacgaaagaggagaagtcttcctataactgccccccctgtgtgaggaagatttgcactacccagcaccagctgaccatgcacattcgccagcacaacacagacactggaggaaccgaccactcatgcagcatctgcggaaagtcactggagctcggccagctccctcgatcgccacatggctggggcactctggccgaaaaggccttaaaggggcactgggtgtgggccagtcctttaccaccaaatggggacctggccccgaacttatgaaagattccttgaaaaagggacccttaacagtggccaaaagccaacagcccccttcaattttccttttgaaaaca

SEQ ID NO: 12818 - DNA, 559 bp, Homo Sapiens
cggcgcccagagactggagcaggaaagcatcactcctgggggccggcccccctaccgcagcaatgctccctggcagtggagcgggcccgcatcccataactctctaccagcctccaagtgggccactccaaccactcccggccatgcccagtccctgagccggcacctgaagcagacccccatagtccccttccgggagtcccagccactgcacagcaagaggcctgtcagcttcccagaaaccccttacacagtatcaccagcaggggccgacagagtccctccctacagacagccttctgggagcttcgccacccccggttcggccacctacgtgagatacaagccatccccagaaaggtacacggctgccccacaccacctgctacctcttgatccccacttcagccacgatgggacgtccagcggcgactcctcttccggcggcctgaccagccaggagagcaccatggaacgccagaagccagagcctttgtggcatgtgcttgcccaggccaggctctcagccatagccggaagcagcgggaacaagcacccg

SEQ ID NO: 12819 - DNA, 776 bp, Homo Sapiens
ggagtcggcgcgggtgctggcgccatggaggccgagcggggtccctgagcgccggcctgcggagcgtagcagcccgggccagacgccggaggagggcgcgcaggccttggccgagttcgcggcgctgcacggcccggcgctgcgcgcttcgggggtccccgaacgttactggggccgcctcctgcacaagctggagcacgaggttttcgacgctggggaagtgtttgggatcatgcaagtggaggaggtagaagaggaggaggacgaggcagcccgggaggtgcggaagcagcagcccaacccggggaacgagctgtgctacaaggtcatcgtgaccagggagagcgggctccaggcagcccaccccaacagcatcttcctcatcgaccacgcctggacgtgccgtgtggagcacgcgcgccagcagctgcagcaggtgcacgggctgctgcaccgcatggccaacctgatgggcattgagttccacggtgagctgcccagtacagaggctgtggccctggagctgcaggagatgtggaagttcaaccagacctaccagctggcccatgggacagctgagggagaagatgccggagtggtatatcatggacgagttcggttcgcggatccagcacgcggacgctgcccagcttcgccacggaacccttcttctacatgccgcagcaggtggcctacacgctgctgtggcccctgagggacctggacactggcgaggaggtgacccgagactttgcctacggagaagagggaccccg

SEQ ID NO: 12820 - DNA, 633 bp, Homo Sapiens
cggctttctcaaagttgcctctctcctcttcttccatcagtgtgggcttctcatgctcatctgcatagacggccgtgaagtagccccccaacttgctggcgtgctgcttctttgggaacacccctgggtggcgtttcatgtaatgggacacgatgcccttcttgctgaacgactggaaagagcacaaggagcactttttcttctccactgcccgccggagttcctcgctcagctgaggggagtcgtccttgggcggggatgggatgatcactttgttgggcttgtcgctgatggtcctggaggctgccaagcagtgagtgtaatacgcatcaatgtcgtggcgcttctggtagtgggctgccagacctttgcggatggggttggtgtaggcacacagggcacacttgaagaggttgttcttgccttctggctgggctcggacattattgtgcttgatgcggtagtgcctggcgatccccttcctcgtggagcagaagtacttgcagagctggcaccggaacacagtgtgggagaccatggtgggaggtagagaactgagaagtggacacgggctcctctcccacctccttcctcagttgatggagacttgggaagggctcacttacagtcgtc

SEQ ID NO: 12821 - DNA, 229 bp, Homo Sapiens
cgggggccgcgtcgtccgagtcgcctgatgtggccgaggatggctccacaattccaaccttcacaaccccgacaaagggaatgaacttttgggaggactcttcgtcagggctcttctgcttgtaggtcagcatggcctctgcgatggggagctggtgggcacagttggcccctgcgatgtactgcgtgatgcgtgacacaatgtctggcgtgtcctgtaccgcactctg

SEQ ID NO: 12822 - DNA, 308 bp, Homo Sapiens
acgggggccgctagaggccgggtgctgcttcaaaccctggcgggtcgcctgtgtccaactcagctatacgtgtctttcaggcttctcaggttgaagccctttgtagggtttccatcttcaacctccctgagggtctcccacttccgattagccacaaaaatgacgaagtgttctcccctctacctgtgtctgggcttcttaacccgcagcctgctcctccgctcccaaacccaaccgcgtgcccatctcaggcctccccaactgccaggatgcccaagcacctcttacttacagtcctccttcctcta

SEQ ID NO: 12823 - DNA, 412 bp, Homo Sapiens
acctagaattagaaagtctagagtcttcctcataagaggctcactctggcgacttataatcaactgcttatgtttattggcttactgtgtgccaggccctgtgctaagcgctttacatgccttatgtcttttaatccttacaactaccaagcgaggcagagatgatgatccccgtcgtattacaggaggctaaataacttgcccaaggcctacgcagtcctcagccagcaagtggcacagctgggatttcaatctagatctgtccgaagcccaccggtactcttgagtctttcctatatggcctgtgacagagcctgcgggagcatttaggtgtccacagaggggcatgcatttgctcaaattcagagaacaaattcttgactctgaaagaagggcttccaatcgaggaatc

SEQ ID NO: 12824 - DNA, 217 bp, Homo Sapiens
gggccgctagaggcctgtagcggaagcaccacatcgtccctgcccatctcactctctcccttgatgatgcccctagagctgaggctggagaagacaccagggctgactttgaccgagggccatggacgcgacaggcctgtggccctgcgcatgctgaaataactggaacccagcctctcctcctacaccggcctacccatctgggcctctagcggca

SEQ ID NO: 12825 - DNA, 286 bp, Homo Sapiens
gggcgccgctagaggcctctgggggcacggccagggtcttggaggtgcagccactgctgggatcctgataggctactcggaggaggtgctggaagcagtgggtggcaggcaggcggcgctgctcccagaggctgagggagcgccgtagctcctgcacggggctcagtgggagggtgtgggcctgacccaggccactcagcagggccaggctggcagagaggctggtcaggtagtagccaccctctccagtaagcaggctgggctccagcagctccgacatgtactc

SEQ ID NO: 12826 - DNA, 652 bp, Homo Sapiens
  misc_feature (85)..(85): n is a, c, g, or t
accttcaagttgcaggtgccgaaaagcaagtcttgctgcaggcgaatgcggagcaggggagttctccacgtaagtgacccgcccntcagtctgtgttaatggcagtggcacccggcaagcggtgatgaaagcgggaaatgtgctccggttgaaggtgaacgcgcagagcaaccacaccgtgggccccttgctggcggctgcagctggtgccccagcccctctgtacctcgggggcctgcctgagcccatggccgtgcagccctggccccccgcctactgcggctgcatgaggaggctggcggtgaaccggtcccccgtcgccatgactcgctctgtggaggtccacggggcagtgggggccagtggctgcccagccgcctaggacacagccaaccccggcccctggtcaggcccctgcagctgcctcacaccgccccttgtgctcgcctcataggtgtctatttggactctaagctctacgggtgacagatcttgtttctgaagatggtttaagttatagcttcttaaacgaaagaataaaatactgcaaaatgtttttatatttggcccttccacccatttttaattgtgagagatttgtcaccaatcatcactggttcctccttaaaaattaaaaagtaacttctgtgta

SEQ ID NO: 12827 - DNA, 531 bp, Homo Sapiens
ggcacgaggggtgccctgcccatgtttgagctggtggagcagcagccttcacatctggcctgccccgacgtcctgaacctgtccctagattcttctgatgtagagcgactggaaagattcttcgactcagaagatgaagactttgaaatcctgtccctttgaaaatcctggggtcgggggtggcacctgtgagagcctggggctcctggtgccgctgcgtttcatccatcccgcccgctcgcctgccgagggctgcgccccgtgctgcctccccccagagggccacccgctgtgctcgtggactgaggctgcgctgcccgggaggccttactgcttggtgtcagactgcccagctcagagtgcccgtcagggcctgtgcatccgcacgcggagccgtctgttaggagcttccagagcgttctctcgacactgccagccccgtgttagcacctgggcctcagtcccacttgctcccaggcgccggttctgtggttggtttggaattaaagtcctgtttgaagttgtcaaaaa

SEQ ID NO: 12828 - DNA, 368 bp, Homo Sapiens
  misc_feature (67)..(67): n is a, c, g, or t
  misc_feature (125)..(126): n is a, c, g, or t
agcggccgcggcgagggccccggccagcccgcctgagatgatgtgggactgcgggttgtaggtccgngtgggggttgacctgctcctgcaggaactcataggtgatgaagtggatggactggaannggggatggtcatgggcagctgcgtggtgtagctccggtagaaggcccccaacccctcggtcctccacaccgtccggatgcagctgattgctgaccggtgtctgcgagttgtacatctgcaagcgctgcttcaccactgtggttggtaaccgcggggcaggccagacggacagccagtgggcagtgggttggatgtggccccaccccaggtcggaatgaagccaagccataaagagaaacaag

SEQ ID NO: 12829 - DNA, 354 bp, Homo Sapiens
cccctgatatactggtatatctgtgacacacaaatttaaaatgtaataaaatattacctttacttagcaaaaagtacataagtcagattatcctttcatgtattaaatgaagcttcttctaaagaagtccttatatacacagttgcaaattactttttaacacatacaatgtatactacatgctggaatcaaacacctgaaggagctggaatcttatgaatacagccagggcaacagtgtagagaatcatgaacaaaaacatcacagtccacacagaaaacatttaggcacacagcacaaacatcaacatgttggtctttcaattccccctgacatccataacaaaatctttct

SEQ ID NO: 12830 - DNA, 453 bp, Homo Sapiens
  misc_feature (41)..(41): n is a, c, g, or t
ctcagcatcagaatgagaaagcctgagaagaaagaacccancccacaagcacacaggaaggaaagcgcaggaggtgaaaatgctttcttggccagggtagtaagaattagaggttaatgcagggactgtaaaaccaccttttctgcttcaatatctaattcctgtgtagctttgttcattgcatttattaaacaaatgttgtataaccaatactaaatgtactactgagcttcgctgagttaagttatgaaactttcaaatccttcatcatgtcagttccaatgaggtggggatggagaagacaattgttgcttatgaaagaaagctttagctgtctctgttttgtaagctttaagcgcaacatttcttggttccaataaagcattttacaagatcttgcatgctactcttagatagaagatgggaaacccatggtaataaaatatgaatgat

SEQ ID NO: 12831 - DNA, 256 bp, Homo Sapiens
cccgagagccgctcgaggcctacacagcgcaggctgacccacccagggaggcagtgccagacaggcacaggccccaagctgccttttaggcatcagcaaagggatgcgttgtccttagcagtttggtgggggggatagtattctccttgggctggactcagaaggtgtctgggaggggagaggtggctgggccggcatcatggccctgcagcatccagggtgtccaagcgcctccagcttccacccttcggtggca

SEQ ID NO: 12832 - DNA, 454 bp, Homo Sapiens
gacaggaggcaggagctcagccaggtcgcaggagctcagccaggacaggctgactggaggacatttgggtgcgcagaagccactcagaggcaggagctgggctttgagaggctgcaagaggcaggacctgcccaaacgaggccactgtggaggaggagctgacctgtcaccactgcctgaagacagggagaaacgacctggagaagcctccgtgaggtaagagcttggcctggagaggtccctcagagcccgatgagctgggcctgtagagaccattgtcaggttggagctgggcgtgtccaggccagtgggaggcagaaggtgggcctagagagcttgaattgaggaattttcatgccgacagtggctgccgtgagctggacaggagctgggcagaagagtttatttgagggaagtgttgggcctctagcggcgaccggggtccaaagctcga

SEQ ID NO: 12833 - DNA, 782 bp, Homo Sapiens
cccatccaactccacaggcaccgtccagcacttacggagtgactccttccctggttctcacaggacagagcagactccagacctggtgggaatgttgctttcctactcccactcagagctgccccagaggccccccaaacctgccatctacagctctgtgaccccaagaagggacagaaggagtggtagggactacagcaccgtttcagcatcccctactgccttatccacgctgaagcaggactctcaagaatccatctcaaatctagagagacccagcagtcctcccagcatccagccctgggtctccccacataatccagcctttgccacagagtctcccgcctacggttcttccccatcctttgtctccatggaggatgtgaggatccacgaacctctgccccctcctcccccacagaggagggacacccatccctccgtggtggagacagatggccatgctcgtgtagtggttcccacgctgaagcagcatagccaccctcctccattggccctaggttcagggctgcatgccccccataaaggcccacttccccaagcctctgaccccgctgtggccaggcagcaccgacctctgccatctaccccagacagctcccaccatgctcaggccacccccaggtggagatacaacaagccgctaccccctacccctgatttgccgcagccccacctaactcccatttctgctcctggtagctcaaggatctacaggcctctacccccactacccatcatagaccctcccagcacgactc

SEQ ID NO: 12834 - DNA, 863 bp, Homo Sapiens
  misc_feature (193)..(228): n is a, c, g, or t
ggacagccgcgcgctgagggtctcggggcgggcgccgcgggacctctccgggccatggcagccctgtcaaagggaacaggaagcagtccacggagggtgacgccctagacccacctgcatcccccaaacctgctggcaagcagaacggaatccagaaccccatctcgctggaggactcccccgaggcaggcgnnnnnnnnnnnnnnnnnnnnnnnnnnnnnnnnnnnnaggccttcctggtcagcctctacaagttcatgaaggagcgacacacgcccatcgagagggtgccccatctcggcttcaagcagattaacctgtggaagatctacaaagcagtggagaagctgggggcctatgagctggtgaccgggcgccgcctctggaagaacgtgtacgacgagctggggggcagcccaggcagcaccagcgcggccacgtgcacgcgccgccactacgagaggctggtcctgccatacgtgcggcacctgaagggggaggatgacaagccgctgcccacctccaagcccaggaaacagtacaagatggctaaggagaacaggggggatgatggggccaccgagaggccgaagaaggccaaggaggagcggcgcatggaccagatgatgccaggaaagaccaaagcagatgctgctgacccagcaccacttcccagccaggagccccccaggaacagcacagaacagcagggcctggcctcatgggtcttctgtgtcctttgtgggtgccaacggcttgtcctgaggcctacaagcggctcctatccagcttctactgcaaggggacacacggccatcatgtcaccactggccaaacagaagctcctgggcccaggtgagcaa

SEQ ID NO: 12835 - DNA, 337 bp, Homo Sapiens
gggtgcgctagaggccagcgaggctcccttcattccctccaccaaagtgaggtcttccctgcccccacagagcaaactgatccccaaggccaaggccttggtgacaatgggactgtgagtcacaaaacaaacatagccagctgtcccgaatggatttttaatttctactgcaagacctgtttcagccccactggctgcttaaagccacccccactccctgctccttccttagtcctggctggagccccattcaatcagtcaacgattcacgaattattttgacatatattaagcaatgacttctccaggcctcatactggggataaaagtatcaata

SEQ ID NO: 12836 - DNA, 220 bp, Homo Sapiens
ctagagagctgcctgggacctggtgaccccctggggtcaaggtatccatccaccttgggcctgatgaccaattgggacttaaggatctacctagagactggtgtcaacctggaacctgatgtccacttggggtctggtgtacaccttgggcctgatgcccacctgggcacgggtgtacactttgggcctagtgtgcacctgaagcctgggggtcaacctg

SEQ ID NO: 12837 - DNA, 332 bp, Homo Sapiens
tctggtggatatctcagaaaccttctgctccagcctctttgacaagcgcgggttgccaagacccacgatcacacagcacagagacacgaagccacacaaccaccagaggaaggagaaagcaggagtctgggggcagagggaggtcagtctgccctgctctcctgggatggagccagagaaaggacaactaatgcgcccaggatgatcaagagcacctcttggccctcctgacctggggctgggcctgacctggcccccctctgtgtaccaagagcccttaactaaacaaggttgctaaaccgagcaggaaagctgtttagagggctcccagc

SEQ ID NO: 12838 - DNA, 319 bp, Homo Sapiens
tcatatttgagccgtagcttattgaggctcttgaccttctcctcctcctcagcggcctgggatgagaactcggccagacgatctcccagcagctcccgctcctcgctcagctcggaattctggtcttccaggagcagcaggtccgtcttcaaatttcttcattttggcctctgtcgtcgagccttctccagctgcagcttctgacgagcggacccctccagctcaccttttaacgatgcttgaagtattaagtgatcagtttcctatagaatgagaatcttggttaaattttttctaatgttactcataaataaattat

SEQ ID NO: 12839 - DNA, 1279 bp, Homo Sapiens
ggttcgtcctgttgggtgctactctttgtagtgtctctgtgctattcctcttctgtagtttcgtgtcctcctcatagatcttcctttcgggtgcttcacagggcctgtgccttctccactctctgttttatgtcccttggtgcgctgcgggtgtattttctgacctgtgcagtggcctgggaatctcttcatggttgtccccctttgtgggggggcctatggttcttgtggtcctcctggagggccccttgttcttgcgttgacaaaccgggtggtaaggcttggagctgtaacccctggcacatgtctcccctggttatctatccgggccctacaatgcgggttaaacttacgtggttgtgtggctgtctcgagccctggggcaccagccatctgtttttcctaggtggcctggatgagttgaccacttgacggaaagcggctactctggcaggcaatcgggctagccaagaatgcagcgtcacagagggctttcgccctggtcacccagcagctgcccacggagcaccaagcgtcaagaagcatccccgcggggagaccgaggtgggcgccacggcagtggccttctccagctttgaccctaggctgttcattctcgggcacggaaggcggcttcccgctcaagtgttccctggcagctggagaggcagccctcacgcggatgcccagctcccgtgcccctgcgggccccagcacagtttaccttctccccccacggcggtcccatctactctgtgagctgttcccccttccacaggaatctcttcctgagcgctgggactgacgggcatgtccacctgtactccatgctgcaggcccctcccttgacttcgctgcagctctccctcaagtatctgtttgctgtgcgctggtccccagtgcggcccttggtttttgcagctgcctctgggaaaggtgacgtgcagctgtttgatctccagaaaagctcccagaaacccacagttttgatcaagcaaacccaggatgaaagccctgtctactgtctggagttcaacagccagcagactcagctcttggctgcgggcgatgcccagggcacagtgaaggtgtggcagctgagcacagagttcacggaacaagggccccgggaagctgaggacctggactgcctggcagcagaggtggcggcctgaggggtcccgggaggcgggtgcaagccttcgctgtgccgagccttgtgtttctgacgcaagccaaatgaagaaaagcaaagctttgggggaagtcatcaaaaaaa

SEQ ID NO: 12840 - DNA, 505 bp, Homo Sapiens
catgtgccttctcaaaaccaactgaacttctataaagcatctctggttctttcaaagtttgtgttgtaaggagcaatgtagatgatgctataatgctttatatttttggttataatgacaaccaccagttctttttcacttaagttaggttgagaaattttatttaatggccactgaagggccattttcaattgggaaaatttatctacatctgtggtaaactttattttgatgaaaagttgcactagtattttaccaccagatgagaaaaagatgagcagcatttaaaaattaatgtatttaaaataaagtacagagaaagacatgtatataattatcaggctttgttttgaatggaatctttccccccaattcttaatgtaaagatcttgtgctataacttttaaagccatacaaataagagtgctaaactgtggacttaaaagtaggtgtgtaaatatttttaatcagtattacttggaaaataaaatataacaaacccata

SEQ ID NO: 12841 - DNA, 444 bp, Homo Sapiens
  misc_feature (12)..(12): n is a, c, g, or t
tcccagacctgntgggccgtctcctgaccacctgcctgttctacttcaagagcagctgggagaacgtccgagctgctgcacccctgttcaccgggttcctggtgctgcactcggagcccaggcagcagccgcaggtggacctggaccagctcattgcggcgctccagatcctgctgaaggacccggcccccgaggtgcggacgagggctgctgaggccctgggccgcctggtgaagctcgcctaaggctccggccagcacccccagcgaggagtatgcacccagacctgtgcctgagctccaagacagggcctcctgaggaccacagcctgggcacacgactggaggggcctggccccagaacaggcactgctggggaccaaacccaagcccttcagtgagggatgtgcccaataaactcatctgctcccagcgagtgactgac

SEQ ID NO: 12842 - DNA, 723 bp, Homo Sapiens
gattggtgaatctgtgactacatgttcagctggtatagattcagttactaatgcagtagctaagaaaaaatgtgacttttcagtagcttcagggagagttgtgtaagattccaagccatttgcatctggatctggagtagacatgttaactaaagaagtgtcttcctccttcatttcattatcatcactggaagttttctttgttgttagtacagaataatctgtggttttgagttcagtttcagtaaatgtctgtgaatcaaagaagtgtttgttctgttgcaggagagtctaaaggggattcaaatgacttttctgcttgaatatgttcctctgatggtaggttcacttacaaattcaagtcttacagggttgacttcttgcctagaccataatttggctggctctatagtttggggaaagtttgttgaaactgtgccactgacctttacttcctccttctctactggagctttcgtaccttccacttctgctgttggtaaaatggtggatcttctatcaatttcaatgacagtacccacttctcccaatccttcgtcgataatggaggaagctgtaccagaaaacttttgcacagcactgggaagcactggaacaacagagctgctgactgtgaccagttgctcacctgagccctcagctgaggatgtaaactcttcccaggggaaggctgaagtgctgaccatggtgctactgggtcct

SEQ ID NO: 12843 - DNA, 458 bp, Homo Sapiens
ttctgagaagccaaattctgtccaagtattaactagagatattgttgattaaagaaaatctagaactgaagtgaaagaagagagttccagttctaatagtcttttgattaacaattcttttctgagaaatgatttttataagaaatggggtgattctttaaatgcttttcttaagttgaaggcacaacagttaatggctgtattgttgctattccgtggctgacatgtttttgataaagctttaacattcctgctactaattttggcggagagtgtttgccaggtttcaatgtgggctgcagctttttgtgctccttctctggtttgcagtgtaatgagttcataagctaaattttcagaaagaattttgtttaagattatgcctcttatctacttgagagcaacatgtcttttcaatcatgggattgacacatgaaaaataaagttatttcttaatc

SEQ ID NO: 12844 - DNA, 597 bp, Homo Sapiens
ccatgttcaccactcattcgatatgcacctccacctcagctctgcgaacattatgggcttcgccatctccctccaccttttggccctggtaagcgtccacctctaggcttaagagaatttgcaccaggcgttccaccaggaagacggggacctgcctctccaccctcggggatttttacctggacacgcaccatttagacctttaggttcacttggcccaagagagtactttattcctggtacccgattaccacccccaacccatggtccccaggaatacccaccaccacctgctgtaagagacttactgccgtcaggctctagagatgagcctcccacctgcctctcagagcactagccaggactgttcacaggctttaaaacagagcccataaaactatgacctctgaggtttcattggaaagaaagtgtactgtgcattatccattacagtaaaggatttcattggcttcaaaatccaaaagtttattttaaaaggtttgttgttagaactaagctgccttggcagtgtgcatttttgagccaaacaattcaaaaatgtcatttcttccctaaataaaaatcaccttttaagct

SEQ ID NO: 12845 - DNA, 594 bp, Homo Sapiens
cttatagatgtaaaatattttatttgtaaatggtgatcttctaaatctgtgtccacaaattccaaaacccataacactctgtatacttcaaaaaattcaatttttgccaacattagatactattatacagaacagaaaacaacaaaaacccggtaggacaaatactggtaggatgtcaggatattgtacaagagaagaaaaatattcaggaaacaaatttcatacagctatttatcaagagaaaaatatatacaattgatttattctgtaagataaaaatacatcatgccatatacaagttcagaactgcatcactgaatataccaacagtttacagtccacttgaattgtgcacacaaaacttcattttatacttagcctgtgaagtgtcagtaccagaattttaagtacaaaataaaaagctaacctggttcaaaatgctgattaagtttctacaagcaaacacaaaacagtgttttttttattaaagaaatgtaaacaaacagttcatacaaacacattttaaaattacatcttccaaaaaccctattgccagagtcctgcagctgtaagcataatcacatctcctttttt

SEQ ID NO: 12846 - DNA, 246 bp, Homo Sapiens
ttccttgcgttatcacatagtgttgtatttgaaacatagttcatggttttatcaaagaactgaagatgagaatactggtcatctaactttgtaatttgatttgattatactgtaaagtttgacagtctcattttatcactgcgtttgtatctattactaaaatgtattttttgacctcttactgattcattgttggtatgtacaaactgttgacttgtaaaatcaataaagtcttagttggaaaaa

SEQ ID NO: 12847 - DNA, 248 bp, Homo Sapiens
aacttgcaagaacagtaagaagactttaccattgcatgccatggtttataatctaagataggcaatagtgtataaatatcatgtaaatgtgatggatttcttaatcatatttatttcatattaatccaagtttatcaaacttttgagggataatctgccttgtatttagtcagagggctagaggtgcagatttcatattttcttaatgaaaatattttcctaatacacatatatcaatgtgagattca

SEQ ID NO: 12848 - DNA, 528 bp, Homo Sapiens
  misc_feature (88)..(88): n is a, c, g, or t
ccctctccacccagaggcaccagaatcatctacgacgaaaaggttcttgctggagtgcaagaactcacccattgcccggaccaccccnttgctgcctccctcagattcccggggtcacactcctccaacagcccctctctccaagctggaggagctgaaggagcaggagacagaggaagagatacccgatgacgcacaatttgaaatggacatctaatccagtgcagatgacctggcatgtggagttacagagggatccctcatgccactgctgccaccacctcttcctggggcatccaaaggccagctggcctcatctaatctggaagggagtgacttgttagttccaggcctcctttagttctgaggcagctagaccagggataggagtgggcaacttgccaagcccttaactctacttcctcttcagtctgtggtactcctcctaaccctaaaccctctatgctcaggggctggaactggggaatggagtaagtcaccttctgactgcttagtaaacattcaaag

SEQ ID NO: 12849 - DNA, 171 bp, Homo Sapiens
ctttatcctccagtgttgcagttatgacctcatcaaccagtgaccaccacttggatgctgctgcagccaggcagcccaatggggtgtgtcgagctgggttcgagcggcagcacagcctacccagttctgagcatcttggggcagatggaggcctctaccagatcccaccac

SEQ ID NO: 12850 - DNA, 264 bp, Homo Sapiens
atagtaggacgtgcccgtcgcaactgcacacacacacagctccccgatctcatccgttctgcacagctgaggaaccccgtccggcttcactgaacacatgatggctccaggcatcacgaggccgacatcctgcacggtgagcacggacagctcctcttccgagtccacacgaatgaccccataggtcagaccatgcatggagaggacaccccgacccgggggctggttactgtcatccgtgggcctccggatggccacagtaag

SEQ ID NO: 12851 - DNA, 1189 bp, Homo Sapiens
  misc_feature (1048)..(1048): n is a, c, g, or t
  misc_feature (1138)..(1139): n is a, c, g, or t
  misc_feature (1146)..(1146): n is a, c, g, or t
  misc_feature (1153)..(1154): n is a, c, g, or t
ctgacgcatgcctgcgcgcacagctgggccgggcgcgtcctacgcagcagccgcgagccgggctgcgggtgccagacggttcccggcggggggcaggggcggggcgccgcaggaggccgggactcctggcggaggagccccaaggaggcccgcctgacgactgaccagttgccatggcatcctactacgagatcctagacgtgccgcgaagtgcgtccgctgatgacatcaagaaggcgtatcggcgcaaggctctccagtggcacccagacaaaaacccagataataaagagtttgctgagaagaaatttaaggaggtggccgaggcatatgaagtgctgtctgacaagcacaagcgggagatttacgaccgctatggccgggaagggctgacagggacaggaactggcccatctcgggcagaagctggcagtggtgggcctggcttcaccttcaccttccgcagccccgaggaggtcttccgggaattctttgggagtggagacccttttgcagagctctttgatgacctgggccccttctcagagcttcagaaccggggttcccgacactcaggccccttctttaccttctcttcctccttccctgggcactccgatttctcctcctcatctttctccttcagtcctggggctggtgcttttcgctctgtttctacatctaccacctttgtccaaggacgccgcatcaccacacgcagaatcatggagaacgggcaggagcgggtggcaagtggacggaggatgggcagctgaagtcagtcacaatcaatgggtgtcccagatgaccctggcactggggcttggaagctgagccgtcgcgagcagcagccgtcagtcacttccaggtctggggggcactcaggtccagcagacccctgcctcatgccccttggacagcgacctctctgaagatgaggacctgcagctggccatggcctacagcctgtcaaagatggaggcagctgggaaagaaacccgcagatgtggtctgagctggatgcccggttccagaatcgctgcacagnttccaacagacagcgccttcccccatgcctggggaggggacctccatttctccccctcacccatgctgagtggtaagccggggcccttgnntggcggnttggggnncccggttgggaggtggcacaaaccttaacctgggc

SEQ ID NO: 12852 - DNA, 271 bp, Homo Sapiens
ctgccgctagaggacgaggaggtgaccggtggggtctcggctgccgctagaggcccaggcaagctgggagggagctcagcccgtgtgaatctgttgctggaaaccaaatgtgccctgaggcaaagttcctgtttccttccccaaatgcgagtttcacccccttcactctcaggcttccgggtagaaaaaaaacctctcccttgttccctcgcccaacaaacaccccggcagatggacacctcctggcccgccggcctcgaccggctcccgg

SEQ ID NO: 12853 - DNA, 336 bp, Homo Sapiens
ggtggcgctagaggccacggcagccaccccacgaggagtgggacagacactcagcactgacacagaggccacagcagccaccccatgaagagcgcgacggacactcagcactgacacagaggccacggcagccaccccacgaggagtgggacagacactcagcactgacacagaggccacagcagccaccccatgaagagtgggacggacactcagcactgacacggaggccacggcagccaccccacgaggagtgggacagacactcagcactgacacagaggccacggcagccaccccatgaagagtgggacagacactcagcactgacacaga

SEQ ID NO: 12854 - DNA, 2210 bp, Homo Sapiens
  misc_feature (189)..(222): n is a, c, g, or t
  misc_feature (857)..(891): n is a, c, g, or t
  misc_feature (1187)..(1196): n is a, c, g, or t
  misc_feature (1406)..(1406): n is a, c, g, or t
  misc_feature (1484)..(1484): n is a, c, g, or t
  misc_feature (1575)..(1575): n is a, c, g, or t
  misc_feature (1589)..(1589): n is a, c, g, or t
  misc_feature (1605)..(1615): n is a, c, g, or t
  misc_feature (1630)..(1630): n is a, c, g, or t
  misc_feature (1657)..(1657): n is a, c, g, or t
  misc_feature (1750)..(1750): n is a, c, g, or t
  misc_feature (1827)..(1827): n is a, c, g, or t
  misc_feature (1851)..(1851): n is a, c, g, or t
  misc_feature (1950)..(1950): n is a, c, g, or t
  misc_feature (1954)..(1954): n is a, c, g, or t
  misc_feature (1960)..(1960): n is a, c, g, or t
  misc_feature (1997)..(1997): n is a, c, g, or t
  misc_feature (2065)..(2065): n is a, c, g, or t
  misc_feature (2089)..(2089): n is a, c, g, or t
  misc_feature (2159)..(2159): n is a, c, g, or t
  misc_feature (2165)..(2165): n is a, c, g, or t
agcagccagacagcgagggccccgtgcggtgggcagtgtgggacgccccgtcctggggcacccccccggctctgtagccgtccgcgtgggcctggcctcggcccggtagcggaggataggatgtcgcctgaggagcatgcctgaggccccagagtctgacgacgagcctgccgccgcccccgccactgnnnnnnnnnnnnnnnnnnnnnnnnnnnnnnnnnncgagctggtcgggagaagaggaacaaaaacttttgagacttttccgttgccgctgggagccggaggcgcggggacctcttggcgcgacgctgccccgcgaggaggcaggacttggggaccccagaccgcctccctttgccgccggggacgcttgctccctccctgccccctacacggcgtccctcaggcgcccccattccggaccagccctcgggagtcgccgacccggcctcccgcaaaagacttttccccagacctcgggcgcacccccttgcacgccgccttcatccccggcctgtctccttgagcccccgcgcatcctagaccctttctcctccaggagacggcatctctctccgacctgccacagatcccctattcaacaccacccaacttctggtaccagatcgcgcccatctaggttatttccgtgggatactgagacacccccggtccaagcctcccctccaccactgcgcccttctccctgaggacctcagctttccctcgagggcctcctaccttttgccgggagacccccagcccctgcaggggcggggcctccccaccacaccagccctgttcgcgctctcggaagtgccggggggcgccgcctcccccatgccgccctccgnnnnnnnnnnnnnnnnnnnnnnnnnnnnnnnnnnntggctactggtgatgacgcctggccggccggccgcgggactatccacctgcacgactatcgacctggaactggtgaagcgggagcccatcgaggccatcccgcgcccagatcctgtgcaagctgcggctccgcagccccccgaagcagggggaggtgcccgcccggcccactaccccagtgacccgcttcgccttgtacaacagcaacccgcagcacgcgcgggacggagcacagtgcccgaactcctaccctcgatctctggcggccctgcttacgtacggcccaagggggggtnnnnnnnnnnattgcctacttcgcgctgggaaaacccccataatgggacaccccccctctcgcagagtattctactaggcgcacccattctatgcagtgagggacgaaacacactgggggcgtgaatcacaccacccctttacctacaatttattctttaggcacaggggccgccacgcccatctgagacaacctccggaacggggcttggccgagcgtngccccactgtccgggcgccgacacaccgctttgcccggcccctccgggcctatttgggggaggggggttttttccatntcccccggtacatatacatcgtacacaggggttgggcgagcaacaacccgccaacccccaccggccgcgggatgggtggcggaaggcggcnccttgtttcgtccnctgccccacaccaacnnnnnnnnnnntatgttgccctgagngtgttgcgtgaacataccagcgcgggnttattaattcaccccctttcctggggctcccgcgcgtgtttgttattgatacctcttcttcgataaggcgatcacgacggacggggcggcgtnatattgggtgacgcgtgtgagaggatacgaggcaaacccagcaaaaatatctggaataaagaattggtcgcagtcgnaagccggcgcttgcaactaaaggnggcccagctccctcacacgagtctatttcggtaggagggggggagtgcgacaagatttggatgttggcggagcactctcaaccgttgtcggcggtgccncaangaaagnccggcttcagagagcatcatacatccagcacgatgtnatgtaaggacggggcagcaactccacaaagtttattgatggagggggtgaggccggcttcccaaaaangcgccagcgtgattacaaatgggngcgggacgaaacggtacgagtgggcagcggggggggagtggcgaacgccgctgagacttgcgtgtcgtgntcggtntcgcgaccgttgtcatcccacgcactggatgaaacaaagacgacg

SEQ ID NO: 12855 - DNA, 392 bp, Homo Sapiens
tgccgctagaggcccctagacagatgtcagtcagaggctaggactctgccacatctttaaggacttggacacctctgggcaccgggctaagacggcgtcccaaagttaggtggcccgtcgcaggcagcccctagtagtctggcctcctcgcccgcacaacccttcacccacaggccaggtgcaatcccgatgcaggctcctggcccgaccctctacgcgctcaggcggacagctaaggtctggctgagtctccggcaggggcgtttggaatgtgaccggtcacccactctcggccctgcatttgcttgtgcatgcaagtccacaggtgtagaggcacccgaaccgtgtgcatcctcccggcctctagcggcccccggggtaaagagctcgaa

SEQ ID NO: 12856 - DNA, 387 bp, Homo Sapiens
ctagaggcctggcccccagcccacagccgagaccaccaggcagttcctcatgtcggacaagcccttgcacctagaagcctctctggataaggagatctattaccatggagaacccatcagcgtcaacgtccacgtcaccaacaacaccaacaagacggtgaagaagatcaagatctcagtgcgccagtatgcagacatctgccttttcaacacagctcagtacaagtgccctgttgccatggaagaggctgatgacactgtggcacccagctcgacgttctgcaaggtctacacactgacccccttcctagccaataaccgagagaagcggggcctcaccttggacgggaagctcaagcacgaagacacgaacttggcctctagcgg

SEQ ID NO: 12857 - DNA, 544 bp, Homo Sapiens
cgggccaggagaagtgattctcctgactaagcctcccaagtagctggattacaggtgcacgcaacaagcccggctagtaggtgcttgttaaaaaaacctcatcttttaagcagtatatattataattacatgttactcaataatattatgggtagttttttaaattagctttttttagaattatgaaattagcacatgttcactgtatatttgaacaatataaggatgaatgttgtaaaaagtgtaaatacacaaccgttcttcttgtaaggtagaaaaattacagtttagtatattacagataggttctttgaaagcctggaaagaaatctttagcatatcgtgctgtcaagatgtctttagcagagtcgttaatacaagatgacctttaggttgcttataagttaaagactgctctgtcgcctgcagtcatgtttatatgtatgaacatatttcgccatactttttacagaggttatatttggcaaggatagcagtaacagtaaaacagttttgttttactttttgttcagcgatgcttaag

SEQ ID NO: 12858 - DNA, 407 bp, Homo Sapiens
attataccccactgggaaaaaaatggtcggtaaagtgttctttcataataaataatcagacatggtcccatttgcaggaaaagtgcagactctgagtgttccagggaaacacatgctggacatcccttgtaacccggtatgggcgcccctgcattgctgggatgtttctgcccacggttttgtttgtgcaataacgttatcacatttctaatgaggattcacattaatataatataaaataaataggtcagttactggtctctttctccgaatgttatgttttgcttttatctcacagtaaaataaatataattaatggtttgcatgtgaaattcacttttgaaagaacatgttaccttaccttttgttttagaagttttcaagtattaaaatattttttagaaaaa

SEQ ID NO: 12859 - DNA, 528 bp, Homo Sapiens
  misc_feature (366)..(376): n is a, c, g, or t
catggtgttaactatatgtggtatcggaactgtaattcttatagagcagccatgcctatatttctcagctcctcactgatttctttatatgagctcagctgacaagcaaatgcagctattatgttcaccctctcttcataccggaccatcaacaacagtgttctaactcatccctgatggtctgtgagatgtagactattacacaagattcaagttactcgtaagcaacttttagatagagttggtcctgttaggaggagactcttgatgtcaccttcagtatcttgaaagcgggtcccctccccgaggctcttaattctttgaaaacttgatgctgtttcagctgaaaaattagcaagactgttnnnnnnnnnnngttgaggggagctgtttaagaaactgaaaagtaattgcaaactacattggataattgtgactttcagttgttgttctgtatcagttgaatttttgtgctcttttccctgtgtacgtggtggttctatttttctccaataaaacttttattta

SEQ ID NO: 12860 - DNA, 462 bp, Homo Sapiens
tgccctccagtcctacctcggcactgatcggatcacagcccctacccacgtgcctctccagtacatcggccccaaccagccccggaagcctgggctgcctggccagcctgctgtaagctaagaacccacccacagcagccctcgggggtgtcactgcttcctggagttcaggagaccccggacacctgggacctgtgttcctgagcccgtcctgacatctgtgttcttcctgtcagctccacgcccgggcccctggaccacggggtccacctctcctctgtccttgctgcctcagagtcagtcactgaccctgttatcattgagggtcccagtgggaagcaggacgtctgggctttacggttctagggacaggagaagcagaggaagaggcttccatccctccttccttctttcctcctacagtgctgagcaaaaagtccccaataaatggtcaggacaaag

SEQ ID NO: 12861 - DNA, 570 bp, Homo Sapiens
acacatttcttcacgaatttattatataaaacgccctcagagtatttaatttctcctcactttaattacacattaagaagcacagtggatgagaagcctttaagatgactacagttgcacgaaggtccctttcatcaaggtagcgtatgtaccctaacagtgttctaaaggctggcccagaaaaaccccatgttaccttatcacaatatggaaagcattgtcttctttttccactaaattaaattatggtgaaaagtgccacagttttatttagcattatggtacataacaaacagttctgtctcaattatgaaaaaaattaattaaaataatcctgaaagacatcctttttctccccccaatgatttgaaagctgcatttttcctgccaatttcaaacaaacaaatcatcaggttgatctacagtaatcagttaaaacaatcagtcaatcaatcaatcaatcaccaaggcacaagctcagcacattagctatagcttgtagcaaaaggatatatcaatgtctcaccttagttaaaaatacataatccttttatattataatggaataaa

SEQ ID NO: 12862 - DNA, 598 bp, Homo Sapiens
ccagggggttttgtcctctctttgtgccacctgcagaaagtgaagcattatctcatcctgccgagcgaggaggagggccgcctgtacttcagcatggatgatggccagacccgctttcactgacctgctgcagctcgtggagttccaccagctgaacccggcatcctgccgtgcttgctgcgccattgctgcacgcgggtggccctctgaccaggccgtggactggctcatgcctcagcccgccttcaggctgcccgccgcccctccacccatccagtggactctggggcgcggccacaggggacgggatgaggagcgggagggttccgccactccagttttctcctctgcttctttgcctccctcagatagaaaacagcccccactccagtccactcctgacccctctcctcaagggaaggccttgggtggccccctctccttctcctagctctggaggtgctgctctagggcagggaattatgggagaagtgggggcagcccaggcggtttcacgccccacactttgtacagaccgagaggccagttgatctgctctgttttatactagtgacaataaagattattttttgataca

SEQ ID NO: 12863 - DNA, 678 bp, Homo Sapiens
gaacaaaactaaaacatttagtattatgaatatgaaaaaagatcagtaaatcaatgtactcttctaggctgaattaaggtagactatttaaggtttcaaaaaagtttggctggggcagaataagttttacaaaacccatgccatccaaaattaagatgacatgtagcagcaagaagtattccaatgtctcataaccagttctcgcaagcaatgtgtattccttactttaaggaagtgtcaaaccaatagaaaaatctggaagaatttactaagtgtaataaattagaggtaaatcgtaataaaagaatttatgtctcacaaaaatattcacaagtgggagttttcttctaccaacttctcagagtccttctagccccctcttcacttctgaaagatgggatttaccaaaatctggtttacatttaacttttcagggacacatgacctgaaaagaaagatgtcagataatactgacattgcctcatgcactttctttgtatcagtccttcttctgtaagtaatcagaattgggtccaaatggcatagaatcaaacattatgtatcatgccaaataccacttcctgcccaacaaaatttcatttttctccagtaatgaaagaggtggacatttcttgttggactgtagcaatctgtggccgcccgctccacaccaaccac

SEQ ID NO: 12864 - DNA, 1218 bp, Homo Sapiens
gaacatcggggactgctacctgctctctgccccggggccccacggtcctgcttctggtgatccagctggggcgtttcactgctcaggacacagtggccatcaggaaggtgaaagaggtctttgggacaggggccatgagacatgtggtcatcctcttcacccacaaagaggacttagggggccaggccctggatgactatgtagcaaacacggacaactgcagcctgaaagacctggtgcgggagtgtgagagaaggtactgtgccttcaacaactggggctctgtggaggagcagaggcagcagcaggcagagctcctggctgtgattgagaggctggggagggagcgagagggctccttccacagcaatgacctcttcttggatgcccagctgctccaaagaactggagctggggcctgccaggaagactacaggcagtaccaggccaaagtggaatggcaggtggagaagcacaagcaagagctgagggagaacgagagtaactgggcatacaaggcgcttctcagagtcaaacacttgatgcttttgcattatgagatttggtttttctattgttgtgcagcatactttttttcattatttttctgttcatctttcattacatttaaatctctggaccctggagcacttctaatgtatcaccccatggagtcatggttctaataatcaccaattcagactcagatcctcgtggtctatcgagcatgcttgcttgctgtctgtgcagctcccatttcccccttcttcctgatagacttggagctgtgtgcctccactccaaggctgcctgcctgctgtaaacactattccactctgtctgccaacaactgcttcaggaatgggcctgagatcccatgcaggtccctgagaagtgagtaaaagtccgcagaggtggggatggaagatctctccttagatagaacctgtcttcctccctggcattgtggggtctgggcgtgacactgggactctcagcagctttgtgctgccaacctgagattgaaggcagtgcctcagagcagcacagagagttggggccccctgagccctgagccaccagccctgcagcctgccctatctccgcatttccagttgtattagccaatagatttcctacttatttaagctatttgagctccgggtctcttctacctgcattctaaaacattcaaagtaataaaaatttctccacatt

SEQ ID NO: 12865 - DNA, 1088 bp, Homo Sapiens
  misc_feature (649)..(650): n is a, c, g, or t
  misc_feature (692)..(692): n is a, c, g, or t
  misc_feature (808)..(808): n is a, c, g, or t
tttttagcaggctactgtgattttatatacaattgataactttaaacaattgctatataagttttatttcaaaacacctagcattgtatttctggaaaagaaactgaacattgagcaacctcagttaatccattaaacgagtgccaccacaaataagacaacaaacagagaacaagcttcttatcttcaaggactgaacctaatggccataccaattatattattccgatttgtcactttagtacaacaaaataggatgttaatccattaccactgttcttccattcgagaggcagctgatggttaaagcgcccgtaacatacatcgattatttttatcccatgactttattgtatgtttagaaaggtggaacagcagaagaaaaagaggctggacaaaagacgttgatgtttttgttcttcagatgtatgcagagctgattatgagtacgattttaatttatttctcctgatgaagagcttcaatgaaagcatcaagtttttcttgaatttctctaactttcttgaggtctcccgccagtttgaacgcgtttaccaagaaagcaatttaaatcttcttctcaccatcttcagcaaaatcttccaatacctctttaacatttttctctaatcgcctaaaactcagtatnnttgtaagttgttgccctaaagtatttgcggtgatagcaagcnatgcgctgtatacgccaaaacaagaccacatcattgcattccaactcagaatctacaaaatgccttttgtagtaataaaaacctcttcgacaaaggttaccatggtttagagctgnttttaaaaaatgtcttctataaacttgatgccagtatccttaatcaaagcttgatctacttctactcctcgggattcagggtcttccggaactggggtatttcatcacttgccagataaagctggtgctcctcattcatttcaacatcttctccaattccattcttggtttattgggaacacacttgtcttggtccgattcttcagcataaccacctctttttcagcttgaccccacatgtgttaattgcgttttagttctcttgaaaagcctgcaaggc

SEQ ID NO: 12866 - DNA, 1007 bp, Homo Sapiens
taaacagtaaatatataaatgtagatggcatttaggaccacagcttgctggatttgtgttagctatgggaataacttgatttggtataagctatattagagtgatggctggaggtggcagcttcacagaactggagaaccaggccaagtcccctccccaacctaattaggtcattacaggacagataagtcagtatattaagagcaatactagcatacgtttttcttaatggtaatcagcatggaccaagtggttgggaaggaggcatgcttaaatatcacaataatttggattggtaaaccaatgaaattaatcctgtgttaatctaacttcaataatagcacattatggcccgaagctatagtggcatatatacaaaagtccttattcactgggcggactgataacatttaaaaaatacatggtgttggaccccaaatgactttatacccaattctacataaaaatatagaagatctatctttttttgttaccttcagatgttcactaaataactcagtttttaagcagaagttttcagggcattaaatatatgttgtgtatgaagtatctcaaactggaacataaattaagtgatcaaactgccattcacagtgtaaggcagcacttaaatttcgaacctaaagtttagatgcattgtataaaaaaacctaaaagcagcatctgttatttagctgtaaaccaagttggaagctattcggataatttcttaaatattgatgaactttggagtactggtttcttccttcaaactgaatgtaattaattcatgaataaatgcaccttatatgtttaaacaatctttgtatacttttgggatttttggtgcttatatgctaaatcacattcagcatgtgtattttgacatttaaaatacttccctcaattctgtaaattaaaagaatagttattttacagttccagggattgtgaaataaatgttgcagttttttaaaataatgaaaataaatactcttggttttgca

SEQ ID NO: 12867 - DNA, 737 bp, Homo Sapiens
  misc_feature (49)..(49): n is a, c, g, or t
  misc_feature (71)..(71): n is a, c, g, or t
  misc_feature (125)..(125): n is a, c, g, or t
cagagcttctcagtgtggatcttgtgtgaagctcactgctcaaaggtgnccgtggatggtcagcacctgtntgaatactaccatcgcctgaggaacctgcccaccatcaacagactggaagtggngggcgacatcaagctgacccatgtgcagacataggcggcttcctggccctggggccgggggctggggtgtggggcagtctgggtcctctcatcatccccacttcccaggcccagcctttccaaccctgcctgggatctgggctttaatgcagaggccatgtccttgtctggtcctgcttctggctacagccaccctggaacggagaaggcagctgacggggattgccttcctcagccgcagcagcacctggggctccagctgctggaatcctaccatcccaggaggcaggcacagccagggagaggggaggagtgggcagtgaagatgaagccccatgctcagtcccctcccatcccccacgcagctccaccccagtcccaagccaccagctgtctgctcctggtgggaggtggcctcctcagcccctcctctctgacctttaacctcactctcaccttgcaccgtgcaccaacccttcacccctcctggaaagcaggcctgatggcttcccactggcctccaccacctgaccagagtgttctcttcagaggactggctcctttcccagtgtccttaaaataaagaaatgaaaatgcttgttggcacaaaaa

SEQ ID NO: 12868 - DNA, 408 bp, Homo Sapiens
  misc_feature (107)..(125): n is a, c, g, or t
gtagaggcccttcacctggagaagtcagaaatctgacccaattccaccccctgcctctagcacctcttctgtccctgtcattccccacacacgtcctgttcacctcnnnnnnnnnnnnnnnnnnncacctttcttccgtctgttcactctgcggcctctggaatcccagctcttctctctcagaagaagccttctcttcctcctgcctgtaggtgtcccagaagtgagaaggcagccttcgaagtcctgggcattgggtgagaaagtgatgctagttggggcatgcttttgtgcacactctctggggctccagtgtgaagggtgccctggggctgagggccttgtggaggatggtcggtggtggtgatggaggtggagagcattaaactgtctgcactgcaaaaaaat

SEQ ID NO: 12869 - DNA, 457 bp, Homo Sapiens
tttctagttttataggcatttaatagtttaccagttggtacaataagattttttaatatgcagaaaacatgaataaattttgttttacacagtctgagagcaacaaatcttactgtaaaacacgagagcaatattatatacattcctttactgattttttaaaattgtgtcaatatcttcagtgaactcttaacaatctggggaactgttttcctcaattaccacttcagcaacgttcatacgaaatcaaggcttgccttcatgtcagtgtcaggatcaactttaactcgaagagtttgtgtttgtctctaacatcttcagagtgagctttagggatgcctgaaggatggacagtacaagcaagcagctacttccatgatacagtgggaagataaaaaggcccattcagtccagccgtgacctgtaaatccagcttgccctccccccaccccactgg

SEQ ID NO: 12870 - DNA, 501 bp, Homo Sapiens
  misc_feature (98)..(98): n is a, c, g, or t
  misc_feature (122)..(122): n is a, c, g, or t
gtggaactagaagcagctctgacaaaggcccttggggaagtggacatttttctgacctggatgcagaaattctacaagctctgaatgtctagaccagnacccctctccccctgcactggttntgttccctgtgtcatttcaaacagtctcccttcctatgctgttcactggacacttcacgcccttggccatgggtcccattcttggcccaggattattgtcaaagaagtcattctttaagcagcgccagtgacagtcagggaaggtgcctctggatgctgtgaagagtctacagagaagattcttgtatttattacaactctatttaattaatgtcagtatttcaactgaagttctatttatttgtgagactgtaagttacatgaaggcagcagaatattgtgccccatgcttctttacccctcacaatccttgccacagtgtggggcagtggatgggtgcttagtaagtacttaataaactgtggtgcttttaaaaaaa

SEQ ID NO: 12871 - DNA, 722 bp, Homo Sapiens
  misc_feature (202)..(202): n is a, c, g, or t
gacaacggtgaaggccagttggtgaagggaatgacccaaggtccctttttggccaaccttcctccataaattgatggttcacagatttgccctacgggtttccagatcctttcaagaaagaaagagggaaggtctaaggggtatgtcccccctcactggcatcccctgcagagtcaggactgctccgggggccaggctgccntgggagcccccctccgagcccagccagccaggctctcaggccctgcgcctgcctcaggtctttcttgctgcagcctgctccagcctggcccccaccccaggggcaggcggcccctcctggcttctcctgtagggcacctccctgcccctagcctcccaggaaatggtgctctcctggccctgcctctggcccttcccgggccgctgcccctcagccatgtggcacttctgagctcctgacctaggccaaggggaggtctctgcccccttccccgcacctgggctacccttgggtcctgctcctcaggccgctcccctgtccctggccatgggtaggagactgccctggtcatggccgcctgcctgtcattcctgactcaccaccgtccccaggtgaaccattcctcccttctcctcagctgcagtcgaaggctttaactttgcacacttgggatcacagttgcgtcattgtgtattaaatacttggaataaatcaagcaggtctcaacgcctccactaaa

SEQ ID NO: 12872 - DNA, 451 bp, Homo Sapiens
cctcattctattacatcattcttgtcaagtctaagctttatcatgtctgaattcttttaacactgaatctgtgatgtaaaaatgtatgatgtgccataaattttatttcataataaactaaggttatagcctattgtaatctgtaaaacatttcttgtaaattacctaatttattttttcatttatgtacagtatcttatgtaaatttgaaaaatgtttgccatggcgcattctgtaaacattcccgtattcttttccttaatgcttatttgcatgaaggtaacttgggttttgcttgtttgtattggataaccattaagccaacttcagtttctctgcctttttttctgtagtttaaccatttctaattttgttcatattctaaatagatgttagaatcatactttttattttctactttctaaataaattatctaagttgtttactaac

SEQ ID NO: 12873 - DNA, 490 bp, Homo Sapiens
gagaactgcatcatgaaggagaaacttggatttgtgattcaggcaagtccaggttcaaatcctggctctgcaatttaccagctgcagaaacttggatatttagaacagatgaagatgatcccaaataaggatatttggtgtccctgaagtagagaactcaaaactatggaatagaaagagtgaagatgaccagacaactttctttcagctttaagtcagcctcctctccctcttcaaagcccctcttctaggacagaagaggccatcagggactaacaataaatgcctcacaccctccagcggacatctgcatttctgaacattccagaccaaggttataccaaagaacagccctcttagtggcattttattcgatcaggccaagataaagttttcctaaaactggctttttagtaaaagttcacatgataaatacacattcattatactattgttatccttatgcttttgtgtgtatttgaaattttcc

SEQ ID NO: 12874 - DNA, 765 bp, Homo Sapiens
  misc_feature (234)..(252): n is a, c, g, or t
taagacttcttatgatacagcctttgaaatgtcacagtataattctgccatattctattgtgctgctttctgttacttgaagcggttcacaagggcagcccagattcaaaggggtagtgaagtagactccattgctggggggaggagaggtaaaatttcattttatatcttatacattgtttcctgtgcatcctggaatatgaagaattatggccattagagaatctatgacannnnnnnnnnnnnnnnnnnatctgtctcttttctctagcttatttgttctgtaacctttatacctccctcccactacagtgtgtctagtgcttaaggacgacggggacggacagatttaaagccaaatctgtcttggcttggactcttgttgcatattagccatgtggatttgtgcaagttatataatccttgtaggttttgttttttcgtttataaaacaggaatctctcaggactgatgcaaggattggatgaaaagatctaaagccttctgtgaggtctggcacatggtaagcactcacatggtcgttaaagctgtgctgcccatgatggccgccactggccacaggtggcacttgagcacttgagacatggctagtacaaactgagatgtgctgtgtgaaacacacactggattttgaagatgttgtatgaaacaaagaatgtaaaatatttcatcaattttttacatttattacatatttaaatatttttggatatattgggttaaataaaatatattattagaatt

SEQ ID NO: 12875 - DNA, 388 bp, Homo Sapiens
ttgagatagcatcttgctctgtcacccaggcagaattgcagtggcacagtcatggctcactgaataatagatgttaaataatactagatgttaaataatagtatcataagtacctacactgtttcctcaaccctttgcttatatggtttccttcatttgattaaaaagctgaagtggcacatacatccccctttctgtcatagagaggcagatgacaagcggcctacccacggtttgggataatggactagtggcaacaggcaagtccagcttttattgtttgggatccttactgagaagcagcaggcttcctctactgtcataaaaatattaaaaagtaagagcccgtataatttctcataataaaacaatgttttgccctcgtgcc

SEQ ID NO: 12876 - DNA, 769 bp, Homo Sapiens
  misc_feature (288)..(296): n is a, c, g, or t
  misc_feature (434)..(670): n is a, c, g, or t
  misc_feature (692)..(702): n is a, c, g, or t
ctgagcactacaggcactgtgggacgtgtattaacacataatggattttgaagtactggtagttgaaaacatgccacttgaacaacctcgagtgaacatagccatgctgctactactgtgacataccaattaggggtgaagcttgaggatacttgtcaaagttcaaagcagtagaaaatacttggtaacttagatttttcactaggtactcttgtaattctgccttggatccctggacaccctggattttatttttaggatgtttggccacaaattgttactgtaaannnnnnnnnaaaaaaaagcctaacagttaatattaattaccttgtttgttacgagaatgaatggctcggatgtgagccactgcgcctggtcaagaggtagtttttaaattcataaaatgggctgggctgggtgcagtggctcatacnnnnnnnnnnnnnnnnnnnnnnnnnnnnnnnnnnnnnnnnnnnnnnnnnnnnnnnnnnnnnnnnnnnnnnnnnnnnnnnnnnnnnnnnnnnnnnnnnnnnnnnnnnnnnnnnnnnnnnnnnnnnnnnnnnnnnnnnnnnnnnnnnnnnnnnnnnnnnnnnnnnnnnnnnnnnnnnnnnnnnnnnnnnnnnnnnnnnnnnnnnnnnnnnnnnnnnnnnnnnnnnnnnnnnnnnnnnnntggcaagcaagatcctctctcnnnnnnnnnnngggactggattacagttttgattaaaatatgcttgaagttaataacctattctggcttactgaacac

SEQ ID NO: 12877 - DNA, 609 bp, Homo Sapiens
aactcagggaaacacatgtttattacaaggctattttaaaggctacaaatagccagatgaaaagatacacaggatgaagcctagaagagtcccaagagcaggagcttctgtctgcaaggagttgcgaagtgccattctctcagcatgtggacgtgttcttgtccaccttcctggaagcccccacacatttggctatccacaagctctctgaaccctgtccttttgggtttttaggagccctcattacataggcatgattgattaaatcattggccactggcgatcaacgtcactttcagtccctctcccccaacctctgggagtttggggggtgggctgaaagtttcaacccctctaatcatgccctggtctttcagatgtccagtccctatcctgaagctacataggagctgtccgccatcagtcatcttactagcatacaaaaagacatcactttagagatctcaaggattttaggagttgtatatcagaaggcagagacaaagaccagatatatatttgataatattacagtagaaataaagacattttagatattcaagctcaggaggctactaaaggacaggctccatcaagaagagaaccccg

SEQ ID NO: 12878 - DNA, 631 bp, Homo Sapiens
ccatccctaggtcctggatggggcaggaggacagagtcacacagaggagaccatcttgagaagagcagtgacctctcaggtgactcaggagtgactcaggacaaagtctgaagcagccgctccaggagtgaccctgaggagaaggagtctaccctcactccatttccttccctcattggccacacccaaccagagaccagaggggaagggagtccctgatgtggtccagacagaggagtttgaaattcttgcttcaggccatatggagtggatattccttccagaaggaaattacagaccactctctgtttctactcaactgcttttcactccaggatgcttcacctcttggggccttccccagcagaggcccaggatcacctgcaaaaggcttccccaagggtggggccagaagcagggctgcagatatgtgtcctgaacctcccatggaccctgctggctcccttcaaaggcttcgggcatagcgacttgcctttccgtcttgttcagtcgtcaccagtcagccgtctgcagacttctctccctcacgttgtggcagaggagttgtacattctctagattttaaaaatatataagttactttttctttaaaataaaaattgtctctgaa

SEQ ID NO: 12879 - DNA, 974 bp, Homo Sapiens
gacacgaaggagccgaggagcacgcctacgaagaacagggaggtggtgaggggcaccttccagttgtcctcacacaccagattccactgccaaggaagacagcatgaagcgtgagcccaaccctgaggcagacctcaaccccagcccagctctgagggaatattagcacggctggcgggcagactctcctcccctgggccaggatattgcctttgtacaaagggcataggccttgcagccctgggtttgactggcctgtgccgggactggggagagtaacctggggcaggtcactgccctccctgaaactcaggatcctctttggaaagggagggtgatgctcctactccgctcgcattacatagcaagaagccagccaaggccatggctgtgactggtgacccctcagctgtgaggcagtccaaagtaaaggtggcactgcatcttcagaagccagcctagtgcggaggagaggtgtttgaaaaacccaaagggcagggcagagggcatggccacttggtccaggcgtaaaatttctttccccttgttgaaaagtgcaagtgggttccaggagctctgtgactttattttctgagcaggcccctctgagaaatcatgtggtccctggtccactcacgcctaggccaagcttgtggcctggatttcgaggccccatcgttctggggcctacttactcctctccagggctccctagctcccctcctacatccctacaccctccttcccatccagtctttccagaagtgtggtccctcccattccctagggtctgtgggatgctgctgccctaacaagtccctgccagtgcatctacaaaatgagtttcagccagagtttcagtttgacttaagtcaattaagcaacatctcaagggaggtgacaaaaatttcaaagtgtgtttagtgacctttcatttattaaaaacaaataaataaacaaacagatgccaatga

SEQ ID NO: 12880 - DNA, 410 bp, Homo Sapiens
gcatgagccgcggagcctggcctagaaaggaaaatttaagtaagataccagcttcagaataggagctagggtctagagaaatggagcacattgtaactggctgacaacagtggcccaggaaaaccacagtaacttaatttgaaacttaatttgcttcccttgttttaatgactttttaatatttaaagatgttttctaaacctctaatcctcaaaacaaaaattggaagtaaactgattttcattcagtgaactgccatttagaagtgataggggtttacatactttgtaccattagttaacgcctaagctaaaagtataatatccagtttccctatgatctcaagtttatggaaagtagcctttcttttggcagtgtaaacaagcagttacattaaatacgtaaagata

SEQ ID NO: 12881 - DNA, 414 bp, Homo Sapiens
gcaaagataattgtctcgtgttttaccctgaccccattcctttaagagggtcacttcttggcccattcatttaaaaaccaatgtcatagttctgtgattccacctatcagacagtgccacgtccaaggcggggctctcacctccctgggaagagagactgttgctgtctgtgcttcctgtgttctccagtcccacgctcccacggacccacgcccttggagactccctcagtgtcccagggcttctggtgtgttcagagacctccacactcaacgaccactggtgctgcagaagggccggtgcttacattccaattaacagacgcttttcccatctaatgcctcttgccttctcctaacaccacctcgggagtgtttatgtctattctaagtgaatttcactgtgtgaaaaaat

SEQ ID NO: 12882 - DNA, 531 bp, Homo Sapiens
atttggtttggtttggtttggtttgataattaaatttcagaatgtccttaggccattctccttctcttccatggagaatccagcctcacaaaaggattctttcaacttctttattgcaagaaacagttgagttaaatgtttgtttttggaaaggcgggatgtcagttcacatccttggtgtgtgtaagtaccgatgcacgccaccaccatgcctgtgttacagcagctccatgatggttgttgcccgaggttaatgtagttgtttgttagacctgtgtcttacacatttctcagagtaggatattagtattataatttaaagctacgacagtcacaaagtcacaataacttagaaacattgcgcatattcttctgaaatagcacttaaaaatgattagtgtcagtattttttcacttgggtcaatcaaatctgtaacactgaatccaagctattaaacaaaaagtatgcaatgaatgaattttgtaaatgaatacagagtatcagtttgcaatagtgttcttaaaacagta

SEQ ID NO: 12883 - DNA, 472 bp, Homo Sapiens
attcacacctgcacaacccctgcaaggggaaaggccaagagccaaggacccacacacactccccaggcacctacatacatgcatgcagagaatacatgttccctgcctcacagacacatggtcacacatggacacagatgtacacattacacacgttccttgagcagaactccaactctggcagatgtaggtgccctcatcagtgctgtctgcctgggccaggaccagttcatgccctagcccagagtcaggtccctggagcagctttggctccccatcccgaaaccaggacactgggtccccggcagtcactccaggacaacacagcttcacggacctgcctggctgcccatactggaccctgggggccccaggcctgggggcagggggaggaggcagacaccagggctgtaccacggccaccaggaccctgctcagccctgagcagctgctgctcatcttccgcggccgc

SEQ ID NO: 12884 - DNA, 568 bp, Homo Sapiens
gtggcaggcctgttgggcctggagctgtataaggtggtgagtgggccacgccttcgtagtgcctttcgccacagctacctacatctggctgaaaactacctcatccgctatatgccttttgccccagccatccagacgttccatcacctgaagtggacctcttgggaccgtctgaaggtaccagctgggcagcctgagaggaccctggagtcgctgctggctcatcttcaggagcagcacgggttgagggtgaggatcctgctgcacggctcagccctgctctatgcggccggatggtcacctgaaaagcaggcccagcacctgcccctcagggtgacagaactggttcagcagctgacaggccaggcacctgctcctgggcagcgggtgttggtgctagagctgagctgtgagggtgacgacgaggacactgccttcccacctctgcactatgagctgtgacaaggcagccaccctgtcacctagctcaatggagccccggatcccaagccctgcattgtaagcccacagtaggcactcaataaatgcttgttaaaggaaggcaaaa

SEQ ID NO: 12885 - DNA, 696 bp, Homo Sapiens
ggcggcggagagcgaggctggtgagcaccgccgaggcgcgggccagctcttcgagggtgtgcgcgggagtggcacggcgggcgggcgagcgaggggctaacttcagcggtggcaccgggatcggttgccttgagcctgaaatcatgaccaccccaggaaaagagaactttcgcctgaaaagttacaagaacaaatctctgaagtcccgatgagatgcgcaggaggagggaggaagaaggactgcagttacgaaagcagaaaagagaagagcagttattcaagcggagaaatgttgctacagcagaagaagaaacagaagaagaagttatgtcagatggaggctttcatgaggctcagattaataacatggagatggcaccaggtggtgtcatcacttctgacatgattgaaatgatattttccaaaagcccagagcaacagctttcagcaacacagaaattcaggaagctgctttcaaaagaacctaaccctcctattgatgaagttatcagcacaccaggagtagtggccaggtttgtggagttcctcaaacgaaaagagaattgtacactgcaggtgagcctggcatttgctaggaaccagagtggaaccggcaaagtggccagcaacagagtcctgatccaaatggagaaagggaaccaggcgtacctcaactggagtgggaaacttgatagg

SEQ ID NO: 12886 - DNA, 490 bp, Homo Sapiens
taagtaaaaaaaacatttaattactagttagcccttaactgggaaactcaggtaatgaactgctgacttttctaaagttctttaactgatcaattctgtatagagggatatttatctaaccactttccgtattttacaagtgctctttctaaaaaggaataactattatagctctatttccccaatctcatataggactcatgagagattgcctgtgtaaatataaaagcaccatatgtgttcttaactcctatggctgcttgaagctcatgatgaaaaagtctttttgtcagttttaattgttaagtacagaacaaacaattgtttggtgatggcctggttgaaagagagcatataaatatatcccagtggaactcaccaaagaagaccacacctcagaaattattgcattttctcattatgtgttgggtttgatttgcttttgtttttaatgcagctcttttaatataaagattcttgatacagtgaa

SEQ ID NO: 12887 - DNA, 556 bp, Homo Sapiens
  misc_feature (356)..(356): n is a, c, g, or t
  misc_feature (364)..(364): n is a, c, g, or t
  misc_feature (379)..(379): n is a, c, g, or t
  misc_feature (524)..(524): n is a, c, g, or t
  misc_feature (541)..(541): n is a, c, g, or t
acattaaattattgattgaacaaattgaagataatgacatatgtttttattacaaagtcttccatcatcttatatcattgacacatattatgagacctgcatttgaagagtgaatagaaataagaaaatgttttcccaaccccacaaaaacagaaaaaaatatataattttataattatcttataaagccaaaagttttatgaattatactttttttattagttaaaaatgacagcataactaaggttaatttttatttctggaaacacaaaattaaggtagcacaactgtcttgtagaactaacaagtctgaaagttcatggtatttcaatgcagtaaaataatatttctattgnttagtttntcagtttacctaatncaagtgacaaatataaaattcactacactgtatttttgttgacaaaagcatttcaccttacctagatttatataataaaaacaaattgtatccatcttccctttaaatatatgtacttcaaagtgatacaaagaattcacatganaacctttccctatgttntatctcctgaaaaaa

SEQ ID NO: 12888 - DNA, 511 bp, Homo Sapiens
  misc_feature (292)..(350): n is a, c, g, or t
  misc_feature (387)..(449): n is a, c, g, or t
gcggccgcggtcccccagggcgcagcgcaggaccccagggggcgccgggcccacagtctccgccaacgcgggcggcagcagcagcggcaccgacggggacctggccttgtccgccggcaccgccgcagccaggggccccggggcccgcagcggcgcccccgggggcccgcacggagaggccgggctgtgctgcgccgcgtccagctgcagcgtctcgccgatctgggccaccagccggtccacctcgcccgagctgcccagcgccactgactgctgaagtaggaggaagctnnnnnnnnnnnnnnnnnnnnnnnnnnnnnnnnnnnnnnnnnnnnnnnnnnnnnnnnnnnggcacggcatggccccctgtctgggcacccggagctnnnnnnnnnnnnnnnnnnnnnnnnnnnnnnnnnnnnnnnnnnnnnnnnnnnnnnnnnnnnnnngagctgaagactaagtctggaccggggccggggcggacgcggaagccggagcccgccaggca

SEQ ID NO: 12889 - DNA, 330 bp, Homo Sapiens
catattggacccataagaagactcagcagcttctcaatccggtggactggaacttcgcacagccagaagccaagagcaggccagaaggcaacgggcagctgctgcggaagaagaggccatagctgctccagccggggctccgggggcggcagcagagctggcacaccgattctgggaagccccgcgaatgatggcttttgaattaatgaggcagtgaatgttttgtgtttacttctaagggaaatactaactttctttcgcattagtattaattttgaagtagctacaaagtatttttaagaaattataattttatgactgtcaaaaaaa

SEQ ID NO: 12890 - DNA, 424 bp, Homo Sapiens
aatgtacaagttttgtataaataataaagaactccttattttgtattacatctaatgcttcaagtgttgctcttggaaagctgatgatgtctcttgtagaagatggactctgaaaaacattccaggaaaccatggcagcatggagagcctcttagtgattgtgtctgcattgttattgtggaagatttaccttttctgttgtacgtaaagcttaaattgcttttgttgtgactttttagccagtgactttttctgagcttttcatggaagtggcagtaaaaaatatgttgagtgttcattttagtgactgtaattaatatcttgctggattaatgttttgtacaattaaaaaattgtatacattttgttatagaatacttttttctagtttcagtaaataatgaaaaggaagttaatcccaaaa

SEQ ID NO: 12891 - DNA, 521 bp, Homo Sapiens
cctgtcagctgccctcctccacctaaaccccttcgactcttctgctttgacaaagaaaatgacattggggaggggaggtgctccgcctcccagcttttctcaaaatagtcctatagatactggtaatctggaaatgaagaagtaattctgtctctgcacctacttttgcagaatgttcaaggaagtattctgtgttagtattaatgccaaaaagttgtttttaaaggttttgtactcagcacatcatacaaaccacattacttctgtcacttcagggcatcgggactggctggcgcccttgttatgtgctattttaatcagtgtaacattggtcaagttgttacccatgtatgctgtgtttatcatgtgtatatcgtccagaaagtattaaggctttaggtagatgcaactggcgaaccttggagagggaatgctgattgtcttgaccaaacccacagcctgtctcttctcttgtttagttacttacggcaataaatcatctatgagttagtgcaccgtga

SEQ ID NO: 12892 - DNA, 528 bp, Homo Sapiens
  misc_feature (28)..(28): n is a, c, g, or t
ttcccgcccctgcaatcttcctcctgcnccgggcagggccttaggggccggcgatcccgtcgggggcaaggcacctgcaacccagaacgcagcagctcaggccagctgaactgccgcgcctgcggaactcccgggagagttccaaagcggtgcgtccaagttttccggcagtgggcggggcctaggaacgcccccgcgccccgcgccggcggagcctcgaagggacttccccccaagagggcggggccactcagggggcgtggttttcgtcagcggcggtcacgatgacgtccatccaaatgcgcatggcttcggggctcggagccaccatgtagaaaaggcgttcgtaggttttgacgcagaaggtcaggcgggggttggggctcttgaaggcacagcgtaagtggtcataatagacttcctcaatggcctggaagtagatgacacctttgagcttggtctcttccttgtccgcatagtaggccaagcggcgggcttggcggtaaaagcagaaccatcgcttcctcc

SEQ ID NO: 12893 - DNA, 566 bp, Homo Sapiens
  misc_feature (555)..(555): n is a, c, g, or t
gagtatacgacattccttaaatgtgatcctgcttccctctgggcagctgcatcctctcctcctgcaggaccgtctggaaacttggctctcagtttgcgctcccttctctcctctgcctgccccaagcccctctttctaaaaaagtgatgccatgttcatggggttatttcttgaaaatacttggcggcctccatgcttctgttttctttgagccaggtggtcaggagggcttacaaagaatgcctgggctcccccgcaggtgccggcagatggggtagcgaatggtcctgtgcctccacctgctccgggagggagtctcccgtctctaggcctggccccttcctaaccctccacgtatcctgttctccagagacttcagaacccactcctgagaacagcggagccaggcgcttagaggaagaccaaatgctgccaggacacggattgtccagggattacattccagcatcttattaggtatctggatctggtcggaaaaaaattagaaactatgtataaaacttacaaatattcaagtatcaaaaggttatttangatgaaagttt

SEQ ID NO: 12894 - DNA, 442 bp, Homo Sapiens
gcggccgctgaccctgctccagcgggcggggctgctgctactcttgggactgctgggcttcctggccctccttgccctcatgtctcgcctaggccgggccgcagctgacagcgatcccaacctggacccactcatgaaccctcacatccgcgtgggcccctcctgagcccccttgcttgtggctaggcagcctaggatgtgggttctgtggaggagaggcggggtaatggggaggctgagggcacctcttcactgcccctctccctcaagcctaagacactaagaccccagacccaaagccaagtccaccagagtggctgcaggccaggcctggagtccccgtgggtcaagcatttgtcttgacttgctttcctcccgggtctccagcctccgacccctcgccccatgaaggagctggcaggtggaaataacaacactttat

SEQ ID NO: 12895 - DNA, 566 bp, Homo Sapiens
  misc_feature (25)..(25): n is a, c, g, or t
ttaccacttctggtgccataaaatnaggtgttccaacacgtctcccagctacaagtccagactcccctaatgaatagctacccaaagcctccaagtttaacaggtgccgagttttcttttgaggcaaggagaacacagtggggcttcacatccctgtgaattatgttattatcatggcagtagcgtagagcttccagtatctgtctcatataatggctggctacagcttcactgtacacaaaaccagcgtcagctcgctttacgatttcaaaacacagatctgctccatccataaattcgaaaaccatgtaaagcattccatctgagctatatgtctccaataactctacaatgtgtggatgtttcagcatatgacagatactggcttcccgctttagatcttctgtacttaaccctggacttgatgtgaacttggctacatcaacaatttttacagcaaattgttgcccagtttctctgttgatacatcgtcgtacaacactgaagggaccctttccgatcacctcgcacagctcgtacacatcctcgaacagcaagtcgtcgtc

SEQ ID NO: 12896 - DNA, 361 bp, Homo Sapiens
ccacacaatgagatgctccgtggcaacacaaaatgaaccgtggacacacactgcacggcggatgaatatgcagacatcaggccacgtgaagggagccatggccccgaggcgccacgctttgtgattcaggaaagaaagcacgcagccaaagagcgcaaagaggctcagaggaggccagggtgccctggagagacgctgcgtcctgacgacacagcatccctgtcccgcagcggagatttcccagatgaaggattccccggcgggagacagggccctgcacacaggtcctctgccacgctgctcaccatgcctgtgtgttatctccccatgaaaagtcacctaggccgagcatggtggctca

SEQ ID NO: 12897 - DNA, 439 bp, Homo Sapiens
attcagctgttatagtgcttcactgtttttgcactgatttttctataccttaggtggtcagaagacaaccttgaatgcactcatagagaaaactgttactttctgacgtaatgtaattcaggaagacagacgctgcaatcacagattttaaaaaattgtttgcacttaaaaatagttgaatgctggtggaaagttactttgcagatgggtgtaaggactcatggccctctgaggtgcggcgtgaagatgccctttttacccgttgacgtttattttacgtaaaataaactgttgtttccaatgcaatcaactctgtattatatgtataaatattgtaattctgcaattggggaaaatagttacttcactagtaattttcatcatttaagagtgatatttctaattcacaaaagttaatattaaaactatattgaatata

SEQ ID NO: 12898 - DNA, 534 bp, Homo Sapiens
gtatcctggatctctgcagtaatggctgcgtgtaaggctgactccaaccctccatcagccatcaagctgcccaccagaagatcaatcaccaatcgatgacctggacttatgctcacttcattgcctgaaactccgcagggcaggagagcagagtgcccgggcctgcttctcagcggtgggcaacagcatggaccagccgctctgcagcatggcctgggaggccgactgctcggctgctcagcacgtctgcgctgcttgccagggtcaccaccgtctgcttcaggctgttcaggaagacgtccacacctattaaggggggggctggtactaaacacagtgacagcccaggtgacatgccctgcacagagcccagtacaaaggaaaggccaacaaagcaagccacatttttggttggtctcttcgggtaattgattaaaagggcaaggttcaagcttgatatcgggtgaaaaggaatttgggccgccctgaataaaggttttctcccaaaaaagtgggccccaaaatttttttatt

SEQ ID NO: 12899 - DNA, 492 bp, Homo Sapiens
ctgcattcttcaaatgtaattttcaaagatgccttttgcctcatcccttgcttttaagtattattatagacttttggagactcacgaaacaagcaatccctaaattctcgcccaggaaagtatcttggattaaatggtttttgagaaccttgagagtgtatattctatgaaatggaagaaacaagaactagacagagtcacaaatgctgttgatcacagacaatctctgccatccataaggtaaatgtaatacatctggcgacctgctgagtgtgaacttgcagcaggtgaggaaggaactctgaactctcacaatcttgtttcttcatttcccagagagaaactcggcaaagaaaaaaaggacatttccctacaggttatctgaaagaatttcaatgcttacctttaatcatgtgacattgtttatcttggattaaaagaaaagaaaatgtatttattttgtgcatattttcaataaaaatataaaatcga

SEQ ID NO: 12900 - DNA, 541 bp, Homo Sapiens
agaatttcatatcctgccaaactaagctttataagtgaaggagaaataaaatccttttcagacaagcaaatgctgaggtaattcatcaccaccaggcctgctttgcaagagctcctgaaggaagcactaacatgaaggaaaaacccattaccaaccactacaaaaacacactgaaatacaaagaccaatgaaactatgaagcaactacatcagcaagtctgcaaaataaccagctagcatcatgatgacaggatcaaattcacacaatcttaaatgtaaatgggctaaatgccccaattaaaagacacagaacagcaagctggatagagttaagacccataggtatgctgtattcaagagacccatctgacgtgcaaagacacacaggctcaaaataaagggatggaggaaaatttacgaagcaaacagaaagcagaaaaaagtaagggaggaaaatttaccaagcaaacggaatgcagaaaaaaagcaagggttgcaatcctagtttttgacaaaacagagtttaaaaaaacaaagataa

SEQ ID NO: 12901 - DNA, 448 bp, Homo Sapiens
tgtccaaaaaatatgtagtgtcaagttcaccactcaaattctaaagatgtcagttgtctaagggacaaaaaagttgccccaaaaagtcctagggaagcttatgggtacacttaccttgctggagaatggtgccatctgcattaactggttgatagacgatggtctgcccttcagcagtctgtgccacttgctgtccctggacagaaatcttgctggctgtgtcatgagtctggccagcagtgacagccgtctggggctgctggatgatgatctgctgggtctggccctgctggccctgcacctgcacagcctgtccaccctggatctggatctgtccaggtgggaccaactgtatttgctgcaaaccctgtgttccagaaacaggtacttgcatgatgtttgaccttgccaccagggacagccttggaccatgatggttgggcagttg

SEQ ID NO: 12902 - DNA, 429 bp, Homo Sapiens
  misc_feature (51)..(51): n is a, c, g, or t
  misc_feature (53)..(53): n is a, c, g, or t
  misc_feature (60)..(60): n is a, c, g, or t
tcttgaggtggaaagttctgtgattaaccagaatgaatgtctctaacctcnanctctctngttctcagagttttaatggggcacaccgtgtgctgggcattgacatagatgggaaaagcatgacctaaaataagggctggaagccaagactgggaggaagggcaaagggagcaggcagcctggcaccaggtaccagtgaggtgtctgctctttgtccccatcacctgtcagctaaggaattctgcatgtcatcagtgcaataaaatgtgatcgccagagtgaaaaccttgtaatagaccagctgtggcttctctcaacaccagtatgtccaaggaggatgcatttttattgcttttgtggtcttaacaaaaaagattcatgagcattgtataaaaggcatattaaaacaattcggtaaaagaatgaaag

SEQ ID NO: 12903 - DNA, 531 bp, Homo Sapiens
  misc_feature (291)..(291): n is a, c, g, or t
gtatgaaattgtacttgtgcttcatgaaacagactataagaacaacaattcaccataatccccctttgccatgaggaaggtaattctggtcagtttgccaggtattgataaagtaaagtaagagaagacagggcagcaaatcagcagaccaaaaacttatggtagaaatgccaggctgaatcaccacacccacagcgcacaggaacaccagcccatatgaatctacagttctacttagaccagcagggacagcaccaagtcacgtgttacaactgaaagcatcacttgacngacatcctgaaaggtcataatcagttgggaatgaaagtcatttttcctttaaaatacaaaaatggcagtgtgtacaacccctccttcactaaggctaaattgaggaaacctgaatatcaaaaacgacagatttaagccattgatcgggtgccacagagacaggaatgatagctattcttccacattactagacattattctccctacacaaaaatggatttagagcttgacagaatttgt

SEQ ID NO: 12904 - DNA, 514 bp, Homo Sapiens
ctcagtacgtctgactccaaaaaatgggctgctaatccctttgctatacaatctgagtttctaatagtcagcttcttggtagaagactgaaatttgaattcatgaaagcagaccctagctgtatggtattcccagttttgagtctccagtctgtcgtttcataggaaaagcagggcttcttttggagattgggacaccttgctccagagaacctaccagttttccactatctggaaagaaaactaatttaatgttagactctaaatgcagaactttaagatatttcaagtatggctataacatctctctcttctctgaatacaccaatctttgtttcagggtgaagcttacaatgcagttgactcttaactacatcttactgattcgcacttgcttttccaacagattcctttttaacttctttctttgctttttgaatttcctgattttaattaaatagaggaactatcacactcttcctcctcaaagacgtctagtacaagatcatgagtta

SEQ ID NO: 12905 - DNA, 675 bp, Homo Sapiens
  misc_feature (23)..(23): n is a, c, g, or t
agtgtacatgtcccacatcctcncagtgggatttcattccctagcgtggtggatcacgctatgccagaagaaagagctcgtaaatatgaaaattactttacagcgtcagaaagactgtctttgaaaagagagttgagttggtatagaggccgaagaccaagaactgctcttactcaaaaccagagtgaagtgttagaaaatgtctttagagtaaactgctatcctggtatccatattagagaagacttagctcaaaaattgaatctacaggaagacagaatacagatttggtttcaaaatcggcgtgcaaaactgaaaaggtcccatagagaatcacagtttctaatggcgaaaaaaaatttcaacacaaatctgctggaatagatagaaaactaaacaagtgaaattatcttctaattgcagagcatgaagaatcagtggaaatattaagtgttaaaatgtgatgttttctttcctgcatttaatctgaatattgtcattttttctgaaaatatattgtaaatactattatagcatggtacatatttgggcacttttagttataagtaaagcacctttgtatatatattttacataaacattttcgagaaaagattgctattttttaagctaagccaaattatatctacataaattagatattgttaaaattca

SEQ ID NO: 12906 - DNA, 462 bp, Homo Sapiens
atacctactgcaggatccctcgggcacactgaagcttggctgccaaccctcttacttcctttgttacagggaggggttggcttggggtgaaaagttctgccctccgcagggcacagctccagctgcctggcagtgctcccagtttgtagggaagccacaccagatctgggtgccttgggagaaccagtccttccttttgacccaccccaggaagatggagtgctcttttctaggcccatgttctgccagcaaccgggatgcgtgggcaactggactctgcacgggggtctacaggttgagggaggttggtcacaatgagaacctcggggtttgaggtggccatgggcagacagccgaaagggagggagggtgtgggtgtgcgtgtgtgcatgtgctggtgtgtaagggggaaagggtctttcctggttttatttaaataaagtagtttatgtaacagttaac

SEQ ID NO: 12907 - DNA, 135 bp, Homo Sapiens
aatgattttctttttgttattaatatttttctctgttcctttgttattacttgcatggtttggcgtcagaagtccttacctctttatattgtttgcaggtttaaataaaacagtgtggtgccattttgaaatata

SEQ ID NO: 12908 - DNA, 443 bp, Homo Sapiens
  misc_feature (11)..(11): n is a, c, g, or t
agtgtcagtcnaactacactctgaaaaaaatgtctgccaagtaggcgagtctgaaaaaccagtttgtgaagatgagagaatcctgcttgggtgcaggaaatagagatgcagggaagaggacagaatccagagagaatttaagaaacatataagctgattaggagatgagggagagttttacattattcttatggtttacctagagattgtacagcggctgttttcacaaaatcttcggtagtaggaaagggccagggttactgttcctctttcataataaaatgagaaaagtccagcatgagagtttcaaactcttatctctgtttgcatattacaaattaggaaaatgttcttgaggtggtattaaaaaaatgaataaagggacatatattggcttgaaatgctgacacaggctgccattttctcatcaatatactctcaca

SEQ ID NO: 12909 - DNA, 435 bp, Homo Sapiens
tcgaattctatcatctgggcaaaagatgtgatgagtgtaacttcctgttttctccaaactaaaacactacgcagattcctgtaccgctctgggacagaaatcctcagccagagcagaggccgtccccagagtccacactgtttcctgcataaagtgggttatctcagaaaaaacatcccactggtctgtgtgatccctctattgaaatgtggtcttttatctacatctaagtatctctagaagtaatgcgtttgtatgtacttgtcactcagatatgtaatcccttaatttgtgcggggttttggggtgtgaaaaattcttggtttatatcctacacttttaaataacctcgtcaaaacttacatgtatttaacacctttttttgtgagcacatggtaaggttggaagtaaaaatggaaggtttatccctgtgaa

SEQ ID NO: 12910 - DNA, 887 bp, Homo Sapiens
tttggcgagcagtcagtactttaattcaggtcaggctccgacacctggggagacggggtcctgcccgccccaccctgaggtggaacccccagctgctcctgggcacagaatcatttacaaaaataaatatgaaaaaagcagcaactctttagtgatcatggaattaatctgacagcaattaaatgtgtttaagcatctggcatatctcctcaattgcaccaaaagaatttggaagcacttggtttggtctcaaaggcaaaaggaaaggacgaggaaggggccaggcctcccgccaggcccccgcccccctcacatttctgagtccgcatacatcccgttgattaagtagtccacctgggtgtagtccttcttcttgtagctctcataggcctgcagggcaaacaaaaccaagactgtgatgaaaagggtcaccccgagtaacagcaccaccagaaggagagttttgtctaccacggcctgggtgaggggctcagtggtgaccaccatgtactggccttgggtgctgggctggcacgagtccgtggctggcatcttagtgccccctgagctcactgggtgttggcaccagtggaatcagtacctggtgtggcttcagtctctacctgctccaggtgcctgggatgtgcctggcccagcaggccctctgggtatatggcatggggcttggctgtgtcagtgggggacatggcactccatctcagggattgggcatggtgtgaggtacatggcacatgggcatggcagttggctcccatggcttgtgccttggtggtggtcaccactgtgggggtgggggcgggctctggggttgtgtttgagggcatgggtgtggatttatttgttgtgtaaccacaggctggtccaca

SEQ ID NO: 12911 - DNA, 525 bp, Homo Sapiens
  misc_feature (60)..(138): n is a, c, g, or t
  misc_feature (214)..(214): n is a, c, g, or t
  misc_feature (221)..(334): n is a, c, g, or t
tttgaagaggagtctggcttggtgctgggctagagtgcaatggtttgatcttggcgaggnnnnnnnnnnnnnnnnnnnnnnnnnnnnnnnnnnnnnnnnnnnnnnnnnnnnnnnnnnnnnnnnnnnnnnnnnnnnnnntgcccagctaattacttctgtcttgtattttaatcttctctgctctttagatgtttgaagtgaggccaggcagtgnttgtcannnnnnnnnnnnnnnnnnnnnnnnnnnnnnnnnnnnnnnnnnnnnnnnnnnnnnnnnnnnnnnnnnnnnnnnnnnnnnnnnnnnnnnnnnnnnnnnnnnnnnnnnnnnnnnnnngattcttgaagtgaatgtatactcatttcctggttgtttctttctgtaaggatgtctgacccagctaatttgtaaacaggaattctgcactcatttctgtttttgcattctcaaccccagttgggcacacaagtgtttaatgagtatttaactgatttgataagaataaattcattgatttctttgaaaaa

SEQ ID NO: 12912 - DNA, 356 bp, Homo Sapiens
tgtttatcgagcatgcaaaagaaacctcacggctaacggctctgggagttgtgtctgtgtgacctgagagtgatccatctcctgcctgtgtgaggtagcagtgggcacttttcattgagacaaactccagggtgtccagagggggttctgccccttgtgaaggcccattcctggcacttagagacagaaagaactcagcaatctttcgttctagttatattcggtctttgaaactgacaatctttgaaatgtgaatactgtaacaatatgttttcttggattgttgtctttaaaaaggatttttgtgaagcaattgatttatcaaagcaaaaaaattaaaaatagaaacttgcttt

SEQ ID NO: 12913 - DNA, 479 bp, Homo Sapiens
gtccggcttctcatctgtttcccagagttttcccattcactaggtcatttaattcttaaacaaatctaggtaaggtggatagtgacaaatcaactgtggtgagtacttgtatcacgacatactaagtttagtttcctgatattcaaagtagaaatattccacctacctctcaagactgctgcacgaattggttgactcagttcttaagccatggaacttgctctactgtgagagcactgtggaaagagcaactgaccctgagtagtaggattggaggagggaaggaggtcagcaacagggaactcatagtggaaagcaagacttgtaagggcagagtgagaatgtgggaggacattccaggaagaagaaactggatagtcgagagcccagagttgagacacactgggaaagtagggaattacagattccttagtcgacctccagaattagaaatcaagtctatgtaagaatacttgaaa

SEQ ID NO: 12914 - DNA, 327 bp, Homo Sapiens
gaaccggcggcgttgcgtctaaaaaggcgaaagccttgaggttaaaggtgggacgagcctaatgaagtggttagtcaacgaccgcaccgacccttaagcgttcttaagacgagagctgtgaggggaaactacgcaaggagcccttttcccttaatgtcccttcgactttcctttcacttcgaaatgaatgtggaaatgctgtcacgccttatttttctaattcctcgatgttgggttttttctcttctttatatctcaacttttaatgctcttcttcctatgacctttcgtctaaaaactgaccactcctttacaggtttttacggt

SEQ ID NO: 12915 - DNA, 333 bp, Homo Sapiens
aggtgactccggcggtagaggacaaggcacaatgctggcccttcgggtgtcccaggcgctgatccgctccttcagctccaccgcccggaaccgctttcagaaccgagtgcgcaagaaacagaagctcttccaggaggacaatgacatcccgttgtacctgaagggcggcatcgttcacaacatcctgtaccgagtgacaatgacgctgtgtctgggcggcactgtctacagcttgtactcccttggctgggcctccttccccaggaattaagaccaagaagcctggggggcctgagagacttgaacaagtgtcaataaacgctggcatctgaa

SEQ ID NO: 12916 - DNA, 485 bp, Homo Sapiens
tgccctgtgtcagtgtcttctgagggcaattgcgttgctcaaatcactagcacagaggttccttaatttggggccttagaaaccattgtgggccttggggtccatgaaccccatgaaattatttgtagacttgtatgtacatttttctggggagaaggttcaagagattcataagattgtcaaactccttgaaggttcagaacctctgcagggaagggggaagaaaaccctcccattaggaagcatgcttttgcagttaaatggcgatggtggaggtgatagggacttcaagagtaaaatgcaccttgtattgcataagaagcatacacaaatcaataaatcaagggagattataccagtaggactgaatcagggccttcaaagctggactgagttggtcctgttctggcacatatggtccactggagacaatgtatgattgagtttttaattggtctaaaaattatattaaacaattattttga

SEQ ID NO: 12917 - DNA, 434 bp, Homo Sapiens
gtcaggtaggaagggtgcacttgaagcaggtgctcatctcggttccttaacgtttatagtctgacccctcacttaggctttcctctgccaccccggtccagggaagaggctcgtcccgcccatggtcatcactggtctgtctgctctgttgtctgttctttccctgactcccacccaccgaaggcctgatggctactcacccctctgggatggctatgggagaggaggagtgatggggaccgccaccttttctgcaggaaatgtgcccagcagctcttggtcaaagcactgttgctataagctatctctgggatgcctctaggcccccttccctctacacacctctgggaaaagattacactgtattaactctcgaggagtttcctcaccaataaacagacaacctcaactgccagtgccctgcaacctcgggc

SEQ ID NO: 12918 - DNA, 457 bp, Homo Sapiens
ttttttaaatacagatcaaatgtatatatttttaaaactccacttaaactatagggtcacaaaatgacttaagaagcaacattaaatggcaaagccaatcattcaccatgagtgttgatgaccatctgaaatgagcattagtgtcctaacacttaacgaacatgtcacttgtccctgttccagcccgggccacgccctacatgtctttctgctctcacagtgctagtgcagagtcctgcacacaatcaaaagaatgaatgttgtcatcatccttaaacacaagcagacacaggacaggtcttgctacattcaggcagaggcccttactgcttgtctgaagtgtgtgtcacagtatggaaatcaatttcttgactcctacatcaagttactacttgattagtatcttctataatggtaacagatgaaaactccaaatgtaaacaaaagggagacacca

SEQ ID NO: 12919 - DNA, 480 bp, Homo Sapiens
  misc_feature (336)..(358): n is a, c, g, or t
aacaggacaagtaacagattacatcaaacttcagaacttctcaaatacctagttattatacacattcccatctgtcttgcagggagggatcttggtcggcttaacagtttcaggtaaaataagctgcataatagtatatattacaataataaatgtacaatgtttacatgaaatatgttttagaagcaagaaaaagatgcatctgcatcaaaggcgaccttttaaaatgccacaactattttttacattcactcttgcaacaggttacaagatgggggtcactaagctcagataaatcactatgatgcacataaaatacaggaagactggttactnnnnnnnnnnnnnnnnnnnnnnntttcacacgttagcatctgagacataaactgagaatttaaaatttattctcttcagataacaaatcattttttattcttcataaacaaggtgcccacaaaagcacacaggtaaggcacaata

SEQ ID NO: 12920 - DNA, 589 bp, Homo Sapiens
cctagaggatccttcaccaggacagatcgagaatccttttcgtgacgagatttgatcatttacagggcgaaaggttggttactgcaaaaggtagcagcagcatgtttcaagttctcctctcctggtccgctgaaccatgtcagcaaatcttccccaatctgatcgataaccagaggtctcatttctctttcgaacagccttcatttgttcattcaatccaatatgaagttgaagaatatcttccaagtttgaaaaaattttccgtagctctgagggtgacagaattccttctctggatactcgctgatagaacacttgatcaagaaccttcagtgttcgaacatgagctccttcagtgtagaacaattcattaatcacttcctgtcttttgatttcacaaggttttagtccccagtaacacttctcgactaacaagctgctgccagttgggtggatctgtctctaagtcattttcaaattgttcatcctcactttgactttctccaaaagctacactgtcaaactttcgaaaggggctttggtgtcccatgttcagtcaccctttctacttcacatatctcctcctgga

SEQ ID NO: 12921 - DNA, 535 bp, Homo Sapiens
  misc_feature (39)..(39): n is a, c, g, or t
aggagtcgccgccacgaccgccgggtctcagtgggtgcntgcgccttctccccgcccgcctgccccgggccatccagaaacttgctctacccgccgcgggtgctcggcagtgctgcccatggcccagcccaggagcctatttagggcgccggacgggctggacagaggcgcggctcagtaattgaaggcctgaaacgcccatgtgccactgactaggaggcttccctgctgcggcacttcatgacccagcggcgcgcggcccagtgaagccaccgtggtgtccagcatggccgcgctgctcctgggcgcggtgctgctggtggcccagccccagctagtgccttcccgccccgccgagctaggccagcaggagcttctgcggaaagcggggaccctccaggatgacgtccgcgatggcgtggccccaaacggctctgcccagcagttgccgcagaccatcatcatcggcgtgcgcaagggcggcacgcgcgcactgctggagatgctcagcctgcaccccgacgtggcggccgca

SEQ ID NO: 12922 - DNA, 535 bp, Homo Sapiens
agagacaagtgggtaaaaaggtcagtccattgcaggaatatatatccgggagagctaggtcccttggggctctggatgctgggtaacccagaggtaatgtgggtaccctttctgaagctgtcagggctgtgactagcacccttatcacccctcactgccttgtgggaatagtagagggtttttttcctccagagcccctggcctttcagttcttaactatttccctccaggccagaaagttttctttgaggaaggagaggagagggtggcaatgatgcctttgatctggaattggacatttctctgtcagagcacagaggaggctcatatcacctcttccctctcctacttggcccagctgcttggaggaccgaccccatggctgagaatatgacggcaagaggaacagagtttgctccaagtgggaaagggtcccaagcagtccagagaagatgtctgtgtggctttccctccctgcctcccccagctcccacactggcctttgtaaataaatggcgtggtctttgttgtgaaa

SEQ ID NO: 12923 - DNA, 282 bp, Homo Sapiens
gcgtcgctgaggggtagcgatgcgggctccggggatgaggtcgcggccggcgggtcccgcgctgttgctgctgctgctcttcctcggagcggccgagtcggtgcgtcgggcccagcctccgcgccgctacaccccagactggccgagcctggattctcggcgcgctgccggcctggttcgacgaagccaagttcggggtgttcatccactggggcgtgttctcggtgcccgcctggggcagcgagtggttctggtggcactggcagggcgaggggcggccgc

SEQ ID NO: 12924 - DNA, 1014 bp, Homo Sapiens
tttccagggggtgctgcagaatgtgaggtttgtctttggaaccacaccagaagacatcctcaggaacaaaggctgctccagctctaccagtgtcctcctcacccttgacaacaacgtggtgaatggttccagccctgccatccgcactaactacattggccacaagacaaagaacttgcaagccatctacggcatctcctgtgatgagctgtccagcatggtcctggaactcaggggcctgcgcaccattgtgaccacgctgcaggacagcatccgcaaagtgactgaagagaacaaagagttggccaatgagctgaggcggcctcccctatgctatcacaacggagttcagtacagaaataacgaggaatggactgttgatagctgcactgagtgtcactgtcagaactcagttaccatctgcaaaaaggtgtcctgccccatcatgccctgctccaatgccacagttcctgatggagaatgctgtcctcgctgttggcccagcgactctgcggacgatggctggtctccatggtccgagtggacctcctgttctacgagctgtggcaatggaattcagcagcgcggccgctcctgcgatagcctcaacaaccgatgtgagggctcctcggtccagacacggacctgccacattcaggagtgtgacaagagatttaaacaggatggtggctggagccactggtccccgtggtcatcttgttctgtgacatgtggtgatggtgtgatcacaaggatccggctctgcaactctcccagcccccagatgaacgggaaaccctgtgaaggcgaagcgcgggagaccaaagcctgcaagaaagacgcctgccccatcaatggaggctggggtccttggtcaccatgggacatctgttctgtcacctgtggaggaggggtacagaaacgtagtctgtctctgcaacaaccccacaccccagtttggaaggcaagaatgcagttggttatgctcaaaatctttggtaatcctttgaacag

SEQ ID NO: 12925 - DNA, 454 bp, Homo Sapiens
  misc_feature (59)..(59): n is a, c, g, or t
agtggttgatgagttcatatgaagaaattcaggccccactcccccaccctgcccctccntgctcccttttgatggtggcctctgggtactcgggcagagtccttgggacaccagcctctctggggttctcaggccatcccgttggggctgtcgcccaggcctaagtgagtcgtgtgcctctattggaggatggctgttcccctggtggttgcatccaagtatctgtctttctttatggaccacgaaaggaagcccaccttcctggaggcaggaccttcggcctaaaaaacacaggccctggtgctatctgacctggggtccaacgaggtgggaatcccagtgtgtgagcgacaggccttcttctattgacttacaatattctaaaaggacctacgtgtggggacacagttttccaaactgaggaaaatgttgcaataaaagaatatgttgtaag

SEQ ID NO: 12926 - DNA, 1204 bp, Homo Sapiens
  misc_feature (619)..(672): n is a, c, g, or t
  misc_feature (1183)..(1183): n is a, c, g, or t
tcccgggatggccgcagtaccagcgcttcatgcgagaaactacccgcccggcttcagctacgccgacttcggaccgcagttcactgcgcgcttcttccacccggaggagtgggccgacctcttccaggccgcgggcgccaagtatgtagttttgacgacaaagcatcacgaaggcttcacaaactggccgagtcctgtgtcttggaactggaactccaaagacgtggggcctcatcgggatttggttggtgaattgggaacagctctccggaagaggaacatccgctatggactataccactcactcttagagtggttccatccactctatctacttgataagaaaaatggcttcaaaacacagcattttgtcagtgcaaaaacaatgccagagctgtacgaccttgttaacagctataaacctgatctgatctggtctgatggggagtgggaatgtcctgatacttactggaactccacaaattttctttcatggctctacaatgacagccctgctaaggatgaagtgctatcaaatgcccgatgccgcccccaactgttcctgtcaccatggccccatactataacctgcgaccacgctttccgcccacgcaacatnnnnnnnnnnnnnnnnnnnnnnnnnnnnnnnnnnnnnnnnnnnnnnnnnnnnnncttcctttccgttcaggcttttcccgcctcccccttctcccattccctacttttcgcctgactctcctcccgtacaatcattttgccgacggcccgcctccttttcaacccttccaccctcctcatcttcggacccgcgtattactcgacccgtcctaaaataacggttcacttccccgcgcccctaccgcccacaccttatcgctggcaatggcgccatggtacccgcccaattcctgtggccattcgtaaccctttaatcgttccgtcctcgggccacccctctcgctcctccgcccaaaggtcaccgggcgcatttttattccgccttccgttccctcacggcgcgcccgcaccactattactcgagtatgttcgcgcttcgtcgccctccataccctccctcgcgctcacttcaccttttttgcccccgaccgcacgcgccacgacatgcgacggcactcactgaccgtttatataggagcgctctatgcaatatatcaccggcctnatagccccgctattacacgcg

SEQ ID NO: 12927 - DNA, 574 bp, Homo Sapiens
gcggggcctcctcgagatggggatgtggtaccaggggcaggccccctgagaccagcacggacacaggaaatccaggagaacctgatcagcttgaaggagaccatgaagcagctggaggagatggaggaggaattttgccgcatgagacccctcctgtctcagcttgaggggaactctgtcccccagcctggctgcacttgaggttcccgcccaggaaggccttttgcaagaaggagaggaatgggggagaggacgtgagggaccacccccacccacacagctgccgcagcatctcacaccccgagggcctgaggaagaggaagctgtgggccacgcctgggaggggcccagctggggttactggccccgcatgagcctcggccatctctccctcctgccctctgcttgggggactcagggctccattctggagggcaccacggtgacccgggccatctcagtattgcctgtgggggccacccctccacccccacccccaagtgccttcgctctgtttttataccctgaattggaggtttattttttaatatatattatctaagaagaaaaggaa

SEQ ID NO: 12928 - DNA, 331 bp, Homo Sapiens
ctcttacaaatatgtttttggaagcatgataaatgtttaaatgtagtcaacatctgtaactcttacatgagtgtccagaggcactcatgggaaaattggttttgctttctttgtacacaccagagacccatctgaggtcatctgattataaggccatgtttatataaagggaatttcacccacagttcagctggctgttgattttcactgcaactctgcctttgtgtgtattggcgatcatttgtaatgctcttacacttcgtctttaatgttctttttggagttaggacctctcagttcataaagttttttacaattcaaaataaaaaaa

SEQ ID NO: 12929 - DNA, 486 bp, Homo Sapiens
tactcagttccaggtaattaattggtcagttaagcacccaaccaacaaaagaacctctaaatcctcattgcatcgtccccttgatctggatacaccaaccagtgaagaaagttcatcgtcatttgaacagctttctgttccaacttttaaggtataaaccaaatcattagtttccattgatatcttgatttagaaaaacagatttttaagaagttattttcataattactctcattctttttagctacctttctgagagagagactttctgaagccatagctttatgtatgataggtcacagagttattgatgaatattagaaatttaagtaaattaaattgagaaatggtttatgagttgccactgcattaatctaatcaacacatattctgtgtctgcattatactctaagattaggatcaactctctctgaattcatatcttccgtgtcttaaaaataaaattttgaagttgttttaaaaaaa

SEQ ID NO: 12930 - DNA, 453 bp, Homo Sapiens
  misc_feature (369)..(369): n is a, c, g, or t
cctatttcttaaatgatggatcatacgaaagaagacagcactcccatgagccactgcacccagcctatttcttaaatgatggatcatacgaaagaagacagcactccacctcagccctcctatctcccatattagtgtcacagctttaatgccacttttttcagtgttgagggtattctctaacctctcgccccctattatgagtcccatatctctttgcaatatttatttgcaataatttagacgtatttagaaatggtaattatttaatgtctggttttttttccccactccaacagcaaaatgtaagctctatgtgggcaagaactgaaatatcttcattgctaaactgagttgtgacagatgctnactaggatctggtgatacctgtctaccctcagaaacactgtggttttcggctcctcacttccccaatactggcctatacctaaa

SEQ ID NO: 12931 - DNA, 904 bp, Homo Sapiens
gagatgtgtagccagagcgcagagcagtgcatccactctgggagagcggtggacctggttcctgggggcgatcgacagtcacccatcaacattcggtggagggacagtgtttatgatcccggcttaaaaccactgaccatctcttatgacccagccacctgcctccacgtctggaataatgggtactctttcctcgtggaatttgaagattctacagataaatcagctgcacttagtgcattggaacgcagtcaaatttgaaaactttgaggatgcagcactggaagaaaatggtttggctgtgataggagtatttttaaagatttcggaaacttctggcagcccagtgtctactggaaggcccaagccgcttgccagaaagctgcgccccgcccaaaagcactgggttctgcagtccaggcccttcctcagctcccaggtccaggagaactgcaaggtcacctacttccacaggaagcactgggtccgcatccggcccctccgcaccactcctcccagctgggactacacccgcatctgcatccagagagagatggtccccgcccgcatccgcgtcctgagagagatggtccccgaggcctggaggtgctttcccaacaggctgccgctgctgagcaacatcaggcctgatttctccaaggctcccctggcctacgtgaagcggtggctttggaccgcccgccacccccacagcctgtccgcagcctggtgaccgtgaaaatcgccccgccagagagcagaggaagcccgacgcccaggccatctgccttcaggtctgtgatgacgaaacggaggtggcctgttcccgtggtgcccaggtctaggccgctgagcagagccctcactcccaggcagagttgtctgaatccttcctggcggccgc

SEQ ID NO: 12932 - DNA, 451 bp, Homo Sapiens
gaaagggaggagaaatctgatgtctcaactggcacatgaagcccattcttggaactatgcaaagggcagaggctgggagtttggacgcttagctcctacccctgtcctacctcaccggggcactttcaggggccaggggcctctgaagtctctaggcctatatgggacaatcaattctgactgagctcccccattcccctcgggtgaggatgactgttatttttgtagctgagaacgtggaatcccacgggtttttaatgcccttcacccaacctctcccacctccaccccacaatgaatgtatttattgtgagaatggctacacttctttaggaatgcccccacttacaaccaggtgggtggaacaggcatgtgacagagtggggagcctgggctcagctcctccccctgccgttggttaataaacaccctttttccccacagctaaaaa

SEQ ID NO: 12933 - DNA, 399 bp, Homo Sapiens
  misc_feature (55)..(56): n is a, c, g, or t
  misc_feature (75)..(75): n is a, c, g, or t
  misc_feature (121)..(189): n is a, c, g, or t
atagtggttgcgtaacatcgtaaataatgccactgaggtgcacattgtagtaagnnaaaatttgttacatgtttnacaattaaaaatcctaagaacactaaaagaaagtcatattaggtcnnnnnnnnnnnnnnnnnnnnnnnnnnnnnnnnnnnnnnnnnnnnnnnnnnnnnnnnnnnnnnnnnnnnntagttatatcctgaagaggcagaaactgataggtttgtctgtgtagtttttcagcttgtattatcactaccaccaacagcctccgttgaacccctcattaccatgcaagcagccacattcaattctcagaacaatgcaatgagggagagcctatgaaaaaacaaagcctatgaaacagagcctatgaaaaaacattaaccaaggtcatca

SEQ ID NO: 12934 - DNA, 543 bp, Homo Sapiens
attccaaaatctctttcagagaaacgagagaacgtcatgtttgtgctgcctctgcatgggggccacttggtcttctttgagggctctgtgctgttccccgagcccctgacatggatggataagctggtggtggagtacgccaacgccatttgccaatgggagcgtaacaagttgcagtgctctgacacggagcaggtgaagcccgacctggagtaaggcctccggactctggcacgctccagcagccctcctctggaagctgagtcccctcaccccctgtttcaggtctcccatctccctcagtgacatggatctgacctcacaccatcagcagggggcacccaccatgcacacctgtctcggagtagacagctcttcctgggagctccaggctatttttgtgcttagttactggttttctccattgcattgttaggcatggtgacaagtgacagagttcttgccctctgtccagtttcagcatctggttgcttttaagccaagtacatctagtttccctattaaaaatgtgtatgaatagcg

SEQ ID NO: 12935 - DNA, 392 bp, Homo Sapiens
gcgaaagaagccgctttggccccgctgcgcacccctgggctggcccgggctgtggccgtgagaggcctccctccgctcgggcgctgcgcgcgagtgagcagcggggggccgcgcctggggcgccgctggggagacattgggctccgctgaatacagcaagggcgagtgggaattgatagcccggagcagggtgcggtccctgcatggacagtctctgagaggaaaccccagggatgaggcgcttctggtttcaggcaggcagggtgatcgggcgtcgccggcgatggcgcaggtgagcagccggctccgatctccacggtgatccgatagcaagcgggtgggaagggtctggctaaactgacttagccaggcttcttgctaaaagtggattt

SEQ ID NO: 12936 - DNA, 209 bp, Homo Sapiens
gcggccgcggggccgcgcggcggggccacggcgtgggcagcggacccggcagagagcaggcgggcagcgtggtccgggtttatcatcctcaacgccccagcgccctgcgggaggctcggggtgccaggagctgcgctcacccctccggttcccccacgcacccctgagacggcgactgttctaactctcccttcctcgacaggaaaccc

SEQ ID NO: 12937 - DNA, 235 bp, Homo Sapiens
gttaaccttacagcaagtaacacatgagttttaaattagaatttggacaacggcaaatgagatgaaaggcgaacaatccgaaagccggatcactgaggagctctgggaacgcgccgcgagctgaagccacacggggaactccattttgtcgggacagggtcggtcctggccgcctccagggagtcgggtaatttccgcggcgtggcccgggcctcccctgaagtcagtccgcctc

SEQ ID NO: 12938 - DNA, 286 bp, Homo Sapiens
ttccggtccgtccccaagtcggccccgatcggcagcggccacccggcggttcctacgcacagcgcccgctggcgtcctcgcggcccccgcttctgcattggctcaggccccgccgggcccgaaaggcgacggtttccggttagtggaatcacggtcccagtcctcgcgcggttcctcagctccgcctggtcccttacggaggcaaaaaactacatttcccacaatcccaggggggtgcgggccctggatatacccgcaggtccagaatcgtttccggaccacccag

SEQ ID NO: 12939 - DNA, 440 bp, Homo Sapiens
  misc_feature (141)..(296): n is a, c, g, or t
tagagaaatttatttgggggtaaaatactggatttctctcagggcctgttatctgtcatgttatcttgttgctgcaaggagcctgtttttgtcggtcttagggtctctgttttaatgttaaagggtgcccaacttggctgnnnnnnnnnnnnnnnnnnnnnnnnnnnnnnnnnnnnnnnnnnnnnnnnnnnnnnnnnnnnnnnnnnnnnnnnnnnnnnnnnnnnnnnnnnnnnnnnnnnnnnnnnnnnnnnnnnnnnnnnnnnnnnnnnnnnnnnnnnnnnnnnnnnnnnnnnnnntagactatcagctgcttcatgtcacatctcatgcttctcttatgttgcccagttttctcagggcttccgacggcatgtttttgtactatatgaaaagccttctttctagaagactaccaattaaatatttctttagaaaaatgt

SEQ ID NO: 12940 - DNA, 313 bp, Homo Sapiens
  misc_feature (160)..(173): n is a, c, g, or t
agatactaacagctcttaggaaacttggagagaagctgactgcagatgatgaggccttcttgtcagcaaatgcaggtgctatactcagccagtttgagaaagtctctacagaccttggctctggagacaaaattcttgctctggcaagttttgaggttgnnnnnnnnnnnnnntgacatggtgcagaagcttgtaacattgatcacattcttaatgtaaatggtgtctttcttctggggttttcagttattgcaaagaaatgaaaagattctggaaatgcatcaataacctaagaaaaaacgacataaaaata

SEQ ID NO: 12941 - DNA, 762 bp, Homo Sapiens
agacgcgtctctggatggaagccgggagtatgtgaatgtgtcccaggaactgcatcctggagcggctaagactgagcctgccgccctgagttcccaggaggcagaggaagtggaggaagagggggctccagattacgagaatctgcaggagctgaactgagggcctgtggaggccgagtctgtcctggaaccaggcttgcctgggacggctgagctgggcagctggaagtggctctggggtcctcacatggcgtcctgcccttgctccagcctgacaacagcctgagaaatccccccgtaacttattatcactttggggttcggcctgtgtcccccgaaacgctctgcaccttctgacgcagcctgagaatgacctgccctgtccccagccctactctgtgtaatagaataaaggcctgcgtgtgtctgtgttgagcgtgcgtctgtgtgtgcctgtgtgcgagtctgagtcagagatttggagatgtctctgtgtgtttgtgtgtatctgtgggtctccatcctccatgggggctcagccaggtgctgtgacaccccccttctgaatgaagccttctgacctgggctggcactgctgggggtgaggacacattgccccatgagacagtcccagaacacggcagctgctggctgtgacaatggtttcaccatccttagaccaagggatgggacctgatgacctgggaggactctcttagttcttaccttttgtggttctcaataaaacaaaacttaaaaaaa

SEQ ID NO: 12942 - DNA, 1256 bp, Homo Sapiens
gctggtacggtctggaattagggatgttagagctgggggactcttcagagtcaaaggccagagagcatggagctgagtggagccaccatggcccgggggctcgctgtcctgctagtcttgttcctgcatatcaagaacctgcctgcccaggctgcggacacatgtccagaggtgaaggtggtgggcctggagggctctgacaagctcaccattctccgaggctgcccggggctgcccggggccccagggccaaagggagaggcaggtgtcattggagagagaggagaacgcggtctccctggagcccctggaaaggcaggaccagtggggcccaaaggagaccgaggagagaaggggatgcgtggagagaaaggagacgctgggcagtctcagtcgtgtgcaacaggcccacgcaactgcaaggacctgctagaccgggggtatttcctgagcggctggcacaccatctacctgcccgactgccggcccctgactgtgctctgtgacatggacacggacggagggggctggaccgttttccagcggaggatggatggctctgtggacttctatcgggactgggccgcatacaagcagggcttcggcagtcagctgggggagttctggctggggaatgacaacatccacgccctgactgcccaggcaagcagcgagctccgtgtagacctggtggactttgagggcaaccaccagtttgctaagtacaaatcattcaaggtggctgacgaggcagagaagtacaagctggtactgggagcctttgtcgggggcagtgcgggtaattctctaacgggccacaacaacaacttcttctccaccaaagaccaagaccatgatgtgagttcttcgaattgtgctgagaagttccaaggagcctggtggtacgccgactgtcatgcttcaaacctcaatggtctctacctcatgggaccccatgagagctatgccaatggtatcaactggagtgcggcgaaggggtacaaatatagctacaaggtgtcagagatgaaggtgcggcccgcctagacgggccaggacccctccacatgcacctgctagtggggaggccacacccacaagcgctgcgtcgtggaagtcaccccatttccccagccagacacactcccatgacgcccacagctgcccctttgcccccagctcagtcaagccgccacatgcccacaacctcaccagagggagaattatgtttctaaatatgtttactttgggacaga

SEQ ID NO: 12943 - DNA, 1093 bp, Homo Sapiens
  misc_feature (52)..(52): n is a, c, g, or t
  misc_feature (73)..(73): n is a, c, g, or t
  misc_feature (181)..(181): n is a, c, g, or t
  misc_feature (311)..(311): n is a, c, g, or t
  misc_feature (1048)..(1048): n is a, c, g, or t
agccctgggggctatttattggtctacttccaattagctttgaatttgatangacgcctgaagccttcaggancagatcattttggaaatgaaatatatactgtgaaattcagaagaaaggagattatcttttatttggctgcaaatatgacttcaccttgaaaggtgttgtggatgttcntgaattcttggtctattttccattgctaaatgaaatggcaaagaagtacaatatgaaactagtctacaaaaaacatttctggaattctacgaagaaaagattaagaacaatgaaaataaaatgctcttanaacgaatgcaggccttggagccatatcctgcaaatgagagttctaaacttgtctctgagaaggtggatgactatgaacatgcagcaaagtacatgaagaacagtcaagtaaggttacctttgggaaccttaagtaaatcagaatgggaagctacaagtatttacttggtgtttgcctttgagaaacagcagtgagcacataggcagtagtcccagaggggccgtgttctgtcctgcacaaatttgaacaactcatctcgatatatttgatatttctctgtctgttgattttaattctaaatgtgcaggatgctgccagaaactccaatgtagaaattcaacatttgctgtctgtgacagatgaacttttgcatgtgtatataagaatgagttgggacctctgtctttaaaaatctatttttaggtaatgttctaagaattccatttgcctctatgatcttagctcataaaaacataatatgacttgataaagcaactaaactctttccacaagggtcaaatttgtcctgtgtgtgtttacaatattcaatttattgcagttatagaattggtcagagagcattttcatagtgtgctcatttctatggttttgttatatagcatttttcaacatttaatggtctgtacagttgaatgtaagtgttcaatatgtattgctgaagttataagtttaaaactcaatttcagatgctcataaaagttacttagctaaaattntagcaatttattgcattttgaataatcattaacatgctgcaattc

SEQ ID NO: 12944 - DNA, 649 bp, Homo Sapiens
  misc_feature (112)..(188): n is a, c, g, or t
  misc_feature (273)..(273): n is a, c, g, or t
  misc_feature (609)..(609): n is a, c, g, or t
tccaggactgaccagggccaagtggctctctgtgggcactacatggcggagggtgaagggtacttcgccatgtctgaggacgagctggcctgcagcccctacatccccctannnnnnnnnnnnnnnnnnnnnnnnnnnnnnnnnnnnnnnnnnnnnnnnnnnnnnnnnnnnnnnnnnnnnnnnnnnnntggcggcagcttcggtgggcattgcttggactattgcgaaagccctacggcgtcactgcaatgtgctggaactgggagcaagtgncagcggctggacggcatcctgagtcgagaccattccgattcacgggcgcggcaacttccccacgctcgagctgcagccgagcctgtatcgtgaaggtggtgcggcggcgcctggccgagaagcgcatcggcgtccgcgacgtgcgcctcaacggctcggcagccagccatgtcctgcaccaggacagcggcctgggctacaaggacctggacctcatcttctgcgccgacctgcgcggggaaggggagtttcagactgtgaaggacgtcgtgctggactgcctgttggacttcttacccgagggggtgaacaaagagaagatcacaccactcacgntcaaggaagcttatgtgcagaaaatggttaaagtgtgcaa

SEQ ID NO: 12945 - DNA, 436 bp, Homo Sapiens
tgcctgccttcatctggtccaggacagtgaccatctgggtctgtgtagctggggagaggatgaggctgcagagatggggaccagaagccccccaccccagctttcctgggtctgcatcccagtgggcctcagacactgccctgccacctgtcagacttgggtgagcagacacagtgaggctgttaggtcctgcagttccagagcagtctagggacaccactgccctgtctttaggaaatcacaacacagagaagcaaaaagggaaaaagtctcccacaatttatcccatgagcaagaaccactttatagctggcatatatttttccagattttctctatgcataagtatatttgtttaaaaacttataaagtggattatactatttgtattgttttataacctgtggttttcacttaaaatattgtgtatggcaaa

SEQ ID NO: 12946 - DNA, 446 bp, Homo Sapiens
ccgaggcgtccgacggaactcctcctttagcactgctcgctccgctgccgccgaggccaagggccgcctggccgaacgggctgccagccagggttcagactcacccctactgcccgcccagcgcaacagcatccccgtgtcccctgtgcgccccaagcccatcgagaagtctcagttcatccacaataacctcaaagatgtgtacgtctctatcgcagactacgagggggatgaggagacagcaggcttccaggagggggtgtccatggaggttctggagaggaaccctaatggctggtggtactgccagatcctggatggtgtgaagcccttcaaaggctgggtgccttccaactaccttgagaaaaagaactagcagagggcctgggctcttccagcctcagtgtgcctctctggccgcccactggaaaagcggtgagacgaac

SEQ ID NO: 12947 - DNA, 570 bp, Homo Sapiens
ttaaatggtaatgtagcatttattttgctaaattgaaagggaacatagatggaattccaaaatatgtacattcagctgtttggtttttcgtttttcattgttattattgtgagaatgctgttattggggttgtgtgtgagtgcccgtcagccagtgatgcctcgggccacgctgtggggccacctcagtcctgcctgggtcctggtgccttggaccccacgtgcttgtggccaggctgcccctgggcggggccatgtggcctcagaccacaagagcggagctgccctggcccaagcactgcagctgcctgcacccccgggcttcgcagccttgcttgttttctctgaacagcaacagaacagtgttcacagcgattcaaagggtggcattgggttggacgttctgggtacaagccaacctagtcccacgttgtacgtgaatgtttaatgtgctctcaaaacatggaaaataagtttagtgcacatagctaaatcacaaaacatccaatttctctgtttcccaggaagtcattactgggccacaaatcacatggccttaaaatgctcgtgc

SEQ ID NO: 12948 - DNA, 136 bp, Homo Sapiens
agaactgggtttgggggctgatttttatttctttgggggctttttttcttggcaaatactaaaaatctcgtcaatgtaatttctgtggtttctattcagcttgggtttcatgttttaaaataaattttaaaaagca

SEQ ID NO: 12949 - DNA, 536 bp, Homo Sapiens
  misc_feature (487)..(487): n is a, c, g, or t
  misc_feature (518)..(518): n is a, c, g, or t
ggaggacctgtcggacgcgctgtgcgagtttgacgcggtgctggccgacttcgcgtcgcccttccacgagcgccacttccactacgaggagcacctggagcgcatgaagcggcgcagcagcgccagtgtcagcgacagcagcggcttcagcgactcggagagtgcagattcactttataggaacagcttcagcttcagtgatgaaaaactgaattctccaacagactctaccccagctcttctctctgccactgtcactcctcagaaagctaaattaggagacacaaaagagctagaagccttcattgctgatcttgacaaaactttagcaagtatgtgaaacaagaagttctgggtcctttcatcataagggagaagcttcagaaagttccgaggacctgctaaaatcagctactagaatctgctgccagaggggacaaagacgtgcactcaaccttctaccaggccactctcaggctcaccttanaatcagcccttgatcccatttctgggcaatntagacagtgaaactgact

SEQ ID NO: 12950 - DNA, 292 bp, Homo Sapiens
tgggtactcggggtcaccgtgcagacagctgccctttgtctgccggacacagtgcaggcaggggagacaggtttagggctctgacatggggcacagggactccgagccaagggatgtcagggcagctctgtgcatctgaggcctttgcccttgctttgcgggtcagttcatgtccaaagcactttaggaggatgcagggatcaatacccaatatacccaacaactggaattgtttacacatgacctacattttggacggtttatcaataaacatgtgtgaacaactgttaaa

SEQ ID NO: 12951 - DNA, 492 bp, Homo Sapiens
cggccgccgccctgctgctgacccagcctgttttaagttctggatgcatttctctggggtatttggggcttatttttaaaattttaatatgggttcttttttgtgtgatttaagacacttttgggactcaacgttacatttttgaatgtagtaagtaaattaaccaaaaaagttacaacttcctaattttagtgacagctctgcctgtttagactcttactttttaaaatcttttctattttccctcgctggggcagtgccctcctacccccagggttgaggggaccaaggtggcacggtggtactgggggtgcggcagggacacccgaccacaccagagcgtgggagacggtgggccttgtcccctgcctgtgcctgcctgggagttttgtattcatcttttgtatagttgtggacatttaagacagtctttgggtacctattttcattgtaaaactatctgaaccattaaagtcgagcttttctaaagaa

SEQ ID NO: 12952 - DNA, 379 bp, Homo Sapiens
cctgtccttttcctggagacccctgtgtcgggctgttaaagagaaatgagttacaaagaaggaatgacgtgcccctggaatcagggaccaaacaggaagagctcttgagtgggctagtgactccccctgcagcctggtggagatggtgtgaggagcgaagagccctctgctctaggatttgggttgaaaaacagagagagaagtggggagttgccacaggagctaacacgctgggaggcagttgggggccgggtgaactttgtgtagccgaggccgcaccctccctcattccaggctcattcattttcatgctccattgccagactcttgctgggagcccgtccagaatgtcctcccaataaaactccatcctatgaac

SEQ ID NO: 12953 - DNA, 513 bp, Homo Sapiens
tgcccagccgtaggctaatgtatgtgttctgagtgtgttcaaggtcagcgagaccatgacgtttgctaggttaggtgtatgagatgcagttttgacacgctatttttcaacttacgatgggtttattgggatgtaaccccattttaagtcgaggagcatctgaacagggaagaggcggaggaaaaaggtccactttgtaaggaagcatggacaagggacagatggcaatgagccaatgtgggacagaagagcaacccaggaaatacaaagcaagcgctgtcaagagtgaagccgaagcccccctcacactctctagaggggaagcagcatcgtgctgtgatgaccaggaagggattaccgagggtccgttactagaacactgagatcaaacggaagatccagatgtgtctacagatgccagtctttgggctgctactgtccttacaaactcatgtctttgaagcagtaagcaaggctgagaagcttgagagcgagagcaaaaaacaatctgca

SEQ ID NO: 12954 - DNA, 500 bp, Homo Sapiens
tgatggtgttccctgagcggttgctgcgggtgatggatactcttctgatactggctcttcgtgctataatttcttttctcaccaagagcaggtgccctttcagaagggaatgggagtggagggaggggtcacagaaacacctcggcactgggggaaaacgtggcctagcctctgggcgacggcgagcagcggccggaaacgacgggggctgcgggccggcccgggttcagaggcttctttttccgcggacggagacactgtacagcccaacctcgggaaaacgccaacgcagacggattctccaacaaaagatgggctcggactcaagagtgcggctccagggcaatgcagcccaacctaaagatttagaaggcttcccgttttcgtgggcgccagagccgcccacggcgactgcagtttcccaccgattaaaggtgggtttcacggtaactccctcagattgcggcggcgattcccgacgggttctcaacagcattcct

SEQ ID NO: 12955 - DNA, 258 bp, Homo Sapiens
  misc_feature (45)..(45): n is a, c, g, or t
tttcaagactggaagaggtgatccttgaattgtccagctacgccncccatgtcatcacagggctttcatgacagggccagagccagccagctttgaagacgcgccctgccccgacacaggcagcctggagaagctgggcaggacaagtaggacatccctggagcctccagaagggactggcctctgcccacaccttgacttcagtatttctgacctcctaaactctaataaagtcatgcttacagccactagaaaaac

SEQ ID NO: 12956 - DNA, 742 bp, Homo Sapiens
aaaaaagctaaaacgtatctatatgcacatttcacttgaagcccaccctttagaccctaagagtaaaatccccctcagttgggtacactaccctggtacccaaaccagagccttctccaagtacatgtccggaccagtccaaagactttggccccgctgcgccaaatttcgccagatcccaaccggtcccaagcatgattctgaaccggcccgcagctctacgacgtgatgacgcggtcccagccggcctggaaggaatttcgtgccaccgctggggctcgcgaggcagagatcgaagccgtgaaggtgaagatcggccgcttccgagaccagcagtacgagatgctcaagcgctggcgccagcagcagcccgcgggcctcggagccgtttacgcggccctggagcgcatggggctggacggctgcgtggaagacttgcgcagcccctgcagcgcggcccgtgacacggcgcccacttgccacctaggcgctctggtggcccttgcagaagccctaagtacggttacttatgcgtgtagacattttatgtcacttattaagccgctggcacggccctgcgtagcagcaccagccggccccacccctgctcgcccctatcgctccagccaaggcgaagaagcacgaacgaatgtcgagagggggtgaagacatttctcaacttctcggccggagtttggctgagatcgcggtattaaatctgtgaaagaaaacaaaacaaaac

SEQ ID NO: 12957 - DNA, 605 bp, Homo Sapiens
ccagttaccccctgaaacatttcagttgtgaacgttctttcctgctagcttctcccatgaggggaaaacgatgggtttgaaattcacatccctatctgtactttgaagaacaccagcatttgccacaatgctgtcatccactgactttacatttgcttcctgggagcttgtggtccgcgttgaccatcccaatgaagagcagcagaaagacgtcacactgagagtatctggagaccttcatgttggaggagtgatgctcaagttagtagaacagatcaatatatcccaagactggtcagactttgctctttggtgggaacagaagcattgctggcttctgaaaacccactggaccctggacaaatatggggtccaggcagatgcaaagcttctcttcacccctcagcataaaatgctgcgccttcgtctgccgaatttgaagatggtgaggttgcgagtcagcttctcagctgtggtttttaaagctgtcagtgatatctgcaaaatcctgaatattagaagatcagaagagctttccttgttaaagccgtctggtgactattttaagaagaagaagaaaaaaagacaaaaataataaggaaccc

SEQ ID NO: 12958 - DNA, 358 bp, Homo Sapiens
  misc_feature (23)..(23): n is a, c, g, or t
  misc_feature (94)..(94): n is a, c, g, or t
  misc_feature (107)..(108): n is a, c, g, or t
gtgtattgcaaagagggctttgnagcgcgagcgcggggcgcgggcaaccccccttattaaatcggacaccccccggcccgagcgcgaaccgcgngccagcgaccggnncggcggccagccacgaaccgaactaagccgagctaggtagcgaggcgtgcgcgtgggccggggcggcggcgccccccccatccccagcaccgaggggcgagcatggcccgcccgcgggggggctggaccaccgcgcacgccgcccgatccccgcgccctacccagcccgggtcgccgccgctcgcacccgccgcttagcgctcgggcgccgctcgcttctccgggcatcgcggaaatcccgccgcagacg

SEQ ID NO: 12959 - DNA, 731 bp, Homo Sapiens
  misc_feature (197)..(197): n is a, c, g, or t
cattttacgctgatccaggctttctgctgcgagacgacatcgacatagtgcgcgtggccaatgtgaaccggctgccggctatcgtggcgcccagcgaagaagcggggtgcgccgggcgaccttgcactgcatcctcatttcgaaccccaacgaaggacgctgggaaggatcccgccttggagaagctcagcctgttntgcgaggagagccgcagcgttaacgactgggtgcccagcatcaccctccccgagtgacagcccggcggggaccttggtctgatcgacgtggtgacgccccggggcgcctagagcgcggctggctctgtggaggggccctccgagggtgcccgagtgcggcgtggagactggcaggcggggggggcgcctggagagcgaggaggcgcggcctcccgaggaggggcccggtggcggcagggccaggctggtccgagctgaggactctgcaagtgtctggagcggctgctcgcccaggaaggcctaggctaggacgttggcctcagggccaggaaggacagactggccgggcaggcgtgactcagcagcctgcgctcggcaggaaggagcggcgccctggacttggtacagttgcaggagcgtgaaggacttagccgactgcgctgctttttcaaaacggatccgggcaatgcttcgttttctaaaggatgctgctgttgaagctttgaattttacaataaactttttgaaacaaaa

SEQ ID NO: 12960 - DNA, 533 bp, Homo Sapiens
aggagaaggaaataaaccatcaagagcataaggttaacagcatctgacaaagtccaagaggaggagacccaggggtcagataagtggataaacgtaaacagagatacattctgattacttcagacagatacatgacatggggcatgctaggtctgctagttaattctaattgtagaaataaatagttacaggtagttttccctttattgtttcccaaatcaaacttataggtaaatagattttaaaatagaagctttggtgattgaggccaagtggggcagttaaaatttggtcgaaaacccagtcttactgtcttgaagaactagaagacatatcctgggacaatccatagcagttggaaagagaggctgtggggaaaataccagaaagggagagtcacgaaaacagagccaacagtttgtatacaaactctgtccaaatccttcattgacttcggaagtccacaagtactcatgctccaaagagctgaagtatggacaaaataattgatcagggtatgtgctcggcgagcg

SEQ ID NO: 12961 - DNA, 558 bp, Homo Sapiens
ttgcactacacaggggagagtcagttaacagaggtattacagaatctcggcaaagaccaatatccacaacagtcgcttgaacagattggcacccgaattgccaaagttttggaaaagaaccagacgtcctggggcctatccagcatggcagcactctactggagggtgaaaggccaaggaaagaaggcaatcgactgcctccgccaggctctgcactatgcgccacaccagatgaaggatgtgcccctgattagcctggccaacatcttgcacaatgccaagctctggaatgacgccgtcatagtagccaccatggcagtagagatcgcaccacactttgctgtgaaccacttcactctgggcaatgtctacgtggcaatggaagaatttgaaaaagcactggtgtggtatgaatccacattgaagcttcagcccgagtttgtcccagccaagaaccgaatccagaccatccagtgtcacttaatgctgaagaagggacggcgctctccttagtgcacttcttccttctctctttctctttactcatgacactaaaaa

SEQ ID NO: 12962 - DNA, 359 bp, Homo Sapiens
ggaaagtcaactatgctgaattgcctgttcctccagcagtgccagctgctcccgcacagatggactcggtgactccttagaacttgaggccctgggctcaggcaggcgctgggatgaagggactgtgggccgtgcaggtttcttggccactggggcctgtgctgggggctcaccctgcaggtgcccaggaggctcgtcctcgtctttatcagccggggctaaatcctctgcagaggccagtttctctgcagctgccaatgtcgctgccactgcgtcctcctcaacacccatagtggactccaggccagcgatggggggaaatcctggaggaacaggcaattcagcaaagttgactttcc

SEQ ID NO: 12963 - DNA, 971 bp, Homo Sapiens
cctgagcgtagtccagttactttcaggctcggggagtgaaggcctcgttgagagaaggtctcattcggtgttttgggaagagagtcgtgtgggcccaggtctgtctgctatcagctatgccgctgcccgttgcgctgcagacccgcttggccaagagaggcatcctcaaacatctggagcctgaaccagaggaagagatcattgccgaggactatgacgatgatcctgtggactacgaggccaccaggttggagggcctaccaccaagctggtacaaggtgttcgacccttcctgcgggctcccttactactggaatgcagacacagaccttgtatcctggctctccccacatgaccccaactccgtggttaccaaatcggccaagaagctcagaagcagtaatgcagatgctgaagaaaagtgggaccggagccatgacaagtcggacaggggccatgacaagtcggaccgcagccatgagaaactagacaggggccacgacaagtcagaccggggccacgacaagtctgacagggatcgagagcgtggctatgacaaggtagacagagagagagagcgagacagggaacgggatcgggaccgcgggtatgacaaggcagaccgggaagagggcaaagaacggcgccaccatcgccgggaggagctggctccctatcccaagagcaagaaggcagtaagccgaaaggatgaagagttagaccccatggaccctagctcatactcagacgccccccggggcacgtggtcaacaggactccccaagcggaatgaggccaagactggcgctgacaccacagcagctgggcccctcttccagcagcggccgtatccatccccaggggctgtgctccgggccaatgcagaggcctcccgaaccaagcagcaggattgaagcttcggcctccctggccctgggttaaaataaaagctttctggtgatcctgcccac

SEQ ID NO: 12964 - DNA, 396 bp, Homo Sapiens
ccccactatgggatgacgaggcgagagggaagcccttgctgcctgccattcccagaccccagccctttgtgctcaccctggttccactggtctcaaaagtcacctgcctacaaatgtacaaaaagcgaaggttctgatggctgccttgctccttgctcccccaccccctgtgaggacttctctaggaagtccttcctgactacctgtgcccagagtgcccctacatgagactgtatgccctgctatcagatgccagatctatgtgtctgtctgtgtgtccatcccgccgaccccccagactaacctccaggcatggactgaatctggttctcctcttgtacacccctcaaccctatgcagcctggagtgggcatcaataaaatgaactgtcgactg

SEQ ID NO: 12965 - DNA, 379 bp, Homo Sapiens
ctcacagatgcgcccgtgcggaactgacgcaacagctcctgccgctgctccgcagtgaagtactcagagctgatgagctcccacaccgtcaccgtcctgcccttgaagccacccacggggacctcaaccggggtcttttcaaaggtctcacgggcctgcagctctgagtagagctcctcctgccgggcccgagcagccttttctgagagcggcagcaggctcagcccggtcagctggtcgggccggcaccgctgctggagctcgccgtagctggccggctcccctgtgctaggggtcactgtagcccttggcgtcggcccttggtgccgacagggccctgctgctctcctcatccaggcaccctcgggcgctctgtgag

SEQ ID NO: 12966 - DNA, 399 bp, Homo Sapiens
cgggaccagcctgaggtgtaagggcagacaaacaggtgagggtgagtgtggcacccagagactgctcttcctgccctcaccctgccccactcctacgactgggagctgacatgaccagcccactgatcctgtcagcaggtcctgctcctgttgccaggctcctgtttatagccatgatcagatgtggtcagactctttctgggcctggagaccacggtcacttgttgactgtctctgtggaccagagtgcttgaggcatctcaggcagcctcagcccaagcttctacctgcctttgacttgcttctaggcatagcctgggccaagcagggtggggaatggaggatagcatgggatgtatggagaggatggaagattttcatgtaaaataaaattaaaaa

SEQ ID NO: 12967 - DNA, 339 bp, Homo Sapiens
gggactcctcggggttgcatggttacagccggggcgctgccagggactcctctgcggctgagagatggaagggatccttcccgacgtcccgcaggtgtggggcgagccaccgggaaacggggcctgtcaccagcatccccgagcccccgcagaccggaatgcaaatggctccgcgcccacgcggctcccggtctgctgacgagggctgcctgctcccatttcttctcttcctcttcattttttcttaagggctgccagttctggaaactttttctggcttctcagacaactgtggcaagatggagtagagagaggccccggcgggcacagtctgtgagg

SEQ ID NO: 12968 - DNA, 172 bp, Homo Sapiens
ttccccatcttgtcttcctagaccccacagagttaaaacttgggattcccctggcccccccagaacacttgtatattgtttgtttgaggttcgtgccgcagtaacagacacagtatttaattgcacatacagatgtttgctgggtatattcactgtaaattttatttaatct

SEQ ID NO: 12969 - DNA, 1442 bp, Homo Sapiens
gaccaccagtgaggccaggccccgttggggagccaagcaagtgggttgagctcttgtgctaaccacctgggagctcgcggtagcgtgaagggcaaggctggtgaggctccgggaccccttgcgtgtttgctttcccacgtccctgcccactctggcacggcccccattcttcgcccatccctagcacagagcccagggccagggggcagagggcgggctggctcaggagcagggctggccccgtcccatagcgccactcacattgccccttcccctctgctcatcccagctctggtcacttagatgctgccatgagaggctctgaaatccacccccactgcagccaaaagcccaagtcagagccaaacctgcactgtgctcggactgacaggctggggtcgggggagggaagacatccactgagggaggtccaggtggcaggaggcggaacaggatactctgaggagacacagcaaagggtgccaacatctaggactgaggccatctggacccacatgactatgttgctttttgtgtgtgaatgtttctctgcttcaacattttcagaaattttcacatctaggacgtgtcagaaaattaaccaattccatgccagagaaaaggccttggcctataaccaaatagagggcccccccagttcccagcaggatggtggcagagctgctgactgggcaccgactcccccgcctgggccggagcaccctctccatgaggacacgtgtcctcctcaggatgggctgagtcctggcatctgccccgtctgtaaagggaaagaccccacccataccagctccccagcagcatctccttgggaaagagggcaaactccagagcagtgcgggtattggagcaggacatcccctcggccgctgctgtgcccagggctccccagggcccgggctggctgggaagactgggaagacttccaggaaccaggcaggccctgcgggtccgggtctctgggtgccagcaggagggagctggtgaccagacatagttgtgtgggggagggtccggacgaaggggttgtcagggacagtggagccacagtcattccgagagctgggcacctgggtcgggggcggcgggtcactcccacaggaagcgcacgtaccagatggtctcattcttcagctggggcccgaacagggggttcagctgcgccaggatggcgatgagccagaagaggtaacagcagacggcggtggcgaccagcatggtgatgatcactccgcggttgggtcccttcggcacgaaccagggcccggcgatgccgacgaggccccagaacgtggtgaagatgatgaccgggagggcgaatgagtgcgccgtcatggccgggcgcaggatgcccaggcaggatgcagggccgagcagcgggcgctgcaggtgcgcgatcccgggaattccggaccggtcca

SEQ ID NO: 12970 - DNA, 529 bp, Homo Sapiens
tttaaaggacaaaaggtcactccgtttctctctgagggagcacaggaagtatcacaaaaggcagcgggaggttttcaggatttctgggccctgccacttaggtcagaattgtggctgcagaggcatcttgatgactcaaaggcaggtggctgacccctggctctgccagtccggcgggggcagcatgaaggcagtggctggggaatggcacaactgtagatggccatgatgcctgagagtgagattccttctgcaagcccataaggcagataagcaaaaatgatcatcatgccaaactccaaggaaggcgttttcctcaagtcaatatgcttcagcactaatgcagaaattaagccagtgagagtgccgagcgctgcagagccaaagaacattttgaggaagtagtcaagggcttgtaaaaatgtttgccacccatgacatctgacataatttttcctgtaaagcctcagctgcctcgtgccgcccgtgccgaattctgggccccgggccaaatcccaaaggggtcgtt

SEQ ID NO: 12971 - DNA, 817 bp, Homo Sapiens
ggcggaacatgtaagggcacatcccgcgagctgccgcccagcgcgcagacagagcccaggtgagcaagagaacgggcgggcggtggggctcacggcctagggaggcgcggaggcatctggcagaggcgggtcgggctgggccagctggggtagagcggaggagcgggtgccggctgaagcggggcggtgggcgcggagcgcgctgggggcaccgacaccacctcaccggcagccgggtgctgagggccgcggtgtgggtgcgcggagcagtcaggtcgcaggtgggcagcgcgcacggcctgccagcccggggcgccagaatcctgcgctgcggggccgagaggggcgccgcgcccgccgcagcctggagctttccgcgaacctcggggcgcccatgacggcggcggcgacggctaccgtgctcaaggagggcgtgctggagaagcgcagcggcgggctgctgcagctgtggaagcggaagcgctgcgtcctcaccgaacgcgggctgcagctcttcgaggccaagggcacgggcggccggcccaaggagctcagcttcgcccgcatcaaggccgtggagtgcgtggagagcaccgggcgccacatctacttcacgctggtgacctgaagggggcggccgagatcgacttccgctgccccctggaagatcccggctggaaacgcccagatcaccctaggcctggtcaagttcaagaaccagcaggccatccagacagtgcgggcccggcagagcctcgggacgggacctcgtgtctaaacacgggcgcaccatctttccttatgctacccacactca

SEQ ID NO: 12972 - DNA, 422 bp, Homo Sapiens
tgcggccgccagcaacagggagctgagatgacgccgcagacgcatgccaccgccgtagctgcggggcgagcctggcctagcctgggttagtgtcttcaatattcaccatgaggtaaggactgggctgccacatgtctcagcctcttgtcatgctccttcccggggacttatcacaactgtaatcagacaacaggttatggggtcgccccgcgttggactccagggggacgcagccctcctgaggacaaggagcgtgccggggacgtctgtcctggggaggtctgtctgtctgtgggccctggccccggctcatggggagttaccagtcgcgcctgcaggaggagcagggaggctcttggtgctgagggggtcgtcagtaccggcgctggtgagacctgtcaggttcacgctgcggaggaggg

SEQ ID NO: 12973 - DNA, 336 bp, Homo Sapiens
tgcgcccgctccatctcatcatctcgtcggccttctgactttgcctcggagagccgttctcacccacactccaggaaaagccagcccaacttcacacacccaggtagcacccctgctcatgggacatggcaggcctagccctgggccctccaccactgcccacctttcccggagggggttgataatgttccatccagcagcagagctgagggctgcagcctctgcctgaggaggagctgggacggggccggaaaagcccagcagagacagggtcccatgcccgtgggctcacaagacaacccaagactgaaactattttccctaaagaagtcagtg

SEQ ID NO: 12974 - DNA, 603 bp, Homo Sapiens
gttacgaatttccggcccccaattgggcctgccgttcaccaggccattgttcattgggcccagacatggttcaggattggcttgcccgtactcttcaacccagttgagggccctccagaacctgcaggcatctgtggggaatcccagcctgcaggttcttggagaagcaggtgaacctaaggatgaaagcaaaggagggccttgaggaagcagcccccaggcctggcagccacgcagcggctgagctcatgaacttggttcgcagcctgccttgcccctggaggccacgccaggcgctcacccctgagcccacagcccctgcttgggctgcctggcaccctcagggtggcccggcctcctcctgccactctgagcacatgtccgggggttgccaccagagacggctttgttctcccagctaaggccgtggagctgctgtgtgactgtgtcaggcctggacaaggaagacccttagggatgacgtccccgctgcatatttattcaaggtgactcttgtacttggcaagggaagtccactgtgtgattgtctgtattcttaatataatttgttaaataaacgtttgttttaacctcttaaaaaaa

SEQ ID NO: 12975 - DNA, 247 bp, Homo Sapiens
aggagtgatatttaattatctttactgctgcatccaggacactcttaagtgaaactggtatgcacgctactgggagtgcagagcagggaagaatgtaacagctattatttaggctgctgccttgactcctactgaggtgcccgcagttctacccactattgctccatcagtgcaaatgttcatactaaagcaagtaacaccttggtgttattagatgaaaacagtcttcgccgcgcagtcagtgagg

SEQ ID NO: 12976 - DNA, 440 bp, Homo Sapiens
  misc_feature (352)..(360): n is a, c, g, or t
agccacgattgagaggactacgggcccgtgggggctgtctgctgctgcccctggaccagctgagtctgatcaaacccatcaaggatgtggacatcactcgacgacgacgtcgtccagcagttgggaggtgtcatggaagaggctgaagttgtggacaccgatcttctcttggatgatcaagattcagtcttgcttcagggtgacgcagaactataaagccctgtgtgtcacttagagacagtgaaaacccacggcctccatcttcattaatcaggaaacctggactgcctgcttgttttgtaacccttttaaactacctgttttaaaagtggtcattttattcaggtttagnnnnnnnnntcctatttcttttccttttatttaaaaaaatttgtttttgtggggggttgggggaataaataattggcacaactatcaaa

SEQ ID NO: 12977 - DNA, 336 bp, Homo Sapiens
tttgggcttcaaatcaagtttaataaataaaacagcaaaggggggttcaaggcagttatcacttcacagtgtggtccttggtggggtgagggatggtcgagtccaactcggaaaggggctcgagcacaagaggccggacgacacccggggcagggcgcgccgccgcccacggaggaccccactccaacgtgtaaacagaaacagaaacgaacgagagggccagggaggagggggaccaggactccaagccatcttgctaggaagcttcccacagaaggaagacctgcagggctggggaaacaggctggagtctggcccctgcgtggccagcagggc

SEQ ID NO: 12978 - DNA, 414 bp, Homo Sapiens
atatcaccacgataccagtttaatacatattattatgtacagtagttaagttagctcgggaaggtgagtctccgcagcctgggtgaacagtgtgggatggagcctcctggaagggaggcagagagctggtcatgagagagccgtgcacggccaggatgtgtatgtgcggcacgagcacacatgtcttccacacgccaacaccagaccatccctttagctgtttgcagctggaagaagacaaatcacacatatggaaaggatcccatacatgagaagagccatgacagcagcgctgaacagcccagccacagggacggtcacgaaccaggccacaaagatgttccgaaagaggcgccagtccacagccttgcgggagcggatccagaccacggccaccaccgagcccaccttaca

SEQ ID NO: 12979 - DNA, 437 bp, Homo Sapiens
tcgatgagagtctcactacattgcctaggctagaactcctggcctcaatcgatgctcccacttccatctaccaaaacgtcaggattacaggcataagtaaccaagctcagtccagtaaccattttcttaaggttcagtgacaaagtccctccccaaggagtatggatttccactcttgtgctagggaaagttgaagtatgtgcctctaacccttcacagatgcccactttcccttcagagaaacgtccttcaggtgattcttaacaaactggaatctggaagctgtgccctccagcttcccccgccacccagcccttccagcttccccgtcgtttccacagtcgcattcccgaggtccgcgtgagccgttctttagccagacagaaactacgccccatgtgattgatgcttctgccttggcctcaagtaggcaacgt

SEQ ID NO: 12980 - DNA, 414 bp, Homo Sapiens
ccccggggggcaacgaaggttgggtttggtcacaaaacatcgtgaaaattcgtgcgtgggcttctttctccctggtacaaacgtatggaatgcttcttaaaggggaactgtcaagctggtgtcttcagccagatgacatgagagaatatcccagaaccctctctccaaggtgtttctagatagcacaggagagcaggcactgcactgtccacagtccacggtacacagtcgggtgggccgcctcccctctcctgggagcattcgtcgtgcccagcctgagcagggcagctggactgctgctgttcaggagccaccagagccttcctctctttgtaccacagtttcttctgtaaatccagtgttacaatcagtgtgaatggcaaataaacagtttgacaagtacatacaccataa

SEQ ID NO: 12981 - DNA, 323 bp, Homo Sapiens
gcggccgccgtgagcggtgtctaccgccgtgcaggccgcgacgtggccgccctggctagtaggctggcggcagcccaggcggcggggctggcggcggcccacagcgtgcgcctggcgcgcggggacctttgtgcgctggccgagcgtctggacatcgtggctggctgccgcctgctgccggacatccgcggcgtgccagggaccgagcctgagaaagacccggggccgcgggcctagccatgattctacttcccaacctgactgcaatttgggggtaggccttgctgcctctgggacctgactctgtctcctgtgtctcttat

SEQ ID NO: 12982 - DNA, 419 bp, Homo Sapiens
agctcatcagctatctctagtgttaagtgtattttacgtgtggccccagactattcttcttctaatgtggcccagggaaaccacaagattggatacccctgctgtagttgtataacttgaaaacaggccatatgcatgctatctccactttctgcatttatgtttactctactctggaatgctaacccagagtcatgaatcaaaatgaggtataaattataacaggtgggggtaacattcctaaagcccataatccagatgaaaccagagctgtcaagtggtaagaacaaaagcagataactagtagcctgccaagtcctcactcatattacttctcctgactgtgaaggagcatcagatgtgaagtcagactccctcagctctatttccatgaggttaggggaccatcttatgcttgt

SEQ ID NO: 12983 - DNA, 683 bp, Homo Sapiens
tgagcaggagctgggcctttgagggccctgctccaaccccaagctgcatttatgatataacccatcacagctggattttaaaaatacacaaaaaaatatataatatacattataaaacctaggtggggtttggaggtggcctgagcgatatgcaaacagtgaggaccttcaggaagctcgggcagggtcgggatgaggaagggaaggggcacagtacttcatatgaaactcataaatacccacaggtggctgctggacaggcccagctggctctgggggcctgggtgttaagaagggacagcaggtgaagggttaaccttcagtcccagaactgggtctgggagctgctactctaggcaggtagattgaggtggggaagaacctaagggagcagtgcccaccaagggtttgtcagattcaagcctcaggcaagagaaaaatcaaaagccttctgctactctctccctctgggcctctggtctgcccagaggctgggactccttcctctaccttgctctcaatctggagggtgctggggggtgcctccatcttactgggcccctggctggcttgtgggctgaggtgctaatggggtctagtagctgctgtgctcccttcttcatgcccagtctgaaacaggtgctcccctaacccagcgcccctcgatgaggctccactccaca

SEQ ID NO: 12984 - DNA, 413 bp, Homo Sapiens
gccgctgcagacattagcgctaggaagatggcgcacccggcaatgttccctcgaaggggcagcggtagtggcagcgcctctgctctcaatgcagcaggtaccggcgtcggtagtaatgccacatcttccgaggattttccgcctccgtcgctgcttcagccgccgccccctgcagcatcttctacgtcgggaccacagcctccgcctccacaaagcctgaacctcctttcgcaggctcagctgcaggcacaacctcttgcgccaggcggaactcaaatgaaaaagaaaagtggcttccagataactagcgttactcctgctcagatctccgctagtatcagctctaacaacagtatagcagaggacactgagagctatgatgatctggatgaatctcacacggaagatctctc

SEQ ID NO: 12985 - DNA, 534 bp, Homo Sapiens
gaaggacaataaaatctagagctggacatgcccttcctgctacctgtcgacacaggtaaatttcctagaatctgttccctttatagatccatgttgaaattcacttatagcctcacttgcatgagatttgccaggcagaagtgaagaagacattagtcaggtattggaaccccaccatacagggagacagcctgcttcctgctcattttcctggttattttctctgccaatcaaaaagtatcctgaaaacaccccctgagctgcttgacttcccaatctcaaagagatgtgttggtttccacagttgtctccacaacctccgcatcaaagatccacgtaccagtttggattttccttctagccttcatgtgtggcccaagcatctatttcagactgtcatggttggcattgttctctgaggttctgtcttccctttgtgtttctatgagctttaatttgtatggttcttgttctgttaatgccactagggactatgtattcctgattccaccatgacagctacagtaaaacagt

SEQ ID NO: 12986 - DNA, 482 bp, Homo Sapiens
ggttggatcgaggggagaagtaggtcttgttgcggaggtcagagttacagcgggacccctggcaacaggagccactgagcgtgaaccctgggcctgttactccatcccgagtgcagaattcatcctggacacagccccggacaggcaaggacacagtcacattagctgccgtcaaggtgacgttgccgtcgaagcagcccttgtagacatgatcgctggcgttgtagcagctcacgaccggcggcgatgtaccctggcacgcctcccggctcaggcccacacagctgtagcactccacgccgttgggcgggtatgcactctcattacctgccgggtcgagcgcccgcgaggtgaggttgagcttggcgttgcagcgatcctgagcgcattgctgcagctggatgaacgccagaagcccgtgaagatccaggccgcggtcattcttgccggggagtcccgaagcgtaagcccgaagacggata

SEQ ID NO: 12987 - DNA, 346 bp, Homo Sapiens
cctcccagcgcggggccggccgcgccgtccagcccgaggtctacggccttgcgctccgagcccagaggaagatgcctgccggcaccgaagctcgggctgcggggctgaacgcctgtcttccaggcgcagcggcagcactgccctcggccggtgtcggtagcggcactcggcgtgccccgggcggacgaagagcgcaggctgggtacaccttgcccgaatcggcggagttcgcagctagcgagggcgggccggccggcccggatgggcgcggggtttgcggcccccgccgggtgctccggagcggcccgggcaccgggggcacgatgaatgccggagccgcggccgc

SEQ ID NO: 12988 - DNA, 693 bp, Homo Sapiens
ggcttgggcagcttcgggaggagatcaggtgactgggtcactgcggctggcactcactgggttccgtatgtcacattcatagggccctgcaatatactttgtgacaccaaatagaaagagggtcctgttggttttggacaactgcaacctgtgagtcatagggaggctctgaccattcatccaccactggtagcttgcggctggagtcgcaggatcacaggttaagatcacagcctccatggcctccctgggatttaagttgctgctggagatggagggcttgggagtctccaggtgtaaggtgaaggtgaaatgtccagttactcctccagtcccatcgcgtcgctttatgatgtgtaaggtgtaggatcctgcatcctcctgcgtgacattctggatcagcagggatgcattggaatatactctttctcttccactgtatgcaggcccatatataattctttgaccggtctactacatatgatgtaatgtaatggtagaggtatgtcatttgccctttgtaccaaatgtagccagcaagattctggggcaaattgtggacaagtagaagaacatccttcccctcagaaactttgggtggctgggcttcaatcgtgacttgtggcagttgtgggcggattcccagaagtttaaaagtgatgctgtgagcaggaccccattctgtcgtcttct

SEQ ID NO: 12989 - DNA, 269 bp, Homo Sapiens
ataaaaatgttgagtctttgctttattgagttacaacaaatgagcaacaagttagaaaaattggttttattcaaacttcctagcgtttgacttgtgcggcgtactcaaatggggggcagtgtgggagggggagggattgcaaccagagttcatactgcaacacgtacaccagatatgtctcttggttttccttcttttaaaagttaggactaactgaaaaagtgcactcaggtatctaaaattgtcccaaaacaaacacacacacaaac

SEQ ID NO: 12990 - DNA, 487 bp, Homo Sapiens
tccagtatgactgatggcctcatgaaaagggaacagagccctacagtgtacacagtgctgtcatgcatgtgtgtcctatccagttctgtgggctaggcattatcatacctgttgattttactctagtgtattgcttttgttggcctaccatctgtgagcctcactttttctaacaacaggaaccccgttctgccaaacacacaacatatgttggaaagttaccctaccccagtccaacatgtgcttgtgttgagaggtaccagtctgaatcctccggcccagccctagcctaaaaaagtgtgtgtgctggttaggctctccaccatcagcccaccagctaatctcttctctgcccttccatgccccaggaggctatacgcatcagattgcacttccagagcccaccggcctctggttgggcttggccactgcgatgagcagcctcacaaaagaccagagagctggacgagaggagctgcgcttcatt

SEQ ID NO: 12991 - DNA, 522 bp, Homo Sapiens
  misc_feature (442)..(476): n is a, c, g, or t
ttattttcaaaattcatttttaatccttcattagttgccagttagaacaatgtatcatataagcttacaattaaatttaaatcctcttttgatgacataaatggattccagatctatgaatttgccgtatgtagacattcttttgttggaaaataaaacttaaagcattctatcaaattcacaatagtttgattacttcttacagatgtgcaatatcaagacaatcaccaacttcaatgacaattgttaaattatggaacatgtaataacaatctgtagcaactctggtctttcaagcttctaccttttgcttttgctctttgattttatctgccattaaaaaacaagttgcattcctgccttgtatgaaagaattctgaagctatcagaactgtcttcagataattgaagatggtaacttcaggtaactctagctggccannnnnnnnnnnnnnnnnnnnnnnnnnnnnnnnnnngaggcagagtttcactctttttatccaggctggtgtgcagtggcca

SEQ ID NO: 12992 - DNA, 340 bp, Homo Sapiens
ggaggggaccagtagtactaatgacttattacaggtcattatgaaataagatgacaatactgaatcattggacgagaaaattttgctgctaagggcactgcactgtaatttgttagtaaaggctaatagtagaaatcaaagctccgttgaggacaggtgcctggtctataacacgtcgtattcatcacatttaacataggagtaaatgatgagggatgactagattgtactacgatgagatgaagggttaagatttctttccccatcaccagtagcctccctagctggtgtcactgtctccatactctccatgaatccaccttccactagtttcgcgccc

SEQ ID NO: 12993 - DNA, 435 bp, Homo Sapiens
ggcgaaaacctagtagctacctctctgaacatgaggaaacagcatattcaccaaacgttgtgctccagctggaccactggcacaatttccaagtttgtgtttctattaagtaagtagtgtaagtaaggtacagagtcagccagggaacccagctgtatctgacaaagcaggtgtaggagtgggactgccatctaccaataattccagcaaatacttttgctaatatactttgtgcaacaacacagtaataaccttatcaattcggctatagatgtacttcctttttctaaaactttcagtcacaagctaggtatggaaaccgcaaaaggaagtaatacttctaaccctcaagactgccgttgtaaccaatagttagctgcccaactccttcaaattggaagtggatgataatgaaagagactagttttccgcgcc

SEQ ID NO: 12994 - DNA, 415 bp, Homo Sapiens
gtctgaaacttctcacatgtttgggaggttttatgtgtcctcattgggaaaatgggtgtaattcagcataaaacctcaatatgattgtcctgcctcatggagctgttgtatagatccccagatccatcccatgatttgttcctgtctgaggcatagaggcaggcaagccgtggattttgcacatggtgactttcccactgtgccatgatacagtctgcatcttatagcagtgcctttgtctcagggcctctgctggcagtctagaccttttgggcagaaaggagcttcaaatggctgtgataaggaatattaaaaattgtgtttctactttaattgtattggctgttcatgtatgtaggagttaaaataggccaaactggagaaataaacgcattctgtccaccatgaaaaaaaa

SEQ ID NO: 12995 - DNA, 555 bp, Homo Sapiens
gggcgcgaaactagtccagcaggtttctgccctgacattctcttgtctgctattcccagagaggtctcagaggggaggggagagcctgcatctgggggccaagggctgattagggaactgtgtcctacccacactggcatgttggattacgtttgtcctgttaattcactctcgacggtgagttactaattaacttttggcaggtacaacagataagtcctcacaaactgttcccagccctaggctgacatgagagacgaacaggctgtccacctttcttctccatccaatgggatggatccatgttcattcccacttcacaccttggtcctgctgattagagagctcatcagaggggcctggaaaggctgagcaagtaccagtgacaatggccatttaagaattctcaggccccatgtgccagccttcttgggaactgagctggctttctgggttttctcatgcctggtcttactgcttcttcctcagggctcttgttctcccagaagcctcagggtaatgtgttggttagcacgtaactactaggttttccgc

SEQ ID NO: 12996 - DNA, 492 bp, Homo Sapiens
tgcaaatatttcggcattggttcatcattttccaggtgtttttaatgctacaggttatggagcgtcgttacgggaatcccacctacgtctgaccgtctctgtggaggacactcctggaacaggtctctttgtcagtgaacaagggcgtcactctgggaggggtcggcggtgctggcggccgggtccctggtgcactgacctatctgggataggcagtaccctggaggggggcctggggcagaggaggcagcagaaaaccaaacatttcactgagaaagccccctccctgctctaagaaggggctccgtgaagttcttcccagagccgcgctgcctgcagtgcgctctgaccttctcttcatgtgtgtaaatctgtaatataccattctctgtggcctgtttttcctggaagaagaaaaaataaggtttggcaggccatctttttttgtacttaaaagtagccttaagaacaataataaagtgctcttaaacc

SEQ ID NO: 12997 - DNA, 611 bp, Homo Sapiens
gtgcaatcatgtagttttggcggaaatttccccatcattctaggatgatacagaaagaaaaactgtgcctggaccctccctcttggtgggtctgtggaaacataagcggtttttttaatgggcccctgcatcaataccaaacatgggggtttggtaatgagaaaccaggacaggccatctgcagtgacccagcccaggacgaagtttacaaacacctcctggaacgaagctcccgcctgcatgtcaccttgatgggggctgtgagtggggcagtgtgatacccagtgactagacgcactctgcgttttcccgtgtttggggctgaggcctgctggacagatggctggccaagtgggagcagaccctagggagtttgcacctcggctgggccggattcggaccggctctgtgttcactacactcagaatagcctggctgcttctctgtctccgagaccggaggtagtgggaaccaacagctgggctggagagttggtgctggcaaaacagtccttgccctggggccggttcttacccaggtccagagaaaccaacgcgggatgtcagacttcaccaaaaggactttctggttgcccctggctggcttcctgg

SEQ ID NO: 12998 - DNA, 815 bp, Homo Sapiens
ggcgtgtcgagcgctggcggagcacgggccgccgcggcgcgcgcctacccccgcgcacgggtgcatgcagtgagccaggtgcatcagctgcacccgccctcgggcttcgcgcgcctccgctggagcccagctagcctcgcggctccggggccgaccgggtcggaactgctgcgtccccattccggacgcagagagcgcgcggggcgccggcgccgccggttaaagtgccgcggggcaggggccgggccgcggcacccgctcctcccgctccggtcccgactgtcgggctctcggccgagtcgccccggacaatcacaaagagtgtgtaggccagccccggtcacagagtgcaccgtatcctgtcacttctggatgtgagggagaagtgagtcatctcattcccctccgtggatcagaggacttggactagatagaagcatgtggtgtctcctacgaggcctgggccggcctggagccctggcacggggagccctggggcagcagcaatccctgtggtgcccgggccctggccagcgcaggctctgagagccgggacgagttacagctatgtggtggtgggcgcgggctcggcgggctgcgtgctggctgggaggctcacggaggaccccgccgagcgcgtgctgctgctggaggccgggcccaaggacgtgcgcgcggggagcaagcggctctcgtggaaagatccacatgcccgcggccctggtggccaacctgtgcgacgacaggtacaactggtggctaccacacagaggtgcaagcggggcctggacgggcgcggttgctgtactgggcac

SEQ ID NO: 12999 - DNA, 391 bp, Homo Sapiens
caaattgggactctgtattcttcgccaaagttagcagtaattctcctgctgatcgctggatgcagggatgtttcaggtttttcagggtatcaaatgtagtcattataaactggcagagctcatttgaatcaagaaaaccttcaaagacctgggcaattctgaagggacagttgtagaagcatttagcggcagagctgtggagctccaggaattctcgacattttgtcaatgctcttttcaagttttgctgatctttcttgtcatgagtgatatacttcagcctcagggtgatatgcagcagggagtgaatgccctctgcagcctcctcagccaccttttcctgtgggtcacccacagagcagtgccatcagagccactaggttttcggccc

SEQ ID NO: 13000 - DNA, 421 bp, Homo Sapiens
catgtgtcttgctgaagattaaggggaaatgttacagtgttgggacttcctttcatggcagaatctacaatttgagcgacttcagtagtatctcttagtctacgcttttcatacacaaaacactgtggaaccacaagccattaccaagcaaaactctttcactggaaacaagggggcagtctagaagtaaaagtgaccttaagaagactctttacaggcaacaaatgaagcttttctaagggatttttgcatcagttcagtcataagaatacttttttccagggtaattaggcaatagcttcactgaaaatgacagcttttcattgcattatttaatccttatatttggaattgaagtcgttaacttcttttaaagaatgtactattagaaaaattaaaaatgaaatgttgagagacttca

SEQ ID NO: 13001 - DNA, 357 bp, Homo Sapiens
gggcgcgaaaacctagtcctgttgatgatttgccgttcttagtttcctaatacccccatggaggaggatgggcagatgttagaattcttcatgaaacatgtggggcaaccccagaagcacagaacagtggagacttacccaaattcttcacagtaaactctgtagcctcctccattaatttttgttactgaaggaagaatcccaatgacagtatatcattttttaaatgttgcttattatacagataatgcaatactggcaataaggaaaaacatttttaaatcaccctgatcctactacccatcaaatcaactattttgagctttttctatgttgcttgcagtgctgatctgtttg

SEQ ID NO: 13002 - DNA, 407 bp, Homo Sapiens
caggactcgctgctgctgctgctgcttgtgtaggtcggggagccggagatccccgaggacgcgcgccggacagtcggcactgaccggcccacctggtagcagaggacacccccagccccccaagcattgaagacatagtgtatttcctcgtatcctttctcccttgggtgtagttggggtggggaagcagggaaggctggtgcgatctccattccttgggctccacgtccgagttcatggtgcgccgctgtgctgggagctgcagtgggaatgtgtgggacaccttgaccaaaggggagctttgtctcgtgtgttttgaaaaaggcttaatgaagagaatgttgttcattcttagtagtatagtttgcaattcttaatggcaaataataagtttcagtagaaaacaa

SEQ ID NO: 13003 - DNA, 493 bp, Homo Sapiens
gtcgcggaaatctagtttcatgttctccacagcccaagccctaaagaaggctacattactgacagtcatattggcaccttcagactggttgactccttccaaaccctcaaagggcagctctagcatcctgaccaccccttcttactctactcctgctgctcagcactgctgaaggaaatccatccgacagaaaaggagctcttacacaacaatgaccgccagtctcaggggaggcccttagttctactcagcaatcccgtcctcactgaccctcctttcccgtcgtcgtattccaaccttacaggccttccccaccgcctcacactcaatgtttttgtccctttccactagtacagaggaaccccatttctgcctttcttttcaacaccccggcagatctattagagcatctattctgttcattctagtcccaaggaaaggtccattttcctctgcaaatgtaaatctttcaatctagtacagtaggttttcg

SEQ ID NO: 13004 - DNA, 384 bp, Homo Sapiens
ttcatgatatcctattcttctaccttgttgcctggtaactttttctgaggactgagtttctgcagcgatgtggtgcactcttcctgtgatgaggaaacatctgggcccccttctgcaggctttggaagatgatgtgtcttgtcaaggggtaaagggcaaatggatttaatttctgcttaaaactatcatagacgttccaaatagaatatgtaaaatttctctgtattagaaaaagaaacgtgataccaattgtatattttcttttctttatttattctctgtaagtctgtcagatgataaattgtaaataacaatgattaaagagtcatgctactgatggatctccctttctgtataaacagtgccagttctgggatatgtaaa

SEQ ID NO: 13005 - DNA, 459 bp, Homo Sapiens
  misc_feature (286)..(295): n is a, c, g, or t
atatcctgacctcgtgatccccgcctcaactcccaaagtgctgggattataggcgtgagccaccgcgcctggccccgggcctttatttttatttttaaccttttgacaagacacgctttctattagagctgctttttgtctccctggttcgatttcctgatgtagaatcattgtgttgctgatttttcagttgaaaatgtttaaactgcttcctttgagaacaagtttgagttttagtaagctgtaaagctgttttatttgattcactgtgaataagacaagtacnnnnnnnnnngtgaaaacacagcacatttcaagtgtaatcccctttggaatttttccaaagtcttagtatatgtctttgtgacagaaaaacatagatgggacaggtaaatgaaatgttcctagttgcatagctgttaaccatgcttcaaaaataaatcattttttaccaaaaaa

SEQ ID NO: 13006 - DNA, 392 bp, Homo Sapiens
ggtgtttttcttccatgggtaagccattgtgaatggaggctggtggagcagcacactgtgtgaacctggcagcgctcatcttggcttgtttagcagtgcctctgtttacaccataagatgttccgcatgtgtccaaaatttcgcctgctctgaaaaacatggcccccgaggctctgtgcagtttggggccttggttcccacctgcagatgcggtcagttgcctggctcctggggccagagtttcctctgttacttgttgagtctcttgtcttcactgtcagaagctgaactgacttgggggctttgctgttgatccactttagcaaaccctgctgcagaggactgtaaaaacaaataactaaaaataaacttagaaaatacaactcagaaaa

SEQ ID NO: 13007 - DNA, 258 bp, Homo Sapiens
ctgatttcacaagtgtggtgttttcccaaggctcccttcccaagctcagtgcaaacctctcactcccaagtttctttgaggccacttgcccccaagcacttcacaatagaccctcgagggcttgtgtccatttggccttttacaagtgtaatgccaatttcattgatttttgtttcttttggcctgatttgtatctctggaatgcatttattcttgaaatatttgtgtgattttacaaaaagcttttgtaatcagtta

SEQ ID NO: 13008 - DNA, 451 bp, Homo Sapiens
  misc_feature (81)..(116): n is a, c, g, or t
tgtggtcttacttatgtttagaaagtggcacaggttactgaattgtctacctgccagcattctgatatagcacaaaaagcnnnnnnnnnnnnnnnnnnnnnnnnnnnnnnnnnnnnctggcattgagctctagggtggatgagggtttatggtcctctgatcataagctccattctaaaaactggtcactgttagctgaaattgctttggttccccaaatgccttggaactccagacgcacccgcagggcctgaggtaggcttcatagagttctaggacttccgtgtgcgttgccaccagatcctgcccagcaatggcctttcccttctaaggtcattagattcagccaaaagcgacctcttctctagtccggtgttacgaacagaagttctgagttgtgctacaaaagtagttccatctttttggtgtaattttcatgtttttaatttga

SEQ ID NO: 13009 - DNA, 367 bp, Homo Sapiens
gaaatgctaaggtctttgagtaggaagtgtagctggaactgcaaagtaataaatgctggaaatggcagagtaaaggctcaggtcccccacctgaaataccccctcccaccagcatctcctgcctcgctcctgctgccaggtccccaaaagctcttgttcatgagctcgcctgccatccacagcccccaccagaacccaagtggctgtggaattcgctgccctgattctctgcccagagcctcggtccagactgtgttccctggcgaattagtgttcagcatttttgtttatttgtttgttctttaacaaaagttgttttggtttgagattcagcaaaaatacacactgcattcagcttcctctcgaa

SEQ ID NO: 13010 - DNA, 426 bp, Homo Sapiens
tgttgcttaattgcataggacggaatgaaccaattgagagtgggagttttctgtctcagagccaagatcttgggtaaatgcagaggagagggaaacaaagacaggctggccttgaaaaaaccatgtgtgcaaactttacatgcatttggggggtgtggttgcactgaagttaacaagattcaaaccgtcgcccaagttggtatttccatgtttggtacacatcactctgtgccatatcaggtcgttgttaagtgtggtgacaaaatcagtggttagtcatttttttaattaaaaatgtgtatagtgtgtacctgctggtcttactgtatgtgcaactaaaggtttacatagtctgtgtatgggttgtaaatttttggctggctgtgctgataaagcattgggcttgaataaagcaaagcagaaaat

SEQ ID NO: 13011 - DNA, 640 bp, Homo Sapiens
ccggcccggccccgggctctgagcgcgccgcggcacaggtttctgcatatgaagtgtgtaaaatagattgcttgatccaaaacagaaaaacagtgataactgttttgctgagttcccagacccttcccaagatggaaccaataacattcacagcaaggaaacatctgctttctaacgaggtctcggtggattttggcctgcagctggtgggctccctgcctgtgcattccctgaccaccatgcccatgctgccctgggttgtggctgaggtgcgaagactcagcaggcagtccaccagaaaggaacctgtaaccaagcaagtccggctttgcgtttcaccctctggactgagatgtgaacctgagccagggagaagtcaacagtgggatcccctgatctattccagcatctttgagtgcaagcctcagcgtgttcacaaactgattcacaacagtcatgacccaagttactttgcttgtctgattaaggaagacgctgtccaccggcagagtatctgctatgtgttcaaagccgatgatcaaacaaaagtgcctgagatcatcagctccatccgtcaggcggggaagatcgcccggcaggaggagctgcactgcccgtccgagttcgacgacacgttttc

SEQ ID NO: 13012 - DNA, 563 bp, Homo Sapiens
  misc_feature (552)..(552): n is a, c, g, or t
aacagcttgtccaccgccggccgaaccagaagccttggggtctgaagtgtctgtgagacctcacagaagagcaccctggggctgcactaacctgccccctgctccttcaggaacgaaggcaatggcggccagcacttccctgcctgaccctggagactttgaccggaacgtgccccggatctgtggggtgtgtggagaccgagccactggctttcacgtcaatgctatgacactgtgaaggctgcaaaggcttcctcaaggcgaagcatgaagcggaaggcactagtcacctgccccttcaagcggggactgccgcatcaccaaggacaaccgacgccactgccaggcctgccggctcaaacgctgtgtggacatcggcatgatgaaggagttcattctgacagatgaggaagtgcagaggaagcgggagatgatcctgaagcggaaggaggaggaggccttgaaggacagtctgcggcccaagctgtctgaggagcagcagcgcatcattgccatactgctggacgcccgccataagacctataacggcgnctcctaaaaaa

SEQ ID NO: 13013 - DNA, 416 bp, Homo Sapiens
aatagacactttctgggaagaggcagtgagggatcctggaccttcagaaggtcggttggtgttatggagatgtgactggttcttgcagggatgggttcccctacaagggcctgtgggggcactgcatacttctgacccctgggccctccttccctcccagcctgcacagccctctgcagtggagcacactgcaaagatgggatttaaaagtttcaccaagattgacaccaatcattcactcatccaataaacatattttaagtacccatggtttgtaaaacactcagtagatgtgaaaatcataccaccaaaggaaattttgagattctgttccaaatacctgggacaaaactgataggtccaactagttagtgtctgtatgactttgagtggattatttctcctctcaaaccctc

SEQ ID NO: 13014 - DNA, 778 bp, Homo Sapiens
  misc_feature (600)..(682): n is a, c, g, or t
ttaaactggggccattcatatgagagtttaagaactcagaccagtgacttagattggcttctctcacatggcaagaaacattgctgctagcacttcccgagttctacgttctacaacatccaccactggatcttaacatagacgtaagatcaaatgcaatagcatgtcaaacaatgtgtaactccagttatacaaacattactgtatctcattggggatacgaagctctacacacttgaagatggtgaaggaatataaaaatctatgtctcacagtccagacttggagtacaagtaataagaagaataaaacttaatcccttaagtagattcaccataagttagctcagagcaattccagtgcaagtatggtctgtgatccagtagtatcttacagacagcaagttgaacattgtgggatgcatgagctattgaggcctttgcagctttctgctacatggaggctagggccagagtcaagatttatgctttgcagcacactggtcagctgttttgcaaatcagatataatgatttttaaatgaggctgagagcatgggagatactaatgtgtgtttccttgtgagctactgcataagttnnnnnnnnnnnnnnnnnnnnnnnnnnnnnnnnnnnnnnnnnnnnnnnnnnnnnnnnnnnnnnnnnnnnnnnnnnnnnnnnnnntatctctctactaatggtttttttaaaaaaataaccttgtttcaaaaatattaaaaagtcacaagaaaggtaaacatgtggataaacaaaatgaag

SEQ ID NO: 13015 - DNA, 502 bp, Homo Sapiens
  misc_feature (332)..(332): n is a, c, g, or t
  misc_feature (474)..(474): n is a, c, g, or t
  misc_feature (481)..(481): n is a, c, g, or t
gcggccgctgcaggtccccgctcccctccccgtgcgtccgcccatggccgccgccgggcagctgtgcttgctctacctgtcggcggggctcctgtcccggctcggcgcagccttcaacttggacactcgggaggacaacgtgatccggaaatatggagaccccgggagcctcttcggcttctcgctggccatgcactggcaactgcagcccgaggacaagcggctgtgagttcccgaacctcttcccacccccaccggggcgccggcctgcgcgcgagttgaggcgagggcgcgccctgttcccgccggccccggggaggtagttggcccgntgggtcgcgcccgggccggccgaggcgcacccagcgcccagcgcgctcggctccccgccctgacccgccccgcgcggcgccttcctccattcagctcgggaaggaggagaacccgagggctaggctgggccccgggagagtntactttnttttctgttttaaacaaagtg

SEQ ID NO: 13016 - DNA, 903 bp, Homo Sapiens
cggatgttgaggatcaccgagcccgcgacgtagaagtacgggaagttcatgcgcagctgccaggccagctcgaagaaggcgagcagggtgcgggagagccccttgcagaagacgccgtacgaggttctccagcatttggctcaaggccccaagggcacatgtgacaagaaggcgccggctttttaaacattggaagttcttctgtgtcagttctgtgacagaacatttacttaacacatcatgaaggctagtttggatgtggaggggaatagactccatctatccatatgagctgctgcagaagaatattttgcctgctggaacctgctgtatctactcaagagtggaagttttcacagatgtcagccaggaagatgttcccctcgtaatatcagatggaggagactctgagcagttcctaaatgaggagcgtcagggaccacctttggaaggacagcaatctcaaccctctgctggtgatgggaaccaggatgatggccctcagcagggaccaccccaacaaggaggccagcagcaacaaggtccaccacctcctcagggaaagccacaaggaccaccccaacagggaggccatccccctcctcctcaaggaaggccacaaggaccaccccaacagggaggccatccccgtcctcctcgaggaaggccacaaggaccaccccaacagggaggccatcagcaaggtcctcccccacctcctcctggaaagccccagggaccacctccccaagggggccgcccacaaggacctccacaggggcagtctcctcagtaatctaggattcaatgacaggaagtgaataagaagataacagtgtttcaaatgccgtgaaacatggcatcatgctctaacttcagtataccaataaaacaatcagcttg

SEQ ID NO: 13017 - DNA, 558 bp, Homo Sapiens
agccagcccagcccgggcaccctggggtcttcagcctcatcctgccgctgcaggccggggacacggtctgcgtcgacctggtcatggggcagctggcgcactcgaaggagccgctcaccatcttcagcggggccctgctctatggggacccagagcttgaacacgcgtagactggggtcccgcccgacgtgtctacgtcggctgaagagacagcgggggcggcgggctcctggggtctcgcctgagacggggcacctagccctgggcgagcgccgcacccgggcccgcagcggcaccgcgcccagagcggcctctccccacgcccggggcgcgccggctcagggaggctcggggccgcccatgcagacttttggcctggcgcgatcccccaagaacccctccagggccggcctgcggaggagccgatcctcgcaccctccgctccctccactggccctccaggtcgattccctgggctccaggctcccccgcgcgggcgccgcccaccgccatactaaacgatcgaggaataaagacacttggtttttctaaaaaaaa

SEQ ID NO: 13018 - DNA, 493 bp, Homo Sapiens
  misc_feature (134)..(166): n is a, c, g, or t
  misc_feature (284)..(365): n is a, c, g, or t
gcttaggtgggcaggcaggacgagcagaaagactgagaggagggaaagccgcgtaggtgggagtacagcggcgcgagggtcgagggggaaccctcgtcggtgcagatgaggagggtgggctttcagaactagtnnnnnnnnnnnnnnnnnnnnnnnnnnnnnnnnntggggtcttcacggtgccctgcctcagagcccggctccaccacgcccggaagagggagtctggccgtcggctggctcagggcgggccggttggctgtacccaggctccctggcccgannnnnnnnnnnnnnnnnnnnnnnnnnnnnnnnnnnnnnnnnnnnnnnnnnnnnnnnnnnnnnnnnnnnnnnnnnnnnnnnnngacgagttagggccggggcgagggaggctgtggctcccgacagagacaggggagtagtgtcgggctgaggcgaggtgaggcgcggggtgcctcgggagggttccccgtgccccgaggggggcggccgc

SEQ ID NO: 13019 - DNA, 423 bp, Homo Sapiens
atgtaggaaaaaatattgatttgttgtaccctaaaaagactacaaattagacaatcctgacaaaagagaacatcagtcagattcattggtagaagactctgagatgtgttcttaatttgatgaagctctgaaatgtgatcccacttctgaagtctgtttgcccagggtcgtggaatagttgtctggtgtccctggcagccctgccgcacgtggctgcacgcccttacgatgcttagatgcatattgtttaccggtctcccactgcgcatttctatgacttgcagagtaaatgcttctgagaagaactttgtgttcttgcacaagggacatttatgaaataaacatatttctggccctatacatttgtcttccaaggaaccaaaaccaatccgttgaattagacacgagtaagttctgttaatt

SEQ ID NO: 13020 - DNA, 821 bp, Homo Sapiens
cttcaattcgcagccggtgaccttcgacgagatccaggaggtggaggaggagggggtgtcccccatggaggaggagaaggccaagaagtcgttcctgcagagcctggagtgcctgcgccgcagcacgcagagcctgtcgctgcagcgggagcagctcagcagctgcaaactgaggaacagcctggactccagcgactccgactcggccctgtaaggggcgccgcccgcggggcggacgcgcgcgtccgcggtccgcgcggggaccggcgtgtgaaccccgagagtgcccgcgccctgctcccgggggacccgcaaggacccgggaccgccgctcctcgcgcgctcggactcccgccccgctgcgaaccggtcggtgcgcccctcgccgcgctcgccctggcccgggagcgccgggagcggggccgctttcctcgtccttgtaaatgtttattttttaactcttcccagtgcgaactctgctgtgagtgtgtgcggggaggcgcgcccgcgctgagtcggcggcgggtagccactccatgcccttgtccgatggtttgcaactccgattttgcacaccgctccaccgtgccccccagcgcacacccattcacactcacgccaacactctcgctgaacacttttataattgttaggcgtggccgttgggactttgggcgcagcgcggctgctactgcgtctggaggattgatatttatttttgcattgcgatggctgaaggcatttatttaacgatctttttacctggatatgtctgtgaggctcctgaaaggagacaaataaagtcaatatatttgcccagt

SEQ ID NO: 13021 - DNA, 750 bp, Homo Sapiens
ggggctggtttccaaccttttagagcaacttctctctttcacttcaccaaaaacaaatctaaggtttcctacatgtctccttttacttctaatgagatgcacatggggatgtggcatttcctttcaggccagtttcacctctgaaatccgaccatcccagatcaatgtcaccttctctctggtgccttccctgagtcccagagccaaaaattaatagagaaataacccattctttcctcaatcatcaacaagtgtttcctgagcacctcccctgggccaggctatgtgcatctatctgcctatgcagctgctgtggggacgctgacccctaagctgtgcagacacaccctccttctagataactcttcttgagggtaaaaatggctccttggtcaccctctgttcctcttggaagtcctagaacactgctgtgcatgcagcaggctcaagctcaaaagccaccattgattaaacaattcagcagtgataatttgacaagtgataatcagcctttgcaggaaagccaacacctgattattaacccaagaagtacccatgccatcatgggacagttatgtggcaggaaacagttgatgcctataattcttaactttttaccagggcataacaagttttctgacagggcatctgtgcagatgcagtctgaccaagggatgggtcgctccctgcttcatccttgctgatgtacaagttaagcattccactaaaaggcttatcaagagtgggaga

SEQ ID NO: 13022 - DNA, 303 bp, Homo Sapiens
gtcaggtctgtggtcgattggccgggcccacaacaggtgggtgagagcgaaaagctgaagtcggctgagggggtcatgtccgagtcacgctcatggttaaacaggtcagcagagagcaagctcccgggttgggtcaccggctccccatcctctggttggaacacatcatcctccagctcctccacacactgagatggctccatctctcctgtgagggggcaagcgcaggcatctgggctgctgccccaccagggccatacctggaaggactccccttcccttcttcctacccacaatcacctg

SEQ ID NO: 13023 - DNA, 946 bp, Homo Sapiens
gtaaaacagggtgtcggagccacttggttgggggtcatcaagtggcctgatgcatccagggcatgggaaggtggaatgaagaaggaagacccagtggcaagaggagagcaggttgggcaggtggtcggggtttgatcctgaatgcagaggcgacatggaagggctttgtgcaggggctgctgtgctctgattcacacattacaaagaccattctggaggcagcatggaggctggtcagttgaagaggaggcagagtcctgtgaccaggttcttgtgacgccttctgagggtccaccctcaatggctggtcctcagtgcccccatagccgggagccctgcggcagggggactggcagtccctgcagtccttgccatgcaagaatgggaacaggcaggcctgggcagtactactcgtcctcctggaagtagaatttggtgaccatgacgccttcgtcaggcatattggtgaggctgacgggctggtcagcttccatcgctgtgcagaggaaccaaccggggcaggcggcagactcaaaactggtggtgggccgctgtctgagcggatgaaggcgaagcgcttgtcctgctttctgttctcgctcaggtcagtgatgttaactgcctccagctggagtctggtctcatcaccagacttgacacaggacaggcacatcttccctccatggattcccaagaacagagcatgaggctcaatgggtaccacatctatcttttcttctaaattgacatttggtccttgcaagtatccagcaactagttggttgttcctcagatagaaggtcttctggttaacatcccagattctgaaggcttgcatcttgctggattttctcccagagggtcggcagatcgtctctgaatggaacaggaagaggaggagagtgattaggtgactgcggaggcctctgcagatttccattctggt

SEQ ID NO: 13024 - DNA, 491 bp, Homo Sapiens
gggcctcccacttggttgcggcctctcacttggtggcctcccacttggttgctgccgaactggtccagggtacagttcctttagaggttcctcaggtgaaaccaaagagaactgatgatggcaagggattagggatgcagttaaaggggcccttggggcctggaggaagggggcccatctttgagctgaaatctgtggctgctggctgccctgtgttgctgggcaaagacaacccaagcccgggtccttcaagggattctcagaaacccacttccccactgcagtcagcaggagaccatttggaagaagaactagatctgttgcttaatttagatgcacctataaaagagggagataacatcttaccagatcagacgtctcaggacctgaaatccaaggaagatggggaggtggtccaagaggaagaagtttgtgcaaaaccatctgtgactgaagaaaaaaacatggaacctgagcacacaagtgggagg

SEQ ID NO: 13025 - DNA, 542 bp, Homo Sapiens
caatgctaggacttgatacctggttttctgggatcccctgcctaacttgtgtgcaattgcaagaaagcatatgcgttcacccggagtcttccttccctctcttgctccgtgggagcacaccacactcactgttctgcacctctttgctttttccatttaacagcgtgtccctagagcgcttcccaagtcaaaatataaacaccgctcgttcccgcctttctaccacatggcattccgctgggatacttctacggggaagcttcctgcccggggcatcgagggcgttcgcgtccgtctgttatggcggtgctgctgtagataaccggatccgcgaatgctaacgctcaccaggatgctatatagccttttttatattgcctatcaagcccggaatgtctgggtctagcgggtattgctaagtaggattgtgacagtcacgcccccggcagcggtgtttcaaagtcccctgacagctcagcatgttgtcacacttcaggactgtgccaatccgattgatgaagaaaatagataatcttgtttta

SEQ ID NO: 13026 - DNA, 470 bp, Homo Sapiens
  misc_feature (86)..(116): n is a, c, g, or t
  misc_feature (160)..(212): n is a, c, g, or t
  misc_feature (222)..(234): n is a, c, g, or t
tgcaacttgatgctgaggtcagatctagaggatcccggctccatggttgctctgctacactcccctcgctaagactagtaaaaatnnnnnnnnnnnnnnnnnnnnnnnnnnnnnnnagccatgcgccggtgcgtggtcctccacatgctgagcgccggtnnnnnnnnnnnnnnnnnnnnnnnnnnnnnnnnnnnnnnnnnnnnnnnnnnnnntcaaataaannnnnnnnnnnnnaactgcaataaagtaggtcgttatccctaaagtgagcgagtcccttcctgctctaacgtccagtgcttccttgagatcatggaattctggagagtatctgtggatatatttgcacagatatctttgaagacacaaacactcacctgggacgttggccggagatgtctttttatttttgtgctgtaaaattctcttacagcacaaataggctttaaaacggtcttctactgtctaca

SEQ ID NO: 13027 - DNA, 427 bp, Homo Sapiens
tctgtctcctcctcctccctgtcctggggctgttggtgtctagcaagaccctgtgctccatggaagaagccatcaatgagaggatccaggaggtcgccggctccctaatatttagggcaataagcagcattggcctggagtgccagagcgtcacctccaggggggacctggctacttgcccccgaggcttcgccgtcaccggctgcacttgtggctccgcctgtggctcgtgggatgtgcgcgccgagaccacatgtcactgccagtgcgcgggcatggactggaccggagcgcgctgctgtcgtgtgcagccctgaggtcgcgcgcagcgcgtgcacagcgcgggcggaggcggctccaggtccggaggggttgcgggggagctggaaataaacctggagataatgatgatgatgatgatggagcg

SEQ ID NO: 13028 - DNA, 490 bp, Homo Sapiens
agataaatcctaagaatacttacggtaagcttgacataaccaaactcaggctaaaggagacacaagaggatgacgccctaagctttcagccaggtttgtcagttttaacacacatctcacccaattctgcaagaagtttacaaacaattcaacttaaaaaacattcagaagtactatcattataccctttccctcaatgccatcttacattttagggataagttttaagccaaactataaggctacctggaatgctgagacaacacacaaactcatggggtgcccccgtcacgagactacttctgaaggtcaccagtgagggcctaaacaagactactcgtctcgtttagtataatactctcttatttgatatctacaagattccgacatgagcacgctatatactcagcatcataaacaatctaaattcacaattagtgcaatctgtcgatacccggaatcctctagactcaccgacagcatcagctgc

SEQ ID NO: 13029 - DNA, 485 bp, Homo Sapiens
  misc_feature (450)..(450): n is a, c, g, or t
gggctcttggttgcaggagcatcaaggtcccctgttgggaaagaaacgcctgattcgatctcgggcaacgccttgcctggctcacccactccgctggggccagagtgtcctccagggtctccgccaggcagtccgcagctccccctgagccagccacgaggagacatgggagctgagcctgggtggcgttctctattcgcgtcaacatcttctcatcaccatcaatcaggaggagcaggacagggatgtcaattccagtccctcccacgcccgtcttccgctgtgagatgtaggactccaggcgcaagcggaagcggttctcgccccccaggcagccgtgtgtgccgtcgtccaccaggaagaaggccgagtagttgtagtccaggggaaactggaccccgtcctccgggtcaccgcgccaccggtacctcgcagggaacgagcccttgnggttgatgagggtgtctctattccggaccacaccc

SEQ ID NO: 13030 - DNA, 290 bp, Homo Sapiens
caagctccccaccttcccccactgtggtgacctgtggccacttgcagaagggatggtgcctgacccactgccctagccccacgctatgcaccaaacttgttctccccgtcctggtccagggctggggtctttagagactgacagcctctgccccaggcctgagtccttagcaagggttgggtaaggaggttttaagggagaaggtccagtccttagcccttgaaatacaaagctcttctgacactgaatttggatgcaccttgttttatataataaatcgtgtttcacag

SEQ ID NO: 13031 - DNA, 423 bp, Homo Sapiens
ggcctcctggttgctaccaagacattcaaagctttggcttctgctgaggaaagtaacatcttaccaacctgcagcatgcattaagacttcaggaggaaacatctgaagcattttataaactgtaacatctagagaactgagggaggtatcatcagcatttctatcttcttgggtttctacaaataggcttaatacttggctgaatagttacttttaatctcatcagaagtcccacctctcttataaaaacttcacttctcaaccatcatttctatttcctttctttacaatgggctccatcaaataattgcccttaaaaagttatctattactttctgggttttctctctttaactgtaagtgtcacaaggagagagaaaccattacttaaacacccgtatcaccctcacctgcgcaccaagt

SEQ ID NO: 13032 - DNA, 481 bp, Homo Sapiens
  misc_feature (27)..(27): n is a, c, g, or t
atgagtgtctccgtggtgcccctctcntgcctcatgcttgttgctgtccttggatccaaggcccagttcacaaatgatgcagagacagagttaatgatgtcaaagcttccactggaaaatccagtagttctgaacagctttcactttgctgctgactgctgcacctcctacatctcacaaagcatcccgtgttcactcatgaaaagttattttgaaacgagcagcgagtgctccaagccaggtgtcatattcctcaccaagaaggggcggcaagtctgtgccaaacccagtggtccgggagttcaggattgcatgaaaaagctgaagccctactcaatataataataaagagacaaaagaggccagccacccacctccaacacctcctgtgagtttcttggtctgaaatacttaaaaaatatatatattgttgtgtctggtaatgaaagtaatgcatctaataaagagtaaaaaatttttt

SEQ ID NO: 13033 - DNA, 514 bp, Homo Sapiens
ggcctcattggttgcacccaaaagcactggtgagcccctcggccatgtgcctgctcggatggagaccacccattcctttgggaaccccagcatttcagtgtctacacaacagccacccaaaaagtttgccccggtagttgctccaaaacctaagtacaacccatacaaacaacctggaggtgagggtgattttcttccacccccacctccacctctagatgattccagtgcccttccatctatctctggaaactttcctcctccaccacctcttgatgaagaggctttcaaagtacaggggaatcccggaggcaagacacttgaggagaggcgctccagcctggacgctgagattgactccttgaacagcatcttggatgaccttgagtgcagctccccctataagcctcggcctccacagagctccactggttcaacagcctctcctccagtttcgaccccagtcacaggacacaagagaatggtcatcccgaaacaaacccctctaaaagca

SEQ ID NO: 13034 - DNA, 147 bp, Homo Sapiens
tttttatttaaggatttgtttaatgttttaaaattcaaagcactttaaattattttaagacaaaagattaataaaaacaacattacctttcaaatacaactttataacagcacagtggaagaatggtaaacagtccctctttttttt

SEQ ID NO: 13035 - DNA, 723 bp, Homo Sapiens
aaagttactcttagaggatcccggctcattggattgcaggcatgcacggagaaggatgttctcaagtcctagcctggaggtggccgttctcctacagttagttaaatgtcatacactagtagatcatcgtgtcgttgttcttcctggcgcctgactcctggtccatcctcagacacagtcaatcgctcacggatcaactctacagaattgcagaggatcacatctgggtcagatgttttgcaggagcctgcagaggcggcttcaggttctccctcctcgtggacaaggtctaacaactgaaagcccgagttcccggcggcttctgggttccccggcgtgtactcggactcctggccgctcgaggtggtccccaaggatcggcggctggaaagcacccggtagcggccctcctgccggacctcccgagccgaggcgcggagattacggcggacacgctgctggctgtcccgtgacgggcgcagaacttcccgcaggagaggctggactggttcctcctgggagcacacagtggccaccaagtggaagacattattctccgccgctctctccaaaccctccgacgtcttctgtgccgctgactcgaccgcgtcgctccggaggcgtttacaagcgagcacaagagcctccgccggctccgcactgcgcttccgcttcacccggagtacagcggtcctggcggcctccatagggatcccgaaatcc

SEQ ID NO: 13036 - DNA, 688 bp, Homo Sapiens
taggctacctgaggatccccacactgggtcgagttcacaaatatgacaactgcagatgaggataaagaagtaagttagcgggaagagagttgagccactgaaataatgtcaccaaggtcaatgtagcaaagtacattcatttttattgctagaacagcctctcaaaacctcattcaaatcctctctactcttattcaacatatagtatgcagttacacaatttcccaaccccagggcaaattagagaaagcttcctagaggtaggcacagtaatgggagagataaatgacagataaaagtgagggaaaagaaaaactctaaaaaccatggtagaactcaaagagcaaatgtatctggagccttcagtgtagggactttaacaaaactaagtagggcctgaaagaattaaaaacatatatgacgactctgaaaagatttaattatccccagtagactgtgtttgcaaaagcagagaaatgtatactaaattaagaaatagtttgatgtaaatgattgaaataaagtaaaacagatgtgcaagttaaaagaataaccttgagtttactacaccatgcaccgaacaatgtctgataaacaagtatcagtacatatatactgcttatataatcaccaagtagttcatagaaaaagaatacgccctttttctccctttttattgaatttaaac

SEQ ID NO: 13037 - DNA, 542 bp, Homo Sapiens
acaaagataatattcaattgtaattaaaatgttccgaatatcgtaacattttaaaagtggaaagatgtccttaattgatgatgatttcagtcttgagccgcttatttctgcatttcgtgaatttgagggagttagctaagcaactacaagcccaaatagacaaccaaaatgatcctgaggtgggacaacaaagttaatatgattaaccacctgccgctgatcagccttatgttcccaaagagccctgagtagtgctttggtgttcacagtctgtttttttgttgtaacttatattttttaatgctgatgttaactttgtcaaactcttgttttgagctggatcattttgtggatgccaaatgaatatcaaaactgaaaacacatttgttgatatttgtcttgctgtccagattgcggtatttttcagtattaagttttcaatgaactgtgtcacctaagtaagctaccctgctattcgttgtttaaatatatggttctctatttgagtctgtgttttcaataaaattctatgttaaaattgg

SEQ ID NO: 13038 - DNA, 409 bp, Homo Sapiens
tgcacatatactttaatacttaggcttgggtaaaatcattttaaataacatattaaaatatgtttcgggggacaacccagcaattgcacagcccactagaaaattttaacatctaagtaatataactgttttagggtctgaaagttctccttcagttgttccacagcctctttatcaactaggcaaatatatttaagcttttaaatttcataatgttggtattttttaaaaggcacgggaggttcacttaatattaaatatataacattcactttcataaccaaaacctttttggcaagtgactttcacatagattatgagattctctacatgccttaaaataaatctggcagctcttaactcatatctaaattctctggacaactgtcttgctctctgttttggggcc

SEQ ID NO: 13039 - DNA, 355 bp, Homo Sapiens
ccaacctgcgcttctctcccatctcagctgcgtgaccacggaaactcactggtacagtggggagacctgtaaccagggcacccagaagagtctggtgtacggcctcgtgggggcaggggtcgtgctgatgctgatcatcctggtagctctcctgatgctcgttttccgctccaagagagaggtgaaacggcaaaagtacagattgtctcagttatacaagtggcaagaagaggacagtggaccagctcctgggaccttccaaaacattggctttgacatctgccaaggtattggccttcctctctgaactcagaatggctcaaaatgtggaaacaggctgggtgcggtgggctca

SEQ ID NO: 13040 - DNA, 602 bp, Homo Sapiens
  misc_feature (488)..(558): n is a, c, g, or t
agtgtcactttccttgggcttcccaaatgtggggatagaggcataaccccaccccggggtctgtggttgggtttgtttaatagctgaaacaggatccctggtgatgctactatgctgcttagttgtcctgacacattatttttttcagtgttaatggtatgtcatatttttactgtaaggtacttatggtatgaataaatgtaagaaaacaatggcctattgttagcatgtagattaagagtcaggaatgatgactcttgttgacatgggtggctgagatagtgacacctttgctttctgatggttcagggtacacaaactttattacaggcacaaaattatcaaaaatacggtataaaattaccttaaggctatgtatataagggatgtgtgtatgtgtgtatacacacaaaaataaattttgtgtttccacttggatcccctccctaagataactcattgtgtacatgcaaatattagaaaatgcnnnnnnnnnnnnnnnnnnnnnnnnnnnnnnnnnnnnnnnnnnnnnnnnnnnnnnnnnnnnnnnnnnnnnnnctattttatcaccattttcatgctgtattaaaatgaaattgcca

SEQ ID NO: 13041 - DNA, 372 bp, Homo Sapiens
agcctctgtctcaggacattccagaaggacaaggagatgtctctccctctcccaaagcaccagcgtccctgcctcccgtgggccctgtccgggttgccctggtgaccccagcctctgtccacttcctaacccagggaccctgcacagccagaacagcctttggccctacggatggccactggctctggtcttaagtgcctgggcttggtggccatcaagagggagccagtcaggcctgtgagggccgtagaccttgtatataccctgcaccagcagtgaccggggagagcccaacaccctccacgggggtcccagcacccacttttctaatcatgaatgaacaataaagcccacgctctttgtcgggctcca

SEQ ID NO: 13042 - DNA, 749 bp, Homo Sapiens
cttcatgggggacacggactcgacgggaaggggaacttggcatttatggacagatcctcatccttcttgctgtagtcaattacacgcacgttaaccgtgcagccgccctgctgtattttaggcggttgttggcactcctagttgggcccttccctggcccctcacagcagggcctgcctcctgtggacgcttgtgtgctgccctggcaccggccactgtgttttgcataaaggagaggctccaaagatgttggccaaaggaatgaagccttgagagtccaggctttctatttctgagacactctactcaaggacttcccagatgcaaagcttcatctttgagcaaatacaaatatggagagggaacattaactttctgaagaaaagaaggaacatcttttcaaccttttatattgagttaacaccatggtcctagtttttgtgaaagcactttaatacatccaactagcgggaggaatacaagatattcctacctttttattattattattaaaagagggctaaaccatgttgtaaactacttaagaactgaatgttcaagttgtacagtatattggccagattccttactgcccactaggcttgggagcatgttttcagctcagttttatgaatgttttaaatttgtattactgatctttgttatagccaattagcaattcaaaatggtaatttttttagcagtaataaatataccatcccccaaacagtacaataaactttatttgt

SEQ ID NO: 13043 - DNA, 668 bp, Homo Sapiens
aggtgtggctaagcaagggttgcttacgattaagttatctgctcagtagagaaggcttctttgcatttgcaggaaatgagcccactatgaaaaaagaagagcaagcagagatgacatacaaacagaaaaagagtgagtcctaggaatgctgaattctgtcccaaaaagggaatacggtcatggttcctggtatacttccttcacttcctcaagtgacctgcaatatctcagccacatgggccaatgaattccgacttgtttcagtgagtttaagttcggttcccaccattttcaatggaaagagtcctaatacatctgccatactaagaactctgttttatgtggtaaggcaatgggagctggagagaaactttaagacgtgaaatatgtttaagcaggtgagcgatggatcaaagtgcactagaaaagcagattcaatgggcagtacagaagatggattcgaggaaggccacttaggcacttcttatgcctttcaagaatgtggtcctttatctttagagaatttctgactaccaaaatagtccagcaaggcccagctcactcgacacctcttttctagtgcccttctgatctcaccagatgccatgaatggtcctttgttctgcattcccgcagcacttcacttgcacctttgacatcctagttcg

SEQ ID NO: 13044 - DNA, 804 bp, Homo Sapiens
atgtctacagaggcctttaaaaaggcttcttataaattctctggaacctagaaagccacaacaagtgcaggggtgtgcccatattcaaggctgtgtgtatgcccaagaaagacctgacaaggccctgttttctcacctctgggtgaccttgagtttctgcataggtaggaaggaaaagctaaggctgactgcaaaccatcagatcgttgaagacatgcccccaatacatacacaaaaccaattggcaaaagccgggagacttattggccaatacattcaagataatctttgtttaattgtaagttgatcactattgtaatccaccagggacttcagtgaactacagatgacaagaataaagacttttcagaatatttcattaaaaaaagatgacaccaaaatcaatgaactgcaacaacaagccatgtgaaagagaagaatctgatttttagagtttctacattatatgaaaatgtccaattgccaaaaaatgtaaaagacgtgagaagacccaagaaagtgtgactcataagagagggaaaaaatagtcaaaagaacctattttatgtatttaagaagtgatggaagccatgtctaaagaactaaacgaaagtgctttttttcctgaataaagaaatcagcaaagagataggaaatatttttaagtaccaaatagaaattctggagttgaaaagtatagtaactgaaatgaaagtaccttcatggactcaacagtatatttgagcaggcaaataaataatcagttaaatttaagatagattcatagagattatccaatctgat

SEQ ID NO: 13045 - DNA, 260 bp, Homo Sapiens
atcagagtgggcttgctggatcatgtaatacagaagcgggtggtccttgtggctatcttcggtaaccactagtgcacctggatggggacaggtgcatgaatgggcccatatgtggacccacagagctggttctgtcattgtccccttgagagcagtgctccccacgcctagtttacagccatccatagcatgtaccgcagagttctggactgggctttaaacactcgggggaggaatcaataaaacagacaagactgtga

SEQ ID NO: 13046 - DNA, 691 bp, Homo Sapiens
agcggcaacagcggcagcagcggcgcagggcaaaagcgcgaggacgtctcagccgggcgaagactgcggcccgctgcctgaggccggccccgagccccgcagcgatggtgccaagccgggcccgcgcgagggcaagcgctcctactccatggagcacttccgctggggcaagccggtgggcaagaagcggcgcccagtgaaggtgtaccctaacggcgccgaggacgagtcggccgaggccttccccctggagttcaagagggagctgactggccagcgactccgggagggagatggccccgacggccctgccgatgacggcgcaggggcccaggccgacctggagcacagcctgctggtggcggccgagaagaaggacgagggcccctacaggatggagcacttccgctggggcagcccgcccaaggacaagcgctacggcggtttcatgacctccgagaagagccagacgcccctggtgacgctgttcaaaaacgccatcatcaagaacgcctacaagaagggcgagtgagggcacagcggggccccagggctaccctcccccaggaggtcgaccccaaagccccttgctctcccctgccctgctgccgcctcccagcctggggggtcgtggcagataatcagcctcttaaagctgcctgtagttaggaaataaaacctttcaaatttc

SEQ ID NO: 13047 - DNA, 819 bp, Homo Sapiens
  misc_feature (519)..(519): n is a, c, g, or t
  misc_feature (606)..(606): n is a, c, g, or t
cagacgacgtgctgagctgccagcttagtggaagctctgctctgggtggagagcagcctcgctttggtgacgcacagtgctgggaccctccaggagccccgggattgaaggatggtggcggccgtcctgctggggctgagctggctctgctctcccctgggagctctggtcctggacttcaacaacatcaggagctctgctgacctgcatggggcccggaagggctcacagtgcctgtctgacacggactgcaataccagaaagttctgcctccagccccgcgatgagaagccgttctgtgctacatgtcgtgggttgcggaggaggtgccagcgagatgccatgtgctgccctgggacactctgtgtgaacgatgtttgtactacgatggaagatgcaaccccaatattagaaaggcagcttgatgagcaagatggcacacatgcagaaggaacaactgggcacccagtccaggaaaaccaacccaaaaggaagccaagtattaagaaatcacaaggncaggaagggacaagaaggagaaagttgtctgagaacttttgactgtggccctggactttggctgtgctcgtcatttttggacgaaanatttgtaagccagtccttttggagggacaggtctgctccagaagagggcataaagacactgctcaagctccagaaatcttccagcgttgcgactgtggccctggactactgtgtcgaagccaattgaccagcaatcggcagcatgctcgattaagagtatgccaaaaaatagaaaagctataaatatttcaaaataaagaagaatccacattg

SEQ ID NO: 13048 - DNA, 408 bp, Homo Sapiens
  misc_feature (148)..(158): n is a, c, g, or t
gcggccgcagctgcgcccccggccgcctcgtccttgccgccttcgccagcgggcgcctcagcctcaccgccttctccagcctccttcttgttcttcttgaaggagaagccgctcagcttgaaagacttcttgaaggaaaagcgcttcnnnnnnnnnnncggggtctcgttgctgggcgagggcgtggccccgtcctcggccttgggcgaagaagtcgaggaggcggccgacgcggcctctccctccgcggccgtgggcgagccgggctcggcagcctcgccttccgcgggggcctccttctctaccgggctggccccggcctcgggggcagcggcggctgccggctcacctttcgcggccgcgaaaggcgacgccgccccgctcccggcggacgagggctcctccttg

SEQ ID NO: 13049 - DNA, 510 bp, Homo Sapiens
taaaacccgaaagatggagcctcaggttcgcgctctgcgttgcgggtgctggaaccgagattcaaaaagagcttccggaggttccatacaagtaaatccgaaaaaaagtgtgtgtgggggggtccacaccactaattattatggcgaggaagataaagaagacatggacagaaggcggatggctctgcggcctggctcccgcagaccgaccgccttcttcttccattcgagatggctcgtaccgaacctccttgccttcttcctgggtctctcgggggctggaccaatacatctgccgatgccctggccgaatggcaggcgacatcgggtcctggacccccacacgcagctcagtacccacgaggccccaggccgctggaagcctgtagctccgcggacgatgaaagcctgcccgcaggttctcctggagtggtgagcctctgtcggaagggggcgcccacgtctttttaatggtcctaacacaccagtggaataaatcacaaagattcc

SEQ ID NO: 13050 - DNA, 546 bp, Homo Sapiens
acattttattcatcagttaaaaaaatgaagcttcccaagtggggaataaaagttgcttcaaaccaactgggaggcttcctaaaaaaaatcgcaggcaccagtgacaagtgggaaaagctggagaaggacattctggaccacctccccgctgaggtacaggaagactacggccaggactacatcttagcacagcggaatttcctcctattgatcaactcgttagccagcaaggacttctctccggtgctgcgggacatccagcatgctatcttggcgaagagcccttttgcctattacacgccagggaaaggcgcttacttgtggatctgccttgctcactatttgcctattggcatatatgattactttgctaaaagacattttggccaagacaagcccatgcccagagctctaagaatgcctaactacaagaaaaaggccacctaggcaatggaagccctcaaagaagtcggaatgtcatagtcttgaaatgaaagggaaactgggaaactgggtttctcattaaagttgtttccccactcctgt

SEQ ID NO: 13051 - DNA, 413 bp, Homo Sapiens
  misc_feature (90)..(175): n is a, c, g, or t
gctgaagcgattctcctccctcagctcccgctgagactacaggcttgcgccaccacacccggctaatttttaaaaattttttgtagcgannnnnnnnnnnnnnnnnnnnnnnnnnnnnnnnnnnnnnnnnnnnnnnnnnnnnnnnnnnnnnnnnnnnnnnnnnnnnnnnnnnnnnccagagtgctcaggttacaggcatgagccgccacacccggaccgcttcttccatttcacagctaaacaaagggaagctagtcgagaaagtcccagagtttggaagctgtagtggtgccaaagggtgcgagctaagagggttgttattagtctcataatctccagcacccctaccccccatataaataacactttctcaactttctgtaaaatgtaaataaagacaatttttaaaacgc

SEQ ID NO: 13052 - DNA, 565 bp, Homo Sapiens
tcgttgtattttaagtttcagctggaacttcttgtaagggccaccagttaaggtggggtagtcccccagtggggtcaaactaacctggcttcgaagatgaagtcccttttcatttttcctccttcttccctcctcactccataggcccaagtctcctaggggcttggtcctagggtgggaaggggctagggaggaccaaagggatggtattgagaagagagaaagaagatagtgagatttaagttcctgctgcctgggtaggccccacaaggcctggtctgggagtatacggaaacaaaaatgatcctcagtgcaaaatgtcttgtgtatttctctgtgaatccatgggtctggctagagggcccaaagcttgtaaatatggggatagtctgggtcagacccatctctcccttacccatcttgcttccaagaccatttgtagtgagcgagtggatgctgtgctacgtgtgaaatctgtctttgcggggcctgtctcagtgattcgcttttggtatttgtttgtagctttcctggaagtcaaataaatgtttcccccactccaaaa

SEQ ID NO: 13053 - DNA, 406 bp, Homo Sapiens
cctggtgtgggtggcctatggctgtattctatgttacttgtcggtccacctctttcctcctgttccccgcttctgtgggttgccagggtccagcacagtgatgtgaatttcaccggagaatcaccagagggttagagagatggaccagggcagggcccaagggaaaggctgcccaggaggggtcaggaccagcaagatacgagaggagtgaagtggcgtaggttgaaaggcggaagggcgggcccctaaggctgggtccaaacgaggaggctgcggaagggaaagtgttattggactgggcagagcagctggtgggcccgacggatagacatacactgccagcccggagtggaaagaacagtttgtgctgtgctttattaaaatgtgcatcattcttttaaaaaaa

SEQ ID NO: 13054 - DNA, 773 bp, Homo Sapiens
  misc_feature (596)..(633): n is a, c, g, or t
ggcctgcctctgccaaacactgcaggaaactcattcacctcctgaggccagcccatagcatgtgattccagattcctgcggtccagcctccaactttggttgccagctctttcttattctactacacaagccgccaactcaactgagagctaaagagactagaaaagagataagctgccaactcaactgagaacaagaaactagaagagatttatatataaagcttcttccttctcccagatgcaggatgttttcaaccagtaaattttatggctgttggtgccagagaagagtccttccttctctacatccaggggccttttctccaataatgtgcctttaactctagggacctgcctcacggactttaagggaaaaacctcaacctgaaagatctcttcctttcgggagctcctttaatcttcccagcaggtttttgccttagacgtgctggccccaggacagtgatgaagacagagcctgtctcagctctaggctgtggggatcaatgccatcagtccctgttattgagggattatcccttagccaacattcctatctgtgggtgggcgtggaaagtgtatctttttttgggnnnnnnnnnnnnnnnnnnnnnnnnnnnnnnnnnnnnnnttaatagttctgtttgtaaactcttttaataaaagttgtgcctcaccatacttgaagctcccaggacaagggttgagaggctcaacccctctttcagcttctatgtggtgttggaggtgctggtatcgtgttcacacaag

SEQ ID NO: 13055 - DNA, 581 bp, Homo Sapiens
ctcatccctcctcttcctcttctctagctgcacacttcactactgcacatcttataacttgcacccctttcttctgaggaagagaacatcttgcaaggcagggcgagcagcggcagggctggcttaggagcagtgcaagagtccctgtgctccagttccacactgctggcagggaaggcaaggggggacgggcctggatctgggggtgagggagaaagatggacccctgggtgaccactaaaccaaagatattcggaactttctatttaggatgtggacgtaattcctgttccgaggtagaggctgtgctgaagacaagcacagtggcctggtgcgccttggaaaccaacaactattcacgagccagtatgaccttcacatctttagaaattatgaaaacatatgtgattggagggtttggaaaaccagttatcttatttaacattttaaaaattacctaacagttatttacaaacaggtctgtgcatcccaggtctgtcttcttttcaaggtttgggccttgtgctcgggttatgtttgtgggaaatgcttaataaaaactgataatatgggaaaagatg

SEQ ID NO: 13056 - DNA, 534 bp, Homo Sapiens
gccgtgctgtccatcaccgctgccaatatggccttcaccttctcctcggctgacctggtggtgtttgctgagctgttttggaacccaggggtgctgatccaggctgaggaccgcgtcaccgcattggacagaccagctccgtgggcattcactacctcgtggcaaagggcacagctgatgactacctttggcccctgattcaagagaagattaaagttctggcagaagccgggctttctgagaccaatttttcagaaatgacagaatccactgattacctccacaaggacccaaagcagcagaagatctacgacctattccagaagtcctttgagaaagaaggaagtgatatggagctcctggaagcagcagagtcctttgacccaggaagtgcttcaggaacatctggaagtagttcccagaacatgggagacaccctggatgaaagctcattgacagccagtccacagaagaaaaggagatttgaattttttgataactgggacagctttacgtctcccctgtaaaaggggc

SEQ ID NO: 13057 - DNA, 881 bp, Homo Sapiens
cctacgtttacccaacactcttagccaggaggagggtgatcagatctgtatgtaccatatccggaaaagttgtagctttcaagataagtgccatagagttcatttccatttgccgtatcgatggcaattcttggatagaggcaaatgggaggatttggacaacatggaacttattgaagaggcatattgcaatcccaaaatagaaaggatcctgtgctctgagtcagccagtacctttcactctcattgtctgaactttaacgccatgacttacggtgctacccaggctcgccgcctctccacggcctcctctgtcaccaaacctccacacttcatcctcaccactgactggatttggtactggagtgatgagtttggttcttggcaggaatatggaagacagggcacggtgcaccctgtgaccactgtcagcagtagcgacgtggagaaggcctacctggcctactgtacaccggggtctgacggccaggcagccaccttgaagttccaggccggaaagcacaactacgagttagatttcaaagccttcgttcagaaaaacctggtctatggcacaactaaaaaggtttgccgcagacccaaatacgtgtctccccaggatgtgacgaccatgcaaacctgttggaccagagtgggaattaccctgtgggtagaagcttcgtgatgcataattagaaggctgcctgttgtgatctgcgatgattctctggagaagacagactctgaaggcgagtctagacttgaagccaacccatccgtttgtcttttctgtggaatcattgagtcatagacttgaattttttaaatgttgaaataatgaaataatgatggaattaccccaataaaaactcatgtatttt

SEQ ID NO: 13058 - DNA, 626 bp, Homo Sapiens
  misc_feature (157)..(157): n is a, c, g, or t
  misc_feature (277)..(277): n is a, c, g, or t
  misc_feature (438)..(438): n is a, c, g, or t
  misc_feature (523)..(523): n is a, c, g, or t
  misc_feature (574)..(574): n is a, c, g, or t
  misc_feature (595)..(595): n is a, c, g, or t
tagctgtgaactattggatttgagacaggaacagaacaaatcagagggccaggggagggttgtgggggagacagagtggtttaaataggggaggaggggaagttcggtgatgggggagggaggcaggtatttacaagaaggctcagggggccagagntcatcttggaatattttataacaatataaataagattctggtttgcttttccttttcgtctcgtaaaggagagagaagtgcagagttcgattctgtacaagggggcagcggcagaaggcngccgggcgggtcactgggcgtccacccggaaggagcagcagcttctcggaatgcatgttgttcagggtccgcagtccggcagcttgagcagcagcttggtgaagcgggaagtctccaagggccggttcttcagcaccagagcccgaagagcccgcagcagnttcttcctggagctgctccaccgaagcggaattcttccatgcccgaacggttctgcagagacaagcaccaccgccgtgaagaggnccagcttctcctcgttaagcgccaggaattgagcttctcgctgaattgaanatggcacttgagcaaggtttnccatgcccatggagccaagctcctttaagct

SEQ ID NO: 13059 - DNA, 368 bp, Homo Sapiens
  misc_feature (239)..(323): n is a, c, g, or t
tgggttgaccgtgggcttgggtttttgaacaagaaaaacagtatgacctaggacagggaacttgatctctgtaatcctcagtctcctaagtctgtaaaagaaggataaggatagacttgacttccacttcaacgagaagtgaaacgagatatcctaccactgcgctttgcacataaaggctctataaatgtcagctgtcatcataaagagccaaaagtggcatttggagtaaatctgannnnnnnnnnnnnnnnnnnnnnnnnnnnnnnnnnnnnnnnnnnnnnnnnnnnnnnnnnnnnnnnnnnnnnnnnnnnnnnnnnnnntgggctcaagccatcctctcgcctaagcctcacaagtagctggga

SEQ ID NO: 13060 - DNA, 780 bp, Homo Sapiens
gaagatttttctctccggatgaccaggcgtagccaatggattcgggccgggtcttaggtaaagtcttgggaaattttggggcatgggtcggccaagtctacatgtcccaatatcaaggacaaacaccctagcttcttagtgaagacaatgtacaggtatccattagatcaagactacacggtcttatgagcaataatgtgatttctggacatgccccatgtataatcctcactgatgatttcaagctaaagcaaaccaccttatacagagatctagaatctctttatgttctccagaggaaggtggaagaaaccatgggcaggagtaggaattgagtgataaacaattgggctaatgaagaaaacttctcttattgttcagttcatccagattataacttcaatgggacactttagaccattagacaattgacactggattaaacaaattcacataatgccaaatacacaatgtatttatagcaacgtataatttgcaaagatggactttaaaagatgctgtgtaactaaactgaaataattcaattacttattatttagaatgttaaagcttatgatagtcttttctaattcttaacactcatacttgaaatctttctgagtttccccagaagagaatatgggatcttttatgacatttttgactcatttaataatgctcttgtgtttacctagtatatgtagactttgtcttatgtgtcaaaagtcctaggaaagtggttgatgtttcttatagcaattaaaaattatttttgaactg

SEQ ID NO: 13061 - DNA, 463 bp, Homo Sapiens
agtctagaggatctccgtcaggttgtgggatagtgggaaaacaggtgtgggacagtgaacgaaaccatctttctccctctactcacggaactttctgtctattaaggtgacaagaactgaagggcctggctcaaccatatgcgtttgatgagcagatgtgtcctgctgtagaccacaggacctgtttgccgccttgtccccaggttcgttgactgtgaaatactctggaggctggtaccatcaagctcagcctggaagtcacatggagccccttcgacaaggatgaccagccctcagctgcttcttctgtcaacaaggcctccacagtcaccaagcgcttctccacctatagccagagcccaccggacacaccctcacttcgggaacaggctttctataaccatgctgcgcacggcaggaggagctggcagaatgggcacagccatggtctgggtacgagctc

SEQ ID NO: 13062 - DNA, 433 bp, Homo Sapiens
gaggagtataatggtgatcatcatgggtggagtttttcaaggtctcagccagggcaccctcgctcacctcccagcttagccaccctcagctcattgctctctttcctgcctctagtctcctgactcacaggtgcataatccaaactcaccctaaaagacactcctggggaaagagaggtgagtgtcttcaggccaagaccttctcaggggtctctcctggagattctggagtcagaggtatgtgcttccaaagaagaagcattgagatttgtagtaaagtgggaacctgttgaccagccaatatagcccctggggcaactggaagggtgtgttggggcatatggcaaggccgaagctgaagcctgccagtgggaggaccacagcatccctgcaggggcccagtggagcaagtaatggtgagctggctgcagaa

SEQ ID NO: 13063 - DNA, 454 bp, Homo Sapiens
agtgagatacagcttgggcactggaccctgcactgtacttgtttgtttaagcctccaggcctttgcaccactcgtccccctgctgaaatgccctttcctgcccctcagtggctcagggccttatccttttgggctcaggtgcactctaccatgcagttcatgtgcattcgcctctcctagccctgctcgtgctatcttgaggttttgtgtccctgtcccttaccactctacttggcggaacctctttgcgcgcagggctcaggtctggttcaccgccggtctcccaccacacagttgcacacaggtctggcacacagcaagcttcaaaagaatggtgaaaggatgaatggaagggcagggcagggtgagatgtgggagcacccagggtacatagtatctgcaaatgcagcctagtcctgccacgtggaaggctgcatggctaagcacgtcaccg

SEQ ID NO: 13064 - DNA, 463 bp, Homo Sapiens
  misc_feature (56)..(56): n is a, c, g, or t
ttcttaatttcatggttctttaaatattataaacacagagtcaacatagaatgaanttgtatttgttaaaatacacacattggaggacaagagcagatgactacttttcgaagtaatgctgctccttcctaaaagtctgttttcaatcctggtaatattaggggcactgcggcacctaagaagccttaaatgagagctaatccaatctagagagcgatggtgtcagcatttcggtctgcatatctgtgtgtccgtatctgcgtttgtgtgcgtgtacgtgtgcccctgtgtgtgggcccagttttcaggcatgtagaataagcatggagtcatattgaggaggactcacttcttgaagatatgcttgttgctttacaacatatgtaagctattctttagcataaatgcattcattctttaataaaaatatgtttgcattaataaagctgaggagtttcattat

SEQ ID NO: 13065 - DNA, 922 bp, Homo Sapiens
ttatggattgtgatctgatcacctccacccttaacagcaggtggagattcgggccacatcaaagtcaggcattacatagtagacattcacccattcctgatcctctgacaccaccgtgctctgggggatggggtcatagtagatggctgtgtactggcagtcaccttcctcaacgttgtatgctccagacggcacagaatatccttggctctctcagcatctcgagcggactggcccaacaggaagacagtaagcgaaggagtcttttggcttcttggaaatgtcgatgacctccttaagtcggggcacacccagcgtcacattcttggcagacacaccatgcatagtggaaggtattcaaggtcatcttgggtggcagagttctccaagggactgcgcagccagagcccccaccatttccccgggatgcgcaatggcttggttgaacttggactcaatctccccaagcagccagtcgaaggccttccccactgagccgaaactcctctgccatgcggcgggaacacaacgtggaccgcaggtggatgttgaagagcagcgtggcattttcctgggcctgtcgacttagtgggtcatccccattcacaatcaccagcttcttgctcaattccttgactccctccaccactttgatggggtgcaggtcggagggaaggcgtgggttgatgtggaagattttctgagcattccagatcatccgcggcaggttacaggagtcacgaccttgctgtactgacaggttgggaagatgaccctgagcacctcccgatcattccggatccgctcaaatttaccgctacaatctcggtgctggatgtgtgcagttagctcagcacgtcattcaccaggtcatccagacaagagtgcgacgcaggtgccaagatcgggatactctaggagt

SEQ ID NO: 13066 - DNA, 339 bp, Homo Sapiens
ccccgactcttcgggattagcctttgtggttgcacccgccgcggccacctgcaacgaatttagctcggcttaggccccgcagctcaggttccgcggccacgtcacgtgacgcgagggcggggacgcgctcgggagcgagcgtgggagcctggaagcctcggtgggtcccgaggctgcagcgaggccgggaccgtgccctctgctggcgggacctggcgttttccggcaccccgccccaaatcccggactcggtgttaagggaggtgcattgtcctgaaatgcttacaacagctgtcttcaataactcgtgcatagaatgcgcccagtaaatatgtgttg

SEQ ID NO: 13067 - DNA, 384 bp, Homo Sapiens
agctatggaagcaacatcatagacgtaaatgactgggggaaccttttccctaagtgttgtggttgcaagccacacaccatgtattcaacatctctccaactctcctcatcgtttcccagagctgaaagtaagatgagcacgaagaaaccatgtttagttaagaacatgacccgaagagtgaaaggtatttcctgttccaaataggagcccagtctgcattttctactacatgatttagtagaaagacacattgcatttgaaccatatttcttctgctagccaattccatcttatctacaactttttgataattattttgagaaatagatctagatcacagccttccaattcctaggccaggatactttccatttttctaaactt

SEQ ID NO: 13068 - DNA, 559 bp, Homo Sapiens
ggcacgggctttaaccggaatccatttctctagcatgggaccattgagcttcagatgactgtgcaacaaggtttcagccagttccaggtgaaggcaccacccctggccatcaggaagccaccctgcctccactagacagagtaaggacagatgggaaactggctgttctaacaacaaatcagactgattgcgggttaaatattcatttgcaactttgtaacttcactccacaacctatcagactgactgcaggccgagtcttcgtttgcatggaagtagaactttgtaatttcatcctagcctctgattggttgctttgtgcaaccaatcagatgtttgcacaggagtgtgacctttgtaacttcacttcagcctgtggttcatgctgtccgcatccaatctgagacatgaggtgaacataaagtggccaataggaaacttctagggggtatttggacccaagaagattctgtatccgagcccttgagcccctgcttgggtctgctcccacacagcggagtgtacttttgttttcaataaatccctgcttttgtccttt

SEQ ID NO: 13069 - DNA, 726 bp, Homo Sapiens
ggaaaaggggtcactggatgccataagtgtgtttccagagctctcagaggggcagagtggtcagatgatgttggaaaggtggagacagtggaaactgcagcagcacaatgcagtcagtgtgcctccagtggacacccggctgagaggtcactgggtctctgccgcctgcactggactgacccaatacagctgacctcgtacacacataattcgggagatcctgctagggcaaggtggtattctaggaactagggttacagcagagtgcagacagaggaggcatctcatttagtcttcacacctaggaggtagatgctagagctcaccttacagagggggaaactgaggctcagtgtgagtgatgtattaatactctgtgtcccagggctagcaggtggccgtggccccagccctcagggatggacctgccagcccctttccaggcgttggcacccaagccaggtatccaccaggtatccacacttactcatgccactagtcatgctgggctgggaacacgtccaggctcctgggagtctcggagggttcaccagaagtcactgagtgctactcctgcaccagaatgggcttttctcaaacccctccctcacacagtgcccaaagcctggcctgggccagcaccagcagttccagggtgaatcggagtggaagctggggtctgctgggggaggcaggggaaatagcagaccccttcatctggaggca

SEQ ID NO: 13070 - DNA, 315 bp, Homo Sapiens
atttatgccatgcacattgcacattgcctgccagataagagtttcataaatgaggctgggattacagctgtgagccactgcacggcctccatgcggtcgtaacaccatgaggtagccacgttgggcagcttgtgcgttgtcagggagacactcttcctcagcccctgggcacctctgttgaaaacttcctggctgtctggcaggctggaaatcagctctatttgttttgccctgaagatatgttttatttataactcattctgactctgtagaaaataattcaataaaaactcaattggttttccactagccctg

SEQ ID NO: 13071 - DNA, 540 bp, Homo Sapiens
ctctgagaggggccttgagtgatcagcacccctgtctgtactgcaagaaggggtctgagatgtacggacctgattcagatggaatgggcaaagtggttatgcacattaatgtccaaggtgtatgcctgtggtcacttacaactgtgcaccttgattgtccaaacgtaagcgtcttatggagagggcactccctgccggaagggaaaggaagattgggggtggagtgtggcaggggaggcttccatgtctaatacacaggaaccgggacaaacataatcacacgcataccaggccaggaaaaagggccttggtgatcagcacccctgctgtactgcaaaaggggtctgagagtaggattttattcagataggttgagctgtgtgtagttatgcaaatccatgtctaaggtgcatggttgtgttcacttaacaattacgcaccttgactgtccaaatgtgagagtcttatggagtgggcactccctgctggaagggaaaggtgagactgaggtatgtggagagaccccccttttcgagcgtt

SEQ ID NO: 13072 - DNA, 501 bp, Homo Sapiens
tcaattctcaacctactaagttgaaggtgatggtgctatatctaagtggcagacagagataagggataggtgtctacaggggcaagatttggagccaggagaagaaatgagctctccaagggtagtggagagagatctgggatgttgggggctggcaggtaaatgctttaagtgatagaataggaggaatgagaaagccagcaaaagaaattcacgtcccatgtcttccatcatctatatgtctgacttgtttaagtggtcctggattcaccaaattttatagagctctgcctctgcctttattgggtaggcctgatttttgatgatgtccttaaaaggctagcctgattcttcttgtagttttgtagaacactttgtatcgagagttctctgataatgaaagtggtattacagaataatctgcccccgaaggactcctgattttgttaaagtgatacctttctctgtaaataaatgatggcgtgccacttaaaaaaactg

SEQ ID NO: 13073 - DNA, 541 bp, Homo Sapiens
aaaaagggagagttcaggacacctggtccccagctccccattgcctgggtcatcagccctcaatttctccttgtgcctcccctcttccaggtgccaaatagccataacctcgtcgtggaactgttatgtggcctctctgggttccaggtttcctggtcaagcctgggaatgccagggaggaaaggggggctggctacagcgaccctgggcttaggcaaggggaacatttgctccctggagaggcaggtcctatcctgtgctgccctgtctgcccagcccagggcgatgcctggaagcctactgacattgcagggagtcagcctcgcccccaccccctactggttttccaatgttttgactggagggcaaaattttactactactcatctttttggagaccagggctgccctgctggcagcctgccttcataagtgaaatcgactctgtttccaccactttaaccccaaacttggggcttggaccaagcgaggtgagaccacctcccccaggtcccctacctgcaagcatgggatcctctaa

SEQ ID NO: 13074 - DNA, 203 bp, Homo Sapiens
tggcatgcacctcaggggttctgagggatgagtaggagtttcccaggtagatgggtgttggaaggctattccaaggagagggatgaaaaataaagcttcacaaagttgttcaggactggaccaagagtaggagtcaggggagaggtagaagtggctgctgagaaaccaggcagatgtgagatccaaataataaaacccagatt

SEQ ID NO: 13075 - DNA, 391 bp, Homo Sapiens
aacgctctggaaggaggggacgatagccagaatgagttacagagcagcttctccttccctgcggaggagctgtgtgtggaggcagatgtggttgagagaaagatctacctccacctctgacctggaaaaggaacctgcctcagtctcagggacagcaaagccctctacactggggacagtagaccggaaaaagacagaagcggctgtgaccaacagggcgaaaggctgggaactgggggaggatgggtggctggcatccttctccttgcagcctgctgggacatcctggaggtggagacagctgcctgaagaagattgctccagggcttggcctgcgagtgaaagggcaccccaaatgaaaggccacccccctccccttatccagagcctt

SEQ ID NO: 13076 - DNA, 528 bp, Homo Sapiens
  misc_feature (17)..(17): n is a, c, g, or t
cctcactagcctctgcncaggatatctctccactcctccctggccatggtggcggatccggtgggaggggcctcatctcccaggctgtcaggcttcgctctgcctgcgaccccgactctaattctgcctggggacggctgtgggggtgtcctgcagctggtgctcgccggaacccagtcctcccccagcagcatgggacgggtgggcccggagccttgcaccgaacgttttgccccagacgaggcgtcctgtcagccgaggcgtaatcctgctgcccactctctcccagaaggagaggcagtcaacccgaggtgctgtgctgcaggacagtctccagcgcgtgctcgtttaccgccttaatgattcacctaggttgctttgtccatgggggtcttggggagaccaaaacttggtcctgagtgagtttcatttatcgcacattgaactatgagctctcaatcaagtgcaagttatgggagatcagatttatttcacctattgcaaagcaataaaaatgaattttatttg

SEQ ID NO: 13077 - DNA, 563 bp, Homo Sapiens
tctttacccatccaagatggctttggtgttgaagaactggaaaacagttatctttaacacaattccaagacagaactcagaggcccaatatagtgcaaagttctagaaagacagctgaaggctggtcatctcttccaggtgcacctggctcatcctactaggaggtcttgtcccggctctgtcctaccttgaggcagcctggggatgctaccaaacttcagtgggccttagcttccttatctacaaagcagagataggtccagggtctcttatctggaaccaaggaggtcagatatgttcagagtcagatgcaaatatcccacaaagcatcttacccagtgggcttcgggcagcgccccttcgttaaacacttgaatattcggcagtgggatgaaggcatccatagtctcaggatagttcaagccacattgttctgtcaaatttgtgtgtgccaactttagggaaaaactaaggtttcagattttttgcatttcagggattttggagaagtgattgtgaacctgtagcttctcacatgattaataaaaaggttggtggaacag

SEQ ID NO: 13078 - DNA, 485 bp, Homo Sapiens
  misc_feature (279)..(305): n is a, c, g, or t
cctcaaggtcagcagcaacagaagttgggcctagtagtcagatcacaagtgagtgtggctattcatgagaatagggtggtggtggcatttatcctgcttcccctccataaataaacctggtaattttatttttaatgttacaaaaaaagttgatgctacattaaatgttttaccctcatccattatcataaatctcatactggaggtgtgatctctcttcttgtttctttaattgaaagtaccaatgaatcgaggcctggtggatgatgcctttagagnnnnnnnnnnnnnnnnnnnnnnnnnnncttgaatcattgaaacttgtcatttttatctagactcttccacaaatggcaaagtcacttatctgcagaattcccagaatcttcttttgcctttgggcacctgctaattaccccctgggaactgaatttgaaaaaattaattaaaataaccgaatcaccccggggacccccgctagagcc

SEQ ID NO: 13079 - DNA, 683 bp, Homo Sapiens
ttcataaaatctatttacttcctgtagaattaacatccacacaacacacactttgggtaatgtgctgtccatttggtggcacagtccatgctcttagtgactatgctatgccaagaaccaagaaaagtggcccagaccctatcacggaggcagtgggagtcctcgagggttcctgagcagaacagcggggtaaacgagcgggaggcttggggaaggggtaggggctgcacgagacagaaagggtctatccctaagcacctgcccacagcccaaagtcccagctgcaggggactcactggaccacttggtagtagcgctggaggaagagggaccagccctcgggggtgaggtacagcggggcctccaggtccttgtcgatgtccatgtgggccaagttgctaaggtactcctcgcacgcacacagagcttcatccacaaactctggggacaccaacactgggtttttctcctgtttcttgggctgcttgtctcctgcacatagggaggggcctgtcacgatcccatatcaaggcaggtaaccttacgcatgccacagccgccattgttcataaggctggtcaattaacgtgaggcccgcactgaacatagatagataccctacatgccttgagatgtgttacttagactgaggtatgctctaattcaatgcaattcaaacattt

SEQ ID NO: 13080 - DNA, 112 bp, Homo Sapiens
atatacactgtgtaattttgtaccaaagatagtaattgaaatgctctctgtagtacatggtacccctctgtgaaaacttgtctttgccatgcagttaaatttctttttgtgc

SEQ ID NO: 13081 - DNA, 627 bp, Homo Sapiens
  misc_feature (444)..(575): n is a, c, g, or t
acgaagcttgccacctgcctactgggctgagcttttaatgtgatttacatttctaagctctatgtaggtgccctggaaatggtggtcttcattaatgcaaagattaagtctttaattaaactttttaagaagaaaacggtttccaacctagatgaggaaagccgatggacagtccactacactgccccgtggcaccagcaggagaatgtgttccttcccaccacaagacccccctgtgttgaggacctgcaccgccaagccaagctcaacctcaaatcagtactgagggaatgcgataagttgcggcatgatggctaccgcagttctcagtactactctcagggacccacctttgcggccaacgccagcccattctgtgatgattaccaagatgaagatgaagaaacagatcaaaaggtttgattgggcgtggtggctcacacnnnnnnnnnnnnnnnnnnnnnnnnnnnnnnnnnnnnnnnnnnnnnnnnnnnnnnnnnnnnnnnnnnnnnnnnnnnnnnnnnnnnnnnnnnnnnnnnnnnnnnnnnnnnnnnnnnnnnnnnnnnnnnnnnnnngcacctgtggtgccacctactcgggaggctagggtgggaggattgcttaagc

SEQ ID NO: 13082 - DNA, 413 bp, Homo Sapiens
  misc_feature (181)..(189): n is a, c, g, or t
  misc_feature (256)..(336): n is a, c, g, or t
cggtgcaaactttctccaggaggacagcaagaagtctctggtttttaaatggttaatctccgcaggtcactaccagccaccgagaccaacagagtcagtgagtgctctctaaccacagtctatgcagtaatatttaaggctgcaagcagtatttacaacagagggtacaagttctatctgnnnnnnnnnggagggactatggcatcaaacagcctcttcagcacagtgacaccatgtcagcaaaacttcttttggnnnnnnnnnnnnnnnnnnnnnnnnnnnnnnnnnnnnnnnnnnnnnnnnnnnnnnnnnnnnnnnnnnnnnnnnnnnnnnnnnctgaggtcccccgacacctggtccagagttctttctactatacatcaaagaatatacaaataaaagttaatcataac

SEQ ID NO: 13083 - DNA, 612 bp, Homo Sapiens
gagtcagatctcatttaaacccagcagcacatcccatttcacacgtgggaaggtgggggagtcaggatcagagagcagggtgtcgcatgggggagcagccgggctgcgatgtgaaccctacagtctgcccatgagccgcactcctgggctggacactccagagccttctcaagcagctttcttggggctccctgagcacctggctggatgctgctggtctggaactctggacgggggccccgggagctgacctgcaaagctgtagagcgactgtgaggcactggcagctttgcagcccctctggacccagggtggggtgggctgagcatctggccttctgggtctatctgggaggcagggctgtctcagatctggggccttctgagaaagatgtcgaacccaagcttccttggggaaggaggcagatggaccccagatcactctcctgggtgtgaaatcagctttgggggtgccttcggggtcgggcagaactgggctcacccagctctcgccttttctggctgtgtcacttgggtgagctcctgagcctctctgtgcctcggtttccctgttgattaggtcaggccaaggattaaatgatgaaaaagtcgt

SEQ ID NO: 13084 - DNA, 540 bp, Homo Sapiens
  misc_feature (52)..(52): n is a, c, g, or t
  misc_feature (435)..(451): n is a, c, g, or t
  misc_feature (478)..(492): n is a, c, g, or t
gctcatgcagccatgaaaacatgcatgggtgttcacagtaagctgagatctntgttcagtgcctccttccagagatactcttaagaactgcatttaataaagttactcttaagtggcaagtcaagacctccaggtcctccctctgtgattgtggttctccaaggattagccctgcttctggattgggaccccatgtcacagggccccacagatggataaaagcttcccagcggaggttgagcaggactgctaaaacggctttcaggacacccagactgtgtctaagggccaattcttaactcctaaggcttgtttgcatgactaatgggtgtcctaagttattcatgtacattatggtaattacacaaaggcttttaaaagctttaattcttggtatgagttgacaaaaacaataattactgtgcatttcttggnnnnnnnnnnnnnnnnngtctaaacccaaatagtaacctgtttnnnnnnnnnnnnnnngtgaagaaaagtacccagatgttaggatattactggaagaatggaaag

SEQ ID NO: 13085 - DNA, 330 bp, Homo Sapiens
gctcaggtgatcctcccacctcagcctttcaagtagctgggactacacgcgtgcattaccacacctagctaatttttgtcttttttgtagagatggagttttgccatgttgctcaggctggtttcaaactcctgggctcaagcacatgctgggatgacaggtgtgagccactgtgcccggcttcaagagtacaaagactttatatgtaaaagcaaaagtgaacgcttgcaagttttacgtttttggtagcttacttttgccaattacttactttaattaaaatgatacagacattttggttaaagaaaaataaagtgaataggcaacaaa

SEQ ID NO: 13086 - DNA, 509 bp, Homo Sapiens
  misc_feature (68)..(68): n is a, c, g, or t
cagaagccatttatacagagcctccttctcacaattctcatcacaacacacactctgcaaaagcttgntgcagggctcatgggctctgaacacctcctctaccttacatgggtcctgatggttctggacaagccaatcctctgtaaccatgctgggggtggacaatggtttcttggcctccaagtggtcatttcaggcacttcagattgcccaggttttcaatctccacacctttgggctggtttccctgacagttggtacaggagtcagtcttgacaagccaatcattcacattataggactggaataagagcttaaacttctcactggtttcacgactgccattctcaggcttccgcagcttatgggattcctggggagtcactagccaatctgataggtccatctcatcttgatcaggaagctcttgatctccaaccttttccatttcaatggagaaagaactagtagtggaatggctgttacacttttgataacttgatttttca

SEQ ID NO: 13087 - DNA, 799 bp, Homo Sapiens
ctggattttaaagctagtttaagatttctgtttctatctgcaaatacttctgtatctaatctttaattttgaaaacagaaatttctgattgcagttgctattaaagccagtcagttctcagccaggtgtgccaattaaaaatgactgttagcaggagctaaaggtccacccttctaagagatctccaggtattccttaatggtttgaatcaatgccgtcggtagtagaggcaaaaagaaggcttctcttgccttttatgcaaggctacttccatttctcatctttgttctgctacaggtttttaatctggactctagaataaagtgtgcaaagacttatatttcggcttggcacacttttcttgccagccagctgggattcagtctacatatcctgccaaatattgagataactacagcataggctcttaatttgcctgactggttttgtagccaataaatttttttaatttgcttaaagctgtaatgagtatttgtgtaagttagagggatggtattgtcaggagattttaaacttggatttagaactgaaggtgattttttagaaagggaaatgttttattactgaaagtttaaagtaggacaggaacttgtgatctgagatgagattgtcattggataaagtacagatgatatgaggattattattattttttaagtcctgaaaggatagtatcagcaagagttacctgcctttatttattgaatgtatttgttgtgtagaatatatttaaatcataccgaaaatcaggctgggcaacagaacgagactctgtctc

SEQ ID NO: 13088 - DNA, 571 bp, Homo Sapiens
ttcagttggagaggcttgacgacttccaggagtacgattaaaatctttgccaatcggcatccattccatttggcaaacctctgccaatttattttagaatcatcatcatctccttgtttaagatctctgtttttggtcctcctcaaatggagaagccttgcctttttgatctcctttctcaggtccatctgtttcagcatctctagtgccaaaatttcccttcctaaatcgagaatccaatttatcagcaggagaagaacttaatacatattctaccatgctcacaccaaggcctccactttctgatcgcggagacagtattgcatttacttcactgtttccatgaaaaccctgtccagatcttctctgtaccataataggctgggacattgaatggtgagaagctccccatgcagtctctctccattcatcatccccaagaaatatgcctttttgtccatcttttgttgaatcatcaggttcccaaaactttttggtaggcaaaagctctcccattccccgagattctaatgcaagagcttgaaaatcatgattcatttcatccacagat

SEQ ID NO: 13089 - DNA, 701 bp, Homo Sapiens
ttgtgttggtggggtgtggtgagatacttgcattgtattttcaattagcagcaacattctatggtagaaacattctgtacaaataatgttttgaaaagtttttttattaatttaagaatgttaccaaaaaatcaacacactaagtagaaatgaaaaaacatatttatctatctatacttaaactatactatactaagccaaccgaattattctcagtgcttttcatgagttatttctaaattggcaggactattcttttagttgtaaaattctttcaaacaaaaatttaaatattctaatgtgggtagaacatgagcattaaaaataggttatgaagtttttttatagtgctatttaaatttgtacaataccttaaatacctgtaataaaaaatatcagggaaaattctggatgctactgtcaggttactggaaagggagtgatactggcttgggattcctggttacctctgtgatcactcattttttagtttcacaaagtcttgataccaccagagggagctgttgatatcgaagtcttcgaatgaaaaagttggtggtgagagttaagactagggagcagcttatgctgatctgtgaagcataatcattatcttgtctgtaatttgtaatcttatagactcttccccccagcaaacattttccttccatgtttcatttcagatattcttccccccccat

SEQ ID NO: 13090 - DNA, 802 bp, Homo Sapiens
tcaaatgatgctcctgtcactaatttgccttcgtttttggggcctcagtttccccatgtgtatgctgtggtattggatcagcaacgagataagaagatctctcccatttccaagcgtctatgatgattctgaggcacaaggtcacatttgacagtactaggaaacccaggaaacaagaagcaaagatgacaaaggatgtgtctgcctgggcagacgatctatttggacaagataatagacccaggcatggacatgctctccaagaaagatgccctgacagctgctcacactgaagctgaatcgaacattccaatccttagaggttccagcgaagatcttgaagtctccctgagccattgacacaatggccatgccatcccagtgataaaacacaaattgtggccttgttttggacagaaataaagagcccagtttgttagtgatttactgataataactgaatcgagtactaatacttggcgacttttaaaagccatcatgttaaaaagaccacctgattcccggtgaccctgcagtgactgggtttgggcagctcgtcccctgcacctgtttgggcctgtgccagccacttccagtgagaacatcgcattaacttgcggtcgcagacctggctggaccccttgaaccaaattcctttctgaccttatcagaccccaaataaaagagctcaccaggcccctcagcctacgtgacccacctgcccagtgaaaaaagtagggccctgttctgttctctgaggatggtcagtgtgctctttgatgaaaacggtttctaagctgag

SEQ ID NO: 13091 - DNA, 1068 bp, Homo Sapiens
  misc_feature (658)..(736): n is a, c, g, or t
  misc_feature (1004)..(1004): n is a, c, g, or t
tctcgggatttctgctccaggacagtgggtttcccgctgggcacccactcttaagtgcagatcgggagactaagacaggaacacccgccgtgggcaggccaggctggaaggatagaggactgtggtcgaaccaagaggaggttcaactgtgacttatgccagtgtggtcacgaaggcagatgggttgaactgaaaagggggcaccggttcctggcatggaggcacccaaggtcttaggaggtggatggactgtcacatgggcaaagaaatgtcccagggcaggactgcaaaggccacagaagaataatttgggagagagacaacccatgagaagtcactcagaccagggtcagaaacagaacaggaacaacaatggaaagaggatgacaccattgatgggcacctaggtcaattcaatgtctttgctatagtgaatagtgctgcaatgaacatgcaactccatgtgcctttctttctctgcagccttgcaagtatctgttgttttttgactttataataataagcattctggcttgtgtgagatggtatctcgttgtggttttaatttgcatttctctgatgattagtgatgttgagcatttttttatgtttgttggccacttgtatgtcttcttttgagaagtgtctgttcatgtcnnnnnnnnnnnnnnnnnnnnnnnnnnnnnnnnnnnnnnnnnnnnnnnnnnnnnnnnnnnnnnnnnnnnnnnnnnnnnnntttttgcccattttttaatgggttaatttgggttttttgcttatttgaatctagttcccttttaagattcttggatatatttaaaatcttttgtccatcctgcattagttttggggaatattttttctccccatttcctggaaggggtggcctccttttacctctggatggaaggggttttcctttttgcctgggcgcacaagcgcccctttaaagctttaaatataggccccccacaatgggctcgaaaatttcttgggttatttgngcctggaaaattgggctttttttgagggggaattttagcccccataaaacatattctttttctc

SEQ ID NO: 13092 - DNA, 727 bp, Homo Sapiens
atcttcaccccaggctactatccaattgaataaaaggtggtgctactattgaacatgccatagaatattaactttgtaaactgacttgaagtctccctgggtgaatgctaaccctctcatatgtaataatggcttcatttacaaaatgtataacatgatgactaccaaattatttcttcagccttcacttttatccagaactgccaaatctgaatctaattcccatttaggattgccacaggtatgttcaaaatagtactttctttttctcataagattctgccttatgtcttgaatttatactctaggtaaatgttgtaagcagaataaaaacccccaaagatgctcacactttaatccttgagacctgaatatgctgtattacctgacaaaagagactttgcagttagaattatgaatattaaaatgaggaccgtatatgagtccaatctaatcactatgagcccttaaaagctgagaccatgtgtagttgatttctgagagacggggcaggagggaaaggcagagatatttgaaatgttcgtgctgctggaaaggcccatgaaaaaagcataaggaacagggacagtctaggaggaaaggctggtcccagctgacggccagcaaggaaatggggactgcaataatacctactcaaggaactaagtgtggctaacaatctgaacaaacgtggaagcagacctttcctcagatcctccaataaaaa

SEQ ID NO: 13093 - DNA, 249 bp, Homo Sapiens
gcggccgcctccgtcggagcctgcgggagggtggtggtggatgaggtggtggcctcgcccgcctcactcatgcctcctcctcctctgctctcgctcaggcgcctcggtggcggttggtcggcggttagcgcggctggtggtcgcggcggccggggctcgctctcggggaggccggggcggatctcgcggcgcaggcggcggcggccgaggtggggtcgcgcggcggaggcggctcgagcttcgtgctgc

SEQ ID NO: 13094 - DNA, 442 bp, Homo Sapiens
aaacagtttagggtaataccaacaagcagtaggatatcgtttaaatatgacataaacatagaaaaaatagaaataaatacaaatacataagaacaacatataccgttagtagtctaaagggatacatgttgctttcacctaaggcactaacacttttcacgggatatgcttccagcacaggcccagcccacaccgcgcaggtcccacctgctgtgcatgtgaaagggctttgtaaacagttaagtgctgaccacacaaggcaaattattatactgattatcatgccctttccaaatgcttctcctggctttttgtgaatgacttaatgacgataaaggagatggagtttagagttactggaaaacttaagctatgtcagaaattaaactctggaaaaaattctttaaaaaaatagtaaggtttggctgggcgcggtggctca

SEQ ID NO: 13095 - DNA, 216 bp, Homo Sapiens
gcggccgcgggccccgcgccccgcccaagcccagcaggcggctccgagcgcgcagcctggaggagacccccgcccgcccttccccgcccggccgcgcgccgcgggagtcggtgaaggacgcggtgaggtgccggggagcgcggcgcgggtcctcggcctagctctcgccggacgaaggccgcccgctgccgcttcaggcccgcctcacgcctaccg

SEQ ID NO: 13096 - DNA, 395 bp, Homo Sapiens
aagctctgaaaagtgggatggtatctttataattcaaaatcagggaagaaggagagaaagaggaagtcccttccgatttcaggcgttctatcgctgtccagcctcacggatgcggcaggccacagcagtgtatgagcgccgcccccttcccgctgccatcctctgactgcaggaaagacacatcacccatttccggagccagcgtccttcactgtctcagtgcataacttatggcaaagtgaggatgtagcttgtacgagggtcccatccaaaccctactgtcactttcagagcgtccagcccacggttttctcgtatcctgtccaccacagcggccatgcctgcgccacagagctgggctgcccgccgggccatcacagtgcacacctccttaa

SEQ ID NO: 13097 - DNA, 558 bp, Homo Sapiens
aacccctctctactaaattcagaaattagcgggcatgtggtgtttcctgtaatccagctactcggaggctgagccggaagaatacttgaacccaggaggcggaggttcgccgcgtcgtattcataccacagcactccagccctggtgacagaggagaccccgtctcaaaaattgattgatcaattcagcatctgagggctgcaagtacagaaggaatctattctcagcagggcatagggcacgcactggcttaacagtttagtatataaggctcaaatagtctatacctgaactgctataagcaaggtcgatagggaagtggatagattgcttcagcaaagtgaactgtgagatctccaggacagagggagaaagatctgatccaaatgagaacagattggttattgcaggtatcacagcctaaagaaattatctttttgcaaaagaaatattaaatgatttagcagtctccacgtgtgttaatgtttcaaacgtgtatcataatgtgtataattgtgtaacaaaattgtctacaataaatcctttggtatttgttaa

SEQ ID NO: 13098 - DNA, 362 bp, Homo Sapiens
cccctggaaaagggggtaaagtcggtaaagtagtaatagatctattgtgcgtcctgtaaatatttattacgaacctatacggtgtcctttctataatagataaactctaatgagctagcaaatgtgtgctaataaaaaaggataatacctcgtgaagcatccaacaatgcacgtatttcaaaagccacctaattcgatattactcgatgtattatacatccacatctcaaacacatttgccatgcacaaccagtggagaatgaagacaatgagcatcttcctattcacaaccttataaaaacccaacagcacccacacttgggagacaccatcggaaagaaatattatcgcctttcttccag

SEQ ID NO: 13099 - DNA, 466 bp, Homo Sapiens
  misc_feature (318)..(330): n is a, c, g, or t
cagggctagaagagaagtcaccaaacacctagggacagtcctaggcctagaaagccctttaaagtaatagtgaattgttttaaaattaagttattgagtggcctactgactaccatccaaaaaacttttatcaccaaatttgttcagtgtttgctattgggagattgtccatatccctccgtaattaagggccagcaagtaatacgatcttcttacagccaaccttgctcttcccaaagggagaaagtaatacatcattaacctggaatttgtgatataacaggtagccttggttaatgtttaccttttcactatgtnnnnnnnnnnnnncacacagcaaatagtgcaaataaaatttggtcctttaaagcattttagcagtagctatgtaaaaaaagttaatggttattattcctaaattttcataagacccttggtagacaaaaatattatatgatgtatcaat

SEQ ID NO: 13100 - DNA, 918 bp, Homo Sapiens
  misc_feature (161)..(174): n is a, c, g, or t
  misc_feature (897)..(897): n is a, c, g, or t
aaaatctgtatgaatgaaaaaatacttagcttaagtctctggagtctctggaataaaaccttgaagtcagtctctggccactaaggtgtatttaaatatataaaaatcagctgaacaatatgtacaatttgctatgaatgatttggcggatctttgaaagnnnnnnnnnnnnnnaaagcctattccattgggaactttctcaatgacaaatgtaagaattgtaaaaatgaaaaatggccggaacattatggttttcactcaaaatctcctatctggaggggattctctccaagcaatagaatttcagacatgtaccagaacaatataaaatttcaaaggtcttcccagcagtcaaacatgtaaattaaacatttacaacataaaaagttgtggcttttacacaaaaattttcaggatggagctaggcctggacttgccatctcttgttggaggactggcaagggagtcattagattctaagctcgttagagacttgtaacttgccactgacgttagagatccacagaggccaagtaatgacggagtatcttccttaccttcactcattacattcaatgtgtcttgtgttccatctacttcttgtgactggcctggatctagtgaagtctgagaaaggcaaactactgctgataactggtcaagactgtgaaaactcttctcataccactgtctattgcgtcttcggtaaagcaacgtatccaaggcaacagcattgacatacagagctcctgcagaaggccactggctggtgagatgggcagttaactcttcgctcgatcttaaatcattatacaatagcacagtcagctgatcttgaagctacacaattatatattctaatcgatccttctacaagttatgacgccagacagcatnctccatccttcgtagcagaat

SEQ ID NO: 13101 - DNA, 244 bp, Homo Sapiens
aacagatcactcttccagagcaagctaaactgctagctttggtgaagcacgtgcagtctaaaggatacccaaatgaacgttttgaacttctcaccaactttcctcgaaggaaattatctcatctggactagtgatattacagttgcaagaggcaggcctttgtcctcaagaggctgtctttgtacaggaaagaaattaacaccatggcgttgacctctcgcagcttaccccttgttccggccgt

SEQ ID NO: 13102 - DNA, 866 bp, Homo Sapiens
ggcgggcgctgcagaagatgcgcgagctcttttccgggctggggtctgcgcggccctggaggcctggccggccttgcagatcgctgtggagaatggcttcgggggtgtgcacagccaggagaaggccaagtggctggggggtgcagtggaggattacttcatgcgcaatgctgacttggagctagatgaggtggaagacttccttggagagctgttgaccaacgagtttgatacagttgtggaagacgggagtcttgccccaggtgagccagcaactgcagaccatgttccaccacttccagaggggtgatggggctgctctgaagggagatggcctcctgcatcactcagagaaaatgcaaggtcacagccactgcacttaagacagctagagagactgatgaggatgaagatgatgtggacagttgtggaagagatggaggtcacagctacgaatgatggggctgctacagatggggtctgcccccagccttgaaccctctgatccagacgctcagactattaaggaagaggatataggtggaagatggctggaccattgtccggagaaaaaaatgagtggggatgattggaaatggctttgggcccttatttgctgttctgagagttgtctgtaggggtaagatttgaggattgcagacctgtggactgtgttaacccatcatccacactctcccctgttcctctgtctggctcctccaggcacggaaaacctagggtcctgggacatggggagtggggcggaccttttccagcatatcccccggcggccgtagttaaacatcagagtgaccgaaagcggggttcccaggacagtgtcccgggtgcggcaatgggaggcaggg

SEQ ID NO: 13103 - DNA, 1011 bp, Homo Sapiens
gccaagggaagtcagaaatcatgatatatggagctccatccacaacaccttctaaagtatagatttctcttccccaggggtacttggggtatttctttaagtcttcttcacttcgagtggcttcagggaagaattcatatttaatgagctcttgattgatgtttgctatagtgtccatccagcctgcgaatgcgcaccttattccggacattgggaggcttactgaattcatggataatacagatgtgataggggtagggaccactaaatagcttctgctccaaagttagagtgtccacctgctgcattgggcgtaggtatatgatgcggtttctctcgggtggcattcttagtatctggtctagtacctgatccatgttcagtttcttgcactgtgcatagtcaaatcggtttacaattggtgcattttctacctttaaatgttttagtaccctgcacctggtagcatggatgaacatcatctttggacagtcttttagcactagatctgtgattccacaattggtcatagtgactccaacaagattcttggattttaatacaagaacctgcacatggtcatcctcgatcacaggatcacttgtactagtggatttatctgctgtccgcttccgtttcatggcgtgacgtggctttgttttggctacttctgactcagataccagcagtacatgggacagtctgctcctggccctggttaggggcctccgagggtagtcttcattagactgcacgtcacaactctcaggctgggagctccccctcctgtcctcacctgtagccccagagccactcccattagtcctctcatcatgtgctgggcctgaagaccccccttgtggcagagtcctaaaggaaaaggcggatctcgtaccatccgggccattcacaacacaggctcggctggttgaaggacgtgtcctcatcagaacacctgctagttctcctttgggattcctggggcctgtgacagcagcatctggggcagac

SEQ ID NO: 13104 - DNA, 906 bp, Homo Sapiens
  misc_feature (406)..(441): n is a, c, g, or t
  misc_feature (661)..(670): n is a, c, g, or t
aaacaaaaatcgttcttgttggattttattcagcagcatctatcatgtagataaattcccaggtgtagcatgacagcttctgactaatatagctgccattcagacaattaatgttcaaagagttttctaaagtgataaaaccaaagaaaagcatgtggaaaagcacgaagcttagaaaattgtggtcactgaatgcactccctggtttttatttgtcagtgaaatctttatgcattcattgttaatattttaattccatggctttgtaggctgtgctgtgtctgaaggggtaacacctagggaaacatgaggccccttatgggaccccccaaatggaacaacttcactttctcttttatgtattgagccctgtgttaacatttcacttaagaccaccagtgctttnnnnnnnnnnnnnnnnnnnnnnnnnnnnnnnnnnnnggggggggccccgcccaaaaattcccccgggggggcccaagtttggggtccccggttttctgtgtgtcacaagggggccccatgatggggaggcccgatattaatatacgcataggcgacctggcgccgggctgtttaaacaacggtctcggagacgtgggaggaacaccctgtgcttaccctggggagaccttgcgtgggaagggacccttatactccnnnnnnnnnnagccatatattgtgtgcaccaacactttcccctctaagcagagagatttttaaagagcccctaaaggggcaaaaatcatttacacaattttacagcgctgctaattacgcggggttgtaacacaaacggcggcaaataaatatccgctgcgccctgaaaaaatttggggcacaacaggcaaatcatatgactttgagaaacaatttttctcagggacttattactaaaatatcgaa

SEQ ID NO: 13105 - DNA, 594 bp, Homo Sapiens
ttccgggatagtgcatcccacgctcacttaaactatcttgagggactaaggtgtacaatcctggtgcttatcgcgttggggctctaggtagacacgagctggcttttgaaattgtagattcctacactccccctttctagagttctgggtctaagtgaattgactcctatttctgtagtgaatgttgtagtttcccttcccattctcttggtggccctggaagcttctaggcacagtgtgcacccctgattattcccaccactccatccaacttttctctctctgtggtgtctgcaccacaaggctgcctaccctccaggtgcctcaagggtccggccaccagttgtgcctcggcgcccccccgccaacatcagaagggtcaggcaggcctccacccaggtgccacgcacggtgccctcaaaccccagagagtagccaacattggtactcagaccacaggacccagtggggtaggatgctgtacaccaggccggccgctcctgccgtgcaaatgttcctcagcagcacatagcacctatcgggtccaggagccggctgtgcacatcccaggacaggagcccctgaccggtccat

SEQ ID NO: 13106 - DNA, 358 bp, Homo Sapiens
  misc_feature (254)..(254): n is a, c, g, or t
tcccgggttggtgcatcctgatggaggaagtgtctgtcatgagtgatcagaagagggattgctgctgtgaagagattataccaaatggtaagggggtggctggaccagaggacctctgaagttcattgtttgtaatacatttagaatgaccctcggatctgcctccattgaaagagagtgagggtgagctcagacttctagggtgaaaatagccctctgtagttctattaatgggggaggtgagggaaaggganttggtacccactgatgagttttatcatgttgaatcactaggccactgagaatgcaaaggaggaagtgagcgaattctgggctgctggatgcacaatcccgaagg

SEQ ID NO: 13107 - DNA, 267 bp, Homo Sapiens
aaaatcacctgtcaaaacagtcacaggttcatccgcagcacaggcagatgataccacctcaccagggtctggggaggctgtcctcaccgactgcagctcactgtggtcttcagtggtagacctcgatggagaacacactggaggtctgggggatgtggctcccgttggcccccagccgtgtagcgctcactgaaatgtaatgcacacccttatcagtgtcaagggggaggccctccagggtgtggctctgtgagtcccagtgcagcc

SEQ ID NO: 13108 - DNA, 664 bp, Homo Sapiens
ctaggattggagcatccagaacagagtcacttcagcctgggaagagcggggacttgagcttggagggagctggagtggccgcttgctgagtctttctccctggagctcgtgggcagctggttacctcgcgctggggcgaccctgacttaggacctcctgccgtttctctgggtgactgctctgtagtcgtgagtcgtctctttaatgctgagcatcagtacctgcacagccctgaatggagcagctgcccagaatctgtcttgtcatcgatagatggacagttgccgagtgtcctgcgtgccgactgactaaggagtttttgtctctgtcaccctgtcccctgtggttttatgaagacgttagttatgaatccgtgtttaggatgagaaagatgtaaacagtgaggaggataagtgagaagctagcaagagtctggatggtgatggcgggggagcgctggtggaggagtcgggggcgtcccgctggactggggcacagctctgcagcagcagccggtgcggttttgccttgtaagtgacaccgttgcctgcaggcatctctgacagctgctcctgctccagattccagaaatttctatggaacatttcctgaaccatcctcctggtttcttcccttcccctcactgaataaaatccgtaatagc

SEQ ID NO: 13109 - DNA, 300 bp, Homo Sapiens
  misc_feature (31)..(31): n is a, c, g, or t
caaagggtaggaggaagacattgatcaaggngctggagcagaaatcaaacaggtggaagatgagaagtcacagagccatgaatgtttcaaggaggagagcagagctagagaggtggaggaggaccgggattaagagaaggctattgaacttatcattcacaaggtcactaatgaagttcagaagagcagatcaacagagcaatgacagcagaagccagaagagaagagttaagaaagagtagacagatggcagacagcaggtgcaggagaaacaaacagtggcttctccatgctttgaat

SEQ ID NO: 13110 - DNA, 226 bp, Homo Sapiens
tggagggggctcaggctgcggctgtctgaagcccctagtcagatggggatcccttcttgccttcctttctctaccccctcgctgttgtgtgtgtgataactagcactaaccctaagagggccgggaggtgggtgactgaccagggctggcagggaggcctgctcctgtctctctagcaggagcgcctgtaccccaccaagccatgtgaataaaataatctggaagt

SEQ ID NO: 13111 - DNA, 287 bp, Homo Sapiens
aggatcggcgtgcagctaaggtatttggtcgtgaggtgcattgggtaccccttcaaagccaagcagaccacggacatggaccgaagtcagcataagctaaacaaacaacagttgcagtaactgaaagaacggttccagaccttcctcaatggggaaacccaaattgtagctgacgaagcattttgcaacgcagttcggagttattatgaggtttttctaaagagtgaccgagtggccagaatggtacagagtggagggtgttctgctaatgacttcagagaagtatt

SEQ ID NO: 13112 - DNA, 572 bp, Homo Sapiens
atgggttcctgtttatccttgccacgcagctgagcttactgcatgtttatatctcccaaggactgttctctgctcagaaatgccctgtcaagggtgtggcatcacgcagtttcatccaagttgtttcaggaattgctgacactgctgggtgcagttctatcccctaaagcctagggtgtggccctttaacttccccttcagtagaactgggaaaggcagtaccattcctagttatgagtgaagcatccactttcttttgtaacaatgaggaacagaaaggataagactgaagagtgatcttttgtccaactaaaccatttatctccttttgtaggtaaattcaaatcctgcccagttatagttttcagtcactggagaattccaggtaggagccctactttaggtgatcctaggaactcctatgttcagaaaagaattttcttcctactatataattacagtatttagctgtcaattttaagatgaatttggtagagccttatagtaaagtatgtatcttggtcacacacaaagcttggaaaaagtaaaagatgtctaaaccataaaaaaaa

SEQ ID NO: 13113 - DNA, 375 bp, Homo Sapiens
aaaagaaagctgttttcccctcatcatatccctcttgagttttgcctggactttccctctcaagtgtgtcaatcaggtaaactgaggaatgcatggaagctgaggatggagcttaatgggctccctgtcctgggtgtttgctctctgaagtggaggcctgaggaaggtagtacttccacaaaagggagggacccgggccccagcctcaagctagtgggggaggcagatagcctgaatccaggggattttctgggcttcttaaaatgtccattgtgagttccccgtgtttgggattccactcattttggcattcacagtgcctggaatgtcttagattttcagcaatgcgtgttgaataaaagaatgacataggca

SEQ ID NO: 13114 - DNA, 326 bp, Homo Sapiens
tattctataaaacatttcaaacctagttagagatttgtaatcaaaaaacatttgcgcagaaagcagcacttagggctgcctgttctataccctacagtcagacaggaaaagaactgaaaatggcacccttctgacattctgaggcagctggactggcagccaagtaaaggagagtgatgaggtggtgtggggagggtggggaggcagcgcgagggtgctctccacagcaggtaggagcaggcaggagtggggacagagggagagcttgtgactgggacagtgaaaataaacgattggctcttatcaatcacgtgcctgctgctacc

SEQ ID NO: 13115 - DNA, 601 bp, Homo Sapiens
tacaggccaagcacagggtagctggaggggggctcacccctgacaaaggagcatgatgctggcaattgggtattgatggcagagagctggcactcagccagatgggcttcacttgggcaggaaagacacccacagctgggcctgcgttactgcggccgagtttcagcagctgtgatgtgggtgctaattacaggggcctgccttcatagaaaagtagcaaacattgcagtttagtaactaggaaactaatagttttctcagtgctgcttgcgcaaagctggtaattatctcaaaagaagcaaagtcatgaagtgggaagtcatgaattgggaatgggtgtccttgttaaacgcacatctgcacactcagggctggggccctgtgcccccttgtggagggttaggggacaacctggctcttgtgagggtctagccatcccctcagtgggttctgtgagcatcggaggcacggggggtgaggggctcaggagcaggttgcaattcaaaatcaagggctgctttgaggaggcctctccaccgggctgctgtagtcaccaagtccagcccatgcccaaaggaagaggaatgagttcccccttaaa

SEQ ID NO: 13116 - DNA, 621 bp, Homo Sapiens
cctacctggctccatgctctgagccattatgtgctgtgactgggggtggcgccggcttctgcctgcgagttaagtagctctcagcagctaatcccgcagtaaatgggctggggtttggcaggaggccagggtttttaattagcttctgccctgagatgaggcagttgtggctccactgtcagcagtggccgtgtggtgcctgcaatgaggggggatgtccaggccacctccctctgcctccagagggctgcctgtaccgcctcgtgactccccagccttcaccttcccagcaggcccggcccagcctccactgtgaccagcgggagctttctccagcacagctctgaccctggcgctcccacttcgagcctctaccaccagtccagaacttgcagtgggtgcggtaaacggtggcccctcctcagcaaacatttccaggggattctggcagcagagtttccatgggaacatgtgctggttctgcgctgaacccggtgtggctggggttcccttcacagccaatattgcaggaactgagcctggtggcctcggccagggtaggcagtgctctttggccacccagtgtcacaaacctgaactcaagttacaggcaaaacctgc

SEQ ID NO: 13117 - DNA, 521 bp, Homo Sapiens
ggttttgaggaaaaccttctagaagagtcccagtatggggaagtggcagaggagacccctgcctccaacaaccagaatgccaggatgctcgagggaagacagacacctgcctccaccctggagcaagatgccactgactaccgcctccgaagcctgcggaaactcctggctcagccccgggagggcctgctggcccccttctccaagcggaactccacagcgtccttcccagggaggaccagccacattccagtgcagcagccagagaagaggaagcaaaaacccagccctgagcccagccaagattcacctcattccgacaagtggcctcctgggcaccctgtgaagaacctgcctcagatgagggggcccaggcccaggcccgctggtgacagccccaggaagactcagtggctgaaccaggtggagtcgtacatcgcagagcagagacggggtgacaggatgcggcctcaggcccctggaaggggctggcatggggaggaggaagtggtggcggccgc

SEQ ID NO: 13118 - DNA, 700 bp, Homo Sapiens
  misc_feature (522)..(560): n is a, c, g, or t
ccgggcacaggtaggtgtgcagcagagtgggagcctccgaggccacttcctgggatctgccgggctgtaaagcaggctctgccccatgtcaaagccccaggagagggtgggtgtcctgagagactcaactgggacatgggaggaggcgcagagggtccctgtcccttgcttgcttgctttcccgaaaagtccccacaagtgtgaaacagaaggaggtgcttgccaggcctcccatggccccctcctttctcggggtctcctcccacgccatggctgtgagtgtctaacataagggacgctgtttttgcaggttttgtggttgtgattcctttgaaccatatccagcccatcttacatcacagtgccatgcttgacttggtctccaatacatcggcacccattggcatttggagaacttgctccgtagttatttgacagtttttagttgtctgtgataatgtattctctatgtttccaatcgtcagtatgggaatctctcccccaacctttcaatttctgggnnnnnnnnnnnnnnnnnnnnnnnnnnnnnnnnnnnnnnnaagttgtgattcctttggttattagcccctcccagtggctgcttgtttatgcattatgtttgtgacttcttttgactgtcagtgttgagccagtcttcccaagaaacaatatcaagtatttcctatttctatacttcttg

SEQ ID NO: 13119 - DNA, 621 bp, Homo Sapiens
tgaggctgaaggtctaacgagaggcagaggccccagggccgagtcctgtagtgaagactgtctgcacgatgaactcctagaaaaatagggacttctgctgctgaggttttgtcaggttaacgcggttacaaaagcagggtcaccactggctgaagacatcgacacgggcgccactcgcccgtctgtgtatttaaatctatcagcttagcaccattgcaaagtcaagtgatttcaaagatagctacaaagttacaaatatatattatgagattattacaatgatattcagtttcatctgaactgtgatttaattttatttgaatttggaggcttgtaactgtttaatcctttcttattccgccacacaggaaaatgcctaagttctaacgttacacttaaaactgcactgtgataacacacggttgtacagaatgcttcagcagtatgtgtattttgaggtagacaggtaatatttattcatacacagctactcatagacccttatacagtgactctagaaaatgatttggatgaatagcaagcttaggtaactgagtaactcaaaccgtcctgggagttgatgggcttaaagaaagagatgatttacctcacttcacggcc

SEQ ID NO: 13120 - DNA, 590 bp, Homo Sapiens
catcgccggggagcccgccaggtggaccggcccgcggtccgcccccagcgagccggggacccacccaccaccccccgcaccgccgacgccgcctcgttcgtccgcccagcctgaccaatgccgcggtggaaacgggcttggagctggccccataagggctggcggcttcctccgacgccgcccctccccacagcttctcgactgcagtggggcggggggcaccaacacttggagatttttccggaggggagaggattttctaagggcacagagaatccattttctacacattaacttgagctgctggagggacactgctggcaaacggagacctatttttgtacaaagaacccttgacctggggcgtaataaagatgacctggacccctgcccccactatctggagttttccatgctggccaagatctggacacgagcagtccctgaggggcggggtccctggcgtgaggcccccgtgacagcccaccctggggtgggtttgtgggcactgctgctctgctagggagaagcctgtgtggggcacacctcttcaagggagcgtgaactttataaataaatcagttctgttt

SEQ ID NO: 13121 - DNA, 751 bp, Homo Sapiens
  misc_feature (19)..(19): n is a, c, g, or t
caggctggagacccagggnaaaggctaaattgcagtttagatcagaaggtcatctactggcagaattccctcatcttccaggaaggtggatctttttctaccaaggccttcagtttattagattaggcccatgaacatgctggagggtaatctgctttactcaatacatactgatttgaatgttagtatcatcaaaaagaccttcacagaaacatctaaaataatgtttgaccaaatgtctgcataccatggccaagccaagtttacacataaaattaattatcacacatcccacgaacaccatccccaacagatgctcatgagcattgtggttatgatttcaacttcagaataaggcagaaatgtgtacaaatcctgaccctttgacttatcagctctctaaaaatcattatatgtcaactttctagactttacctgaaaaacagaaaccaagatacccacagcataagattgttaggattgaagaaattgttacgattgttaggtatgaagaaatttaaacaatgatgcagctgagatatttagaattgtacctggcatgtactttgtattaaataactaataaggcctttttctggtgaaaacaaaataagcctggataaaagaagatgagaccagattggttgatggctcggcctgggtgggctcctggcccatctgaaattacattactcttatgtagtgccttttttgttattgctaaaataaaataaataaaacactctacttt

SEQ ID NO: 13122 - DNA, 285 bp, Homo Sapiens
  misc_feature (231)..(242): n is a, c, g, or t
ccagggagacccccatccctcgccggggctgcctggaggctgtggaccaggatccaatgcccaggtcccgccccccaccccaccccaggcccagaatcgaggtgccttggactttggaggggccaggcctggtgaatggggggcggggcggcgccctcagggtacagagcacagacagatagacattccagagactggtattgagagtctttataaagtgtgggagatttnnnnnnnnnnnnctgataaaaatgcactttttgggagtggggagggagaagcttt

SEQ ID NO: 13123 - DNA, 1326 bp, Homo Sapiens
ttgccttgtgtccctgtggatgcccccttggctgcgtgtcatgtatccttttcacatgaatgcatgcaggactctgtggtttgagttgtgggctgtccccagtagcaggccagaaggtcttgcccgtcttgcccttctgtccttggggcacctgcaccgccccccatccgtccacgttgggtacacgtccatcagactcgtgggctcgccaatcactcggccgtccgggagcaccccgggccagcggttagatcccgtgcacgcggtatcccaccgttcccatcctcccatgcccttcccacctttataaattccattccagccaccatactgggtgtttccaagttgattctctagggaaccgccgtgatccgacgtaaaataaatgagggtgctgttgctcaaaccctccacgtccaaagtgtcaaggatccgtcctaccatccagtccatctcctctacgttgtccccatacagcccgtggagactcttcccgaggaagttctccatagtgataagagggatgtgaacgtgtagaaaggaaacaaagaggaggaaaggcccatgcttattccttttgagaaaggacgcaacctcctgcagaataaggggtgtcgttctttggaagcacatgggctgctccgtgatggtgtggtttctcatcagaaagcaatcggcatggacaatcagagcacccacaaaataggagcttgcgaggaggaggacggccgaaagggctgaccagatgaccggcatccacgagacgggtatcaggtgtgtgagcttccctgctaccagtgtgagggcaaccaaggccaggacttggaaagaggaagttgagtttttgttccaggttgacacgcttctctgagagttcccagcgggcgcaatcacccatcaaggagaaaggcattccgtagaaatggtcaaagcccatgatgaagagggtggtgccaatgatcactggctgactcacagttgagacccagatcccattttccaatgagtccagtggcatagcctttctcttccagtattttcgcaaaaagttgtctcatttgttggaagacctcccagatgctccggtccactgaagaacacggtaaaccaaatgctggaaaccaaccctgatcgcacagggtatctgcccgtgaggaaggcggctctgcttggggtgcacaaagatgcggcagagatgtgttgggtcagcttcacgccgtcctctgcaaggcggtcaatattcggagtccaagaatggtgcagatgtaacatgttgtctctctctctacttcctctgctcctgggctccttcctgaatccccgatc

SEQ ID NO: 13124 - DNA, 412 bp, Homo Sapiens
agctggttgcgggtgatctagaggatcccttcgggttgtgcatccggtaggaagttatttctggttagcatactcagtacaaggggtaggccaccacttttcaagaagtgaaacttgaaaatcagaggaatcatcagccagaggtgcaccagcaggcattaacaaggcatagactacctctgttagatatagcacttgtgaggctgaaggaccaaagaaaagtgagtcaagagatggactaaggctgctttctccaagtttggcatggtctaaacaaatagctcttaatttttctatcgttgtgctatctggcggcataagtttcataagtactcttgctccatctctaaggggtggcatatttaggctgctacctaagtctgcaacttgccaaagaaaagagatgtatctg

SEQ ID NO: 13125 - DNA, 392 bp, Homo Sapiens
cccaggtctgtgcttaaaaccacgaagttcaagatggaaactgaagggaagagtgtcaaggggatgggagagaggacttgtccatgactttggcagcataaggaaaaaatacccagggacaagtggcgactttggaaactccattcctctgcaaaatgacatcacgaggagagtggtggggcctgcggatgaaaagatctggcttctcctcccaactctgctatgaggaagcgctggatggccctgtcggccgcggtcatcgccgcctcggcccgggagctcagcattgcagccgcaccggaggcctgaaaccgtctcctccgctaccgccgccgccgccgccggaccgagggatacgacggttcccgagacagcggaacctgcggccgcaa

SEQ ID NO: 13126 - DNA, 449 bp, Homo Sapiens
ttagaggatcgtttccgggttgtgcatcccgatcctcacgtcgatcaccggcttcccacagtgcttacagttaaggcgggcctgacaacatggagaggcagccaggatgtcgtaggtgtacatagtgcccagctggtgccagctgccatcccaccgtgacttacacttgatgcagatgatcttgtgaaccccttccaggcagtccacgcacacggcatacagatgcatgagtctcccttgaaggtgacaaggaacatcatattcgatctcatcatgtctcgacgggcttaggaacaaagttccatccaccagtgggaactgttcgaacaccgggagcgcccggtggcacagggcacagtttaccacgtttctgtggctggcactgagcgcggccagaatgaacttccgcaagtcttccccctggtccaggatgcacaaaaccggaaggg

SEQ ID NO: 13127 - DNA, 560 bp, Homo Sapiens
gctagaattaattgcccactctcccaccctaccagtgcagcccggcaagggcaggaattgggaggcctagggtgggcatgaaagcttgggaagcactgtcgtctctcagacaggcgtcctaaagacctctaggctggaagcttgggcttgcaagtggatccgggaccgagggtggtctcttggacaaccccaggaacttggaccaaagcagagccaatcttgcaaactggccatggatggggaagtgcccggtagccagcatgagccacactaggaaagaggaggagggtgcagccaaacttaaggcaccggcaagtgttgtcagcactggaggagaccccgccagtggggtgaggccagccaagtccctgtgttacgaatggtgggccaaggggctgtctgctcggtcccagtaggacaggcagagctccaggctggcaccatggtaggcctccagggtaagagctgggaggcaggaatggcacactgggcaggcttgcccattcctggccctgagaatggagctgtagcctcatggacaataaatggatgtgacacca

SEQ ID NO: 13128 - DNA, 463 bp, Homo Sapiens
atcccagcttaccattactgtgtacaaagagctacgtgcaaatcaacacaaaagaaatggcaacaatacaccaaactccgagtgagaagttcaccctgaagtttaaagactgtctttcacctcaaaatgcagaggcactgcaaaagtgcatctgtagtgatggccagatgtggctctcagggcccagtacagaaacctggagtggaatgaagtttgggaagaagccagcctcgcagccctgagagccgagcagcgtcgtcaaaagagcaaggtgcaaaccctaaacgggcactgtgactgaatgggacttgcacactggaaaaccttcacccagccttcagcatcggactacacagtccctcctcccccttggcattatcacagttgcaattcggtgactgttttgtgatttagtcattccctggatgcacgaacccggaaaacgatcctcagaggacctaca

SEQ ID NO: 13129 - DNA, 512 bp, Homo Sapiens
tcagtggcccgtggtaccaggccaagctggagggccgtgttcttgactcatccagagcacagtaaggtctgccttccctcgatacagcagaaattccacagcagcggtctgcccgttctcagccgccgtcatgagcgcagtgcggccagtgtggtcagtggcgttcacctcagcttgatgctgcagcagcatccggagcccagagacattgtccgcgaaggcagcggcgtgaaggggggtccgtcctttggcatctcggctgttcacaattctatggcacccagagctcccagtagcatctctgtggtgctgtcttggttattaatcactgcacagtgcaaaggagtgaaggggtttccttccaggtacgaaaacgggctgtgttcaagtaacaactccagacaatcttcatgtccagtgtaggaggccagtgcatggcgagtatccgctgtaatccaccccagcatccagggatctgtggaaaggcaccgcaaataccaggatcctctaga

SEQ ID NO: 13130 - DNA, 454 bp, Homo Sapiens
  misc_feature (267)..(334): n is a, c, g, or t
gaagtaattacttttaaaactatataaagacactaccgaaggcaagacatgaattctagatgagcaactactggaaggagggacaaaaagcatttcctagaggccagacactcagacatctcatccccacagtagctctcatcttcaggaaacagctttgtcttcaggggaggagaaataccaggggcagggcactactgaaattcaggtctgtccagcttcaaaactcatgctcttgaccccctccgtacttctgtttcaggatgnnnnnnnnnnnnnnnnnnnnnnnnnnnnnnnnnnnnnnnnnnnnnnnnnnnnnnnnnnnnnnnnnnnntcgtgaaaagtaagtaactcctaaaaattgtcttgctcagtgccagacccagagttagtgcttcatatgcagtagctatttcatttgtattaaactatactgtcatggtttggcatacat

SEQ ID NO: 13131 - DNA, 1019 bp, Homo Sapiens
  misc_feature (164)..(164): n is a, c, g, or t
ttcattaccacgaggcagagacgctgaaagacatagcaaggagatgagacattaggaaatcagctggcagaacaaagcctcctgggagcagtttttccagatagtcccaatagctaacttggcagcagcaggcatatttcagacatgagccatagaccttttgnctcctatgggcaatgcttccgattctctggagttaatattcgatcccgattttgttcaaagagttctaacatcctctccatgtggtggtcagcctcaatcaccagaacaggggctgccatggggaaaaggctacctttgatgagccactcctcatggagatggtgaattgcttccaggtattccagcggaatgaccttctcctcttccctgcatctcttctttaacctctggtaacaagtctcaggattggtccgaaggtaaactatcaaatcaacagacacgtccatgttcctccaagatccagtcaaaccattccgacagaactacatagtccacttctggcatcttcccacttctatacaggttttctacaaaaatgtatcttgcgctgtgaatcgacctctccatcaaccgtacagatgacacctgaggacgagtatgcctgtccagcatggtgagctgcacataagtctgtagcgtaagaccccagcgagaggcatcgtggtacatcaggcccagaggattgtggccacggacatttctccacttggacacaggctccgttaacacctcgacgtctgtcgcgttggagaagaattccaggcatgtcgtcttcccacttgcaatattgccctcgacacagatcactgattttttctctttttcctgttctttatcgggaggccaggcccggcgctgcaccctccgcggcccggggcctgaggccgggctcccgcgacttcccggcccaaagcagcgcagcgcccgggcggcccagccccgcagcggccacagcagcatagccgggcgagcggatccagaggcccggggttccttcttgtgcgagtcggcgc

SEQ ID NO: 13132 - DNA, 269 bp, Homo Sapiens
tcacaaaccgctgagttataaagaaaggagccctggacacgaatgtcaaaaatagtccacaaattggaaggcgtgcactgaggctccaggtggccatgatgcagcagactctgaactcctgtcactgcagagtcacagcatttggccgcagtagaagccagaacctagcaccacaaccaacatagtcacagcatgccaaggccacaggactgtggggaagcccagatagcgcccgtgcagcacctcgttactacggaaaaagtagcaca

SEQ ID NO: 13133 - DNA, 448 bp, Homo Sapiens
tttgtgcatgcacagggtcagggatgcccggagcccccaggagctgggagaggcaggaagggccctcccctagagcctctggagggaactggatataattgtagtggattgaatggtggttcacagaaagatctgtccacatcccgaagcccagaacctagaatgagactttattaaaaaataaagaacctttgcaggtgtaattagttagagatctagagatgagatcatcctggagtagggtaggtcctaaatccactgaccggtatccttctaaaagacagaagaggagacacagacacagaggagaagtccacgtggagacggaggcagagactggagtgatcttgaccacgaagtcagggactccccgagcccccagaagctgggaaagccaggaagggttcctaccctagaagaccgtccagaggatcacaaacaggatctc

SEQ ID NO: 13134 - DNA, 340 bp, Homo Sapiens
tttgactaaccacactgccaaagtcagaaacaccaaaggaacagactcagcgtcaatataggtcaaaggatcaagatggttttgtggcactctcctcttcccacttgcctgacctcgggcacagcctggcaggaggtcttgttcttcaagggagggagtcattgccacttgtggtctcaggcttggggtgaggaaaaaggcgaagggaagggagaaaatccactgagtctaatgtgttcccactttattctcactccagaactccccatgtagagaaaagagaagagtgatttcatggcagggcagggagtaaataaaagaaactcttatctttgaaaaa

SEQ ID NO: 13135 - DNA, 710 bp, Homo Sapiens
  misc_feature (472)..(551): n is a, c, g, or t
  misc_feature (585)..(646): n is a, c, g, or t
cggcgtgcagccccacggccgggctgtagcgcgtgagctccaggaacacagcgcggctcctgcgcagaggggtctggctggactaaaggcaaaactaaagcccagaagacagaccagtgcaccggatgcccgtaccgcgtgatggccaggaaggcccggctgtgcagctcctgcttgatggcgctttgcagacggagccagtgaccaccgaggctgtgccactgcatcgggccaccatgctgatatgcccggtcccagagctgctagagaagaggtacagaggcagcgaagacacgttgagggggaggacgagaccaactgcgagacgccgagtcccgggctctcaggacgctctcccgtacctgcgccctcgtcagcccatcaccgaaagaacggcctgacccagggtcacactgcactgaatgcttcctgttttgctgtctctcggaggataaaagacactcttggctgnnnnnnnnnnnnnnnnnnnnnnnnnnnnnnnnnnnnnnnnnnnnnnnnnnnnnnnnnnnnnnnnnnnnnnnnnnnnnnnnagtgagaccctgtctttacaaaaaattaaaaaannnnnnnnnnnnnnnnnnnnnnnnnnnnnnnnnnnnnnnnnnnnnnnnnnnnnnnnnnnnnnttctagaacccaaatcatctgccagatcagaagtcatttttaaattacaattaaattggttcat

SEQ ID NO: 13136 - DNA, 465 bp, Homo Sapiens
cgttaagcagactcctgaattcgttgagtcatcatacctcttctcatctcttctgttccctgtggcttcaaaacatgtctcggagggtggcttggagaaaaaaacaactctccagtacaaaacccttgggctggttaggattcagagaggaacacatggggaataagcccattcttcatgctctggggccttcccaggttttaggagtggtgtctttctttctcctgctcataagggtattgggcggtttccaagcctggtttgtatttcatcttcaattctaggattgtcgtccagatgtcaaaggtggcgtcctggtgtctcctgggcagaaagtccgaatgccaaagtggccttcttatcactctggggtctctcaatgacagctgtgtctggcctaccagatttgagcaaaccttgtcatctgtttcattatctgctgtattaaaatttaataatggcaaa

SEQ ID NO: 13137 - DNA, 470 bp, Homo Sapiens
tactgcacctggacaagcaactggggcaaggcccagggactccatgaaggttcaaggccccaggacctctgctccctaatctgccctgagaagctcagagtctgggggcagaacacatgaactgaaggaaggagggcagaggcagtgactgtccacttggtgagcttgtacaagtccacccacctgttctaactcaagaaagggaccactggttcgagagagtattgagccaggcctgggagctcagtgcctgctttctgcctagaagccctcctcctgtcccttccagcattcatgctatgtgtctggccagagggccccagcccagcttctgccctctctctgaatgaagatctaccaaaacagtataactgaccaaggtttctttccaaagggtcagtgttaaggcaaagctcttagaacagcccctcacacacagtaaatgctcaataaatgttggcctttttttt

SEQ ID NO: 13138 - DNA, 475 bp, Homo Sapiens
  misc_feature (186)..(221): n is a, c, g, or t
tgtgtacctcccaccccccacaagaaacaagtgcccagatccttaaagacacagtttgttggagtagagctaagagaacccctggctcaggaggtgggggttccagcagcaggggaggtggtgggggtgctgtggaaggtggagatggcagtggcgacccccctggaggttctgaaatgtcctgannnnnnnnnnnnnnnnnnnnnnnnnnnnnnnnnnnnatgagtagatcctggccatattgtccaggcctcaggtcacccacagagctgtacagtcggaggttgccattgactagtgagctggtacctgtcacttctttgtctgcaaaatcatctggaaccgagggggtgggcacagccagcccatggttttcctgggcattcagcggaaggaaggtcagcaggggccggactcttggccgagctttcagcgtggctgttcctgactcgctcactgtgtaacccgagcgtaa

SEQ ID NO: 13139 - DNA, 326 bp, Homo Sapiens
tttagaaacataggccaggtcattgtatagggagtaagatgaaggtgaatttgcagctagttgaataattagcaaatgtccaagtgaaagggatacccagagggcattatcctttacccatccttctcaacgtctttatccgtgatgtagatggagatacagaaggcatcctcatcaaattaatggagtcatcaagcaagaaggaatggtcaaactgtgggaagtcagagttaggttgcgaactatctacgcaggtttaataatggtccgaaaacaaaaggggaaattttacaaggatctgatgcatttggagtctacatctaagt

SEQ ID NO: 13140 - DNA, 588 bp, Homo Sapiens
accggcaggcggcggaccgcggcccaggctgaagctcagggccctgtctgctctgtggactcaacagtttgtggcaagacaagctcagaactgagaagctgtcaccacagtagcttggagctcggcggcacaaccagcaccatctggtcgcgatggtggacacggaaagcccactctgccccctctccccactcgaggccggcgatctagagagcccgttatctgaagagttcctgcaagaaatgggaaacatccaagagatttcgcaatccatcggcgaggatagttctggaagctttggctttacggaataccagtatttaggaagctgtcctggctcagatggctcggtcatcacggacacgctttcaccagcttcgagcccctcctcggtgacttatcctgtggtccccggcagcgtggacgagtctcccagtggagcattgaacatcgaatgtagaatctgcggggacaaggcctcaggctatcattacggagtccacgcgtgtgaaggctgcaagggcttctttcggcgaacgattcgactcaagctggtgtatgacaagtgcgaccgcagctacaaaatcc

SEQ ID NO: 13141 - DNA, 687 bp, Homo Sapiens
agccagttctggactgatcgccttggatgggataccgggggagggcagaaggacacttggcttcctctccaggaatctgagcggccctgaggtccgggggcgcagggaatcccctctcccgccgccgccgccgtgtctggtctgtacgtctttagagggtcgaggaagtcacgtcgggacagactggggcgagtaaggttaagaaaggctgacatgttttatgttttagtgacgacgcttaataggctgtatatctgctctatatgcagcacatacatacatagctttttaaaaaactcttattttgtggaatgaaatagctaccttcagtgtacatagctgtaatttatctttgtagctaagttgctttcaacagaagaaatactgttctccgtaccttcaccccctccttgtttcttggaaagagaggcgggaaaggtaaattctcctcataatactggtcctaagcagttaccctgtaaatagttaatgtgagctccacgggtcaccaatataaagtttcctgccttctgatggacaaaggaagcggcgatggccagaatttgcagggacgctaaatgtccaaaacgtatgccttaaggcatttctctccctgatgcgtggattattttggttactagcccttcataggagatactggtaaaataaattaaagttttaaagttc

SEQ ID NO: 13142 - DNA, 521 bp, Homo Sapiens
actccgtctcaacaacaacaacaaggattttagttttagtatgcctgtataaattcaaggtgcaaaggcaacatttcctggctgggagtttactggcagggcggcctgtgcagagcatctactcttgctgttgaagtaactgagggaaaggtgctgatcttgctaaggagaacacaagccctaatcaagccaagctcacctctatttgagtgcttttggtgcagtttgtggcttttttccaatatggtaagtttcctttggaatatatttagagcaaaattgccattgtcatggtatttttgttttgtacaagcttcaaaattactactttggaatgagaggtatagttgagttggctggctgtgagtttaccatttgtttctctttagccaagagatcattattataatgtttcaaataattttccacttaaattataccattttctctaaatccaactgcttagtatatgaaaagtaaaccaaaggattggtatgaggtgtaataaaatacattaaaat

SEQ ID NO: 13143 - DNA, 377 bp, Homo Sapiens
tccgtggagtaggtaatgttgaactgagactgaaaaggactagcgagtatggatcaggccaagaagggaataaaggagaaaaggaacttgagcaaatatggactgaaagtatacattttttttgaactcgggagtctactacccggggccttctctccccggaggctctggtgccagctgcctgcccctctgtttactgttctgggaggtggccaggccataaaaagtgtgcacagcctttctgacatcgccctttgctcccatgataacagtgcacaaggtggatcctggcctggcacaggcccctgaagtgcagcaggcacttctctctctcctcctaccagtgccctgggagacccggaaggatgcaccaaaac

SEQ ID NO: 13144 - DNA, 180 bp, Homo Sapiens
cgatcccagctgttcaaggacatgatggtatatcttggcttgccgaaacctgtggtggaccagttagaggcttcaggtgaggcagaaactaccctgctcgtagcggtggatggagaaatagaggacactggggtcctggtcgaaggtgaactgtgttccttgaccgtggtgcacatccca

SEQ ID NO: 13145 - DNA, 435 bp, Homo Sapiens
aggtgcggagttcgagcgtcggtggccttccggggtttgtgcagccagtcagtagtcaatcctctaactatcaactaccaatacctctcagatctctaaccctagtccagaacgtttcctgagtcttggctcataaagccaactgcctaccacaaggcaaccactggatgctccacagagcctcaaactcaacacatcccacactaaactcctcatgttctcatcttcctgctcctcctcccctaagcataatggaacctccctgggcattgtcaaaaaaccttcaaaggctccctacctgcaagataaagcccaaagtccctaccctaacatgcgaggcacagccatcatctgttccagcctcactgtccattgcatccctcaggtcctgagcatacgccacaaggggagcacaacccggaaagatcctctaga

SEQ ID NO: 13146 - DNA, 469 bp, Homo Sapiens
ccctaaaggaaccctgtacccatccacattttttcctaacctccccagctctaggcaactatcaatttactttctgcctgtacagattttcctattctgggcattttgtataaatgaaatcatacagtacatggttatttgtgactggcttcttctatttagcataacgtttcagggtttcttcatgcctagcaggtttcattatttcattcattttatcgccaaataacattccattgtatgaatataccacactttacttattcattcgtcagttgacgggcatttgggttatttccattttttggctgttattagtaatgcttctgtaaacattcaagttttcagtggatatatgttctcatttctgtagattatatacctaggagtggaatttctggatcatatgttaactctatgttcaaccttttgaaaaacaaccagactgttttccaaagtggatggacaa

SEQ ID NO: 13147 - DNA, 678 bp, Homo Sapiens
ccccaccttgtgaagcttatggagtactgccagcatggcctgaagaaaggggccacactgttttgcggcgggaatcaggtccctcgccaagggttcttctttgagccaactgttttcacaggcgtggaagaccacatgttcatagccaaggaggagtcttcgggcctgtcatgatcatctctcggtttgctgatggggacttggatgccgtgctgtctcgggccaatgccacggaatttggcctggcttctggtgtcttcaccagggacatcaacaaggccctgtatgtcagtgacaagctccaggcaggcactgtgtttgtcaacacgtacaacaagaccgacgtggccggctcccttcggaggattcaaacagtctggatttggcaaagatctaggagaggcggctctgaacgagtacctgcgggtcaagacagtgaccttcgaatactgaagaaaggtctttgtgagaagaaagtccctgcccctccctcgtggctggggccccctccctcttgagcctggtgcacagcacctcccacctggggggctagtggaagccctcctgcctgcacaccatgtctgcatcttggacgccctctgtccagtcagaatgcacccttggctgggtgaggtgtgcccctcccagggagaataaagcttctgaagagagaccgtc

SEQ ID NO: 13148 - DNA, 361 bp, Homo Sapiens
ttgtgcatccctgcactgggagtaaatgcctccaggacccacttcgcgtgctacttccgcttggggggggtgctgggcctgtgttttcctttgcctgggcattctcctcatgtttcccacctggagttccgcttttccaactgccccaggtagtcagggtcagggaccttggacttgtctcttactgctgaccagtctgtgctttatgggcagagatgagacccaggcccgtgtctgccagctgaccacctttcagccagccttgtcctcctgtcttcctatctttatcatttggcaagtcctcagcttctgtcagtgtcttagggcagataggagggcatttccttgcacaaacccggaa

SEQ ID NO: 13149 - DNA, 613 bp, Homo Sapiens
  misc_feature (556)..(556): n is a, c, g, or t
aaggaatatcaagtcccagcccctgcaacccaggctgctgcttaattttcatgtcagtatcatcaaaatccaatgttctgcttaaactcaagatggaaagtccagtccaaggtacactgttcatctttttcttcacattttgcacatccttcaaggggatctttaacctctttgaacctttgtgattgcacctcagatgaatgtgctttttgagctcagtacactgaaaccatatgataacacaaattcacatataattgggggttagtcccatactctataacagacttagtcctgtcttttcattagccatgtaataatataactccatgttccatgcaactggatttttggaccctgttaatagcattaaggtagaggtttactctatcaccgtaacacctcagcactacctgtgggatgccttagttacccagcagcaggttaccaagggctgtctggaaagggagggacaaaaggacccagaagtagaagatggggatggagtggtgagaattgaatggtaatgcactgccattcataattgccaattganggacacacaaatgggattggtactttatagtaataaatctgaccagcagaaggaggg

SEQ ID NO: 13150 - DNA, 676 bp, Homo Sapiens
ccccgcgccgaccttctgctcttataccactctaccatgagctccaaaagtttcagggactgggaacagtttgaatataaaattcaggctgagttggctgtcattcttaaatttgtgctggaccatgaggacgggctaaaccttaatgaggacctagagaacttcctacagaaagctcctgtgccttctacctgttctagcacattccctgaagagctctccccacctagccaccaggccaagagggagatccgcttcctagagctacagaaggttgcctcctcttccagtgggaacaactttctctcaggttctccagcttctcccatgggtgatatcctgcagaccccacagttccagatgagacggctgaagaagcagcttgctgatgagagaagtaatagggatgagctggagctggagctagctgagaaccgcaagctcctcaccgagaaggatgcacagatagccatgatgcagcagcgaatggaccgcctagccctgctgaatgagaagcaggcggccagcccactggagctccaaggagcttgaggagctgcgtgacaatgaatgagagccttaccatgcggctgcatgaaaccctgacagcagtgccaggacctgaagacagagaagagccagatggatcgcaaaatcaaccagctttcggaggaga

SEQ ID NO: 13151 - DNA, 419 bp, Homo Sapiens
gtagggcaaggtctcgccaacagtggcatcttctgggatggcacctgctcagtgggagatgaggcacaggtttgcttacaggtggctcaggactaggagaagcagggctgggacctataggcacaaggcaaatctcaaggggtgtttcagggcttcactgcagagctgtcttcttggctggggctggtgggatgacaagacaagggatgtctgccagccctgtgggagtctctggaaggctaggccacttcccagttgggggctgtggacttctctcttctgtttctgcttggcgttgctgccttcgtcgccggtactcagataagctgagaggccgaggtctggcttcatgggttgtagcactggtaccactttcaattttcagagaatccacaacctctttgacttcagggatgatg

SEQ ID NO: 13152 - DNA, 407 bp, Homo Sapiens
ttacacagggagccaccaacctgcaggccacaggtgcacccttgcagaggtgactggttgctccttgagacagctttttccttgcccggcatgcacaagcctcagtgcaacaactgtgctacaaatggagccacagagaggaaacatagcagcaggctcaggagcagggtgtgcgctgcctttgggcctccagtccatgcctcagaactcatatgacactgcaggcttcttggttaccaagaggcacacaacaggccagtctcgaggaggacttcatgttcaagtgcagaaagcagccaggataaccatccaggggacttggccttgcccggcatgaacaagcctctagtgcaacctctctgctagcatatggagccacagagaggatacgagctagctaggctcgg

SEQ ID NO: 13153 - DNA, 270 bp, Homo Sapiens
aggatgtcaagcagtgcccccaaaagctgtcaaggccgtcctagaccagcggggcctcaggagatggtgcaaagtcctggaccagacaaacggcactgggaaagcaggagcccaaaggaaggctggaattcagggaagagccacgtgccaggctgtgacgaaggcgacaaaatgaaacagtaggggggcgggggaggcatccaaactctatgtgctgtctttgcactactctgtaaatctaacattattcggaagtgaaagttaaaaatc

SEQ ID NO: 13154 - DNA, 640 bp, Homo Sapiens
tggggtccatcctctggctcctcgagacccttcatcctcatttgattgagcacagtctcagctcccaggacattgtatcttttctcagggttttcttttgcatatttcagtgcccactgggtctttccagatccgggtagtcccaccatcagaatcacctcacattcctctatggtcttgggagggactgcagtgcgtacacgctcctcaacaggcacagcatgaatgaacacaaactcttctggtggtgggaagaagggctcctccttctgaccgaagtttaattctacaacacaatttttgcagaggacatggggtagaagggcccggtctgccagggaatccttgctgatccagaatgccacacctaggtcttctccattcttggagaaggaaagttctacttcttcagtctcaaaattagcaaagcagccaataacatcattctccccaaaagtctggccaaattcctcaaattgtccattttctgccttgagtcctcgtccatcgaaaccgtaagagaattcaccttcacccagctgtggacgggacaaatcacagaccaccccactcgaaggagagagacctctgtcaccttctttcactgggagactctgggttaccttgcctctaacagact

SEQ ID NO: 13155 - DNA, 727 bp, Homo Sapiens
cgccggctccggctgcagttcccgggtccctcggccaccgaagccaccctgccctggtgaaagggctcccgcaccgcccggtgctccccatctgcctggcgttgtgcgcagagctggaaagcatggctgttataaatgaattctgattttggggagcagatgccaacttagagcctcgtaccaatctctctgtctttaaaacgatgaggtgacttggtgattttcctggaaaattatagaggctctccagcagagaacccaggcccttcaccatactggtgcatggttcctgccacttgtgcagtccattccgaagtttcttacagatgaggtgcccagctaagacctgaatgccatcaccctccccagggctctgcagttttctcgtggtgaacccttgatggatttgttgttgcttgagaaatggcgatgatcgaattggggtttggaagacagaattttcatccattaaagaggaagagttcattgctgttgaaactcatagctgttgtctttgctgtgcttctattttgtgaatttttaatctattacttagcgatctttcagtgtaattggcctgaagtgaaaaccacagcctctgatggtgaacagaccacacgtgagcctgtgctcaaagccatgtctttggctgacacccatttgcttggcggacattcctaggcccacttggctgggacaaaattaacgaaggggaatgggcagaatg

SEQ ID NO: 13156 - DNA, 388 bp, Homo Sapiens
ccagtgccttgctgtgccatgtgggacaaatcctttcccctccttattgggccctaatttcccatctgtgaacagttcatagcaacttggggctgctgggaggagggcaagcaagcctggaacccagagcgtggccagaaatgatgtcgacgatgcccatgaccacctcctctgttctccaagacctttgcctctcctcaggcccctggtcacctttccctgggtcttcgttctttgatgtgagaagagggcagctttaatcccccacctgatagagaagaaaactaagctgtggagtagggtggagtgagggagtggaaggaaggttgtggtttcctggtgaggtgtgatgcttagacctggtctctaaaaataaaattaaagttaa

SEQ ID NO: 13157 - DNA, 443 bp, Homo Sapiens
ctgagcatctaaaatgggcagcctccatccacccgcttcagggaggaactggactctctgggggcaggtgccaagatttgcccccccagtggccctgggctgggcctggcctctacagagccttttagggggagggggtactcatgtggatgcctacttggaacctgggcctctgagacatgtcctgaccaccccccagggcatttgcctccatcttcaccccagattgtgggtttcccatccccctgactttacccctttcaagcctggggttgtctatacccacagcccttagggacttaaagttacggggcttcgttgaatgctccttcccctaggcagctggtaatagaggggtaaagctctgggcccctcctccctgctgccacttatcccagctccaagtttttttaaaaataatattattaaaaatgtaagttaaa

SEQ ID NO: 13158 - DNA, 885 bp, Homo Sapiens
agaaatagctggtgattacagatttaattcatgttattaactccctgccttttacctcctccctcctcccttggcacaactgccagatggatgtggctggaagtcagaggacattctcgtgggttcgtgggcctagggtacaaatgacctcagcgtgacagcaaacaggacagagaagaccaggctcttactcaggaatccaccagccaggagaatgacaatgttgaacaccggaaccctgatgatatctgtcacatttgtaaggttgatttcagagtcaggagtggagacatcggcagttgacttgggtggagcttgggtcacagttctggggctggtatagagtgggcacaaggccttagtggtggtaggaggaatcttatacacattctgggtagaattctcattggagccaggggtccctgaaaaacccttggtcaccaccaagcggatgcgatcgaacagcatgtgaggctccttgggaggctggtagatcacacactgatacagtccagaatcttccacttgaaggttgaccattcggacgcgccagtaaaccatgatcatggtagtcttctagtatgatcctccccacttggactggatgggaattctttgaaggcctctctgtgcatgccagggtcttgggcatctctccgtcccttattatctgccaagctttctggctgctggcaaacttctctagcgtgtagtcacatttcacatccagggtctgcccctctttcagttcatacttttcctcagttaatttagttgcagctcggagttctgagacaaagagcatccacagcagcccccagagcctggtcttcctcatccttcctgtgcaccagcgtcgaccggccgcgaatttagtagtagtag

SEQ ID NO: 13159 - DNA, 568 bp, Homo Sapiens
  misc_feature (27)..(27): n is a, c, g, or t
  misc_feature (102)..(102): n is a, c, g, or t
acgatctgtgaagtcctggaacgctcncactctccacccctgaagctgacccctgcctcaagtacccaccctaacctccatgcctatcttcaaggcaacacncaggtctctcgaaagaaacttctgcccctgctccaggaagccctgtcagcatattttgactccatgaagatcccttcaggacagcctgagacagcagatgtgtccagggagcaagtggacaaggaattggacagggcaagtaactccctgatttctggactgagtcaagatgaggaggaccctccgctgcccccgacgcccatgaacagcttggtggatgagtgccctctagatcaggggctgcctaaactctctgctgaggccgtcttcgagaagtgcagtcagatctcactgtcacagtctaccacagcctccctgtccaagaagtgactgttgagaggcgaggaggtagtgggtgaggctacctgactcacttcaaatgcatgttttgagatgtttggagattcagcaattctgtcttcattgctccaggatctggtatactgttctcataaaactgagagga

SEQ ID NO: 13160 - DNA, 583 bp, Homo Sapiens
  misc_feature (260)..(273): n is a, c, g, or t
tggagggctagaacctggagatggagaaaaatttacatggcaaagagcccataaatcctgaccaatccaactctgaattttaagccaaaagcgtcaaaaaaaagattccctccttacccccaacccactcttttttcccaccacccactctcctctgcctcagtaagtatctggaggaagaaaacaggtgaaagaagaagtaaaaaccatttagtattagtattagaatgaagtcaaactgtgccacacatggtgaatgnnnnnnnnnnnnnngaggctgtgttttgtcacacagggcagtcattcagcaccagagcacgtgatggtctgagactctcttaggagcagagctctgccgcaatggccatgtggggatccacacctggtctgaggggcaactgagtctgcgggagaagagcggccctatgcatggtgtagatgccctgataaagaacatctgtcctgtgaaagactcaatgagctgttatgttgtaaacaggaagcatttcacatccaaacgagaaaatcatgtaaacatgtgtcttttctgtagagcataataaatggatgaggtttttgcata

SEQ ID NO: 13161 - DNA, 548 bp, Homo Sapiens
aggaggtgttcacagaactgcaggagaagtatggggagattgaagagatgaatgtgtgcgacaaccttgggaaccacctcgtggacaacgtctatgccaagttccgaagggaggaggatgaagagcgggccgtggctgaactcagtaaccgctggttcaacgggcaggctgtgcacgggaatgtacccgaggtggcttctgcaacttcatgcatctgcggcccatttcccagaacctccagaggcagctctatgggcggggacccaggcgcaggtcacccccgaggttccatactggccaccatccccgagagaggaaccatcggtgttcccctgatcactggcatggccgcttctgaggccctggcccccttacccttcacccccaacagggacagatgttcctggcaggacctctcctcaaagcccccttcactctcctgccccatccttcccaggctcccgggctccataatgtaatctgttcagcatggagaccttcttctaccgcccctgtcttaataaagctgcgtgtttcccttcggcatc

SEQ ID NO: 13162 - DNA, 321 bp, Homo Sapiens
gttataaaaagatgacctatctataaactgccactccctcatttatcaggcaagtttgcagctctgtgaattcaatgcctctgtgctctcattcagggacaaacaagaattttcctgtaaggacagccacagtcacattctcatttccatgcctaagagcctgaagctcgaacaaagggcttcagttagtttcatgtgagccaaaatggaatgtgagtgccattcagagccacacactaaaaagatttcagctgggacactggctcccacagtcctgggggagcaaattccggttgtgtggcaacaaaggctatgctgcca

SEQ ID NO: 13163 - DNA, 275 bp, Homo Sapiens
tatggaaccaattgtgcaataaagttccctctctgtgaaagggagggggttctggcctggggctcgatgtggagctcctgcttgatggcccatggccctccagagaggaagaggacaaagccagtctgactcccgggggaatcacggtgagtctcaataatgtgttgctttcccaaaggcctgtgctttaaaaacaaacacctgctacttgtccaactcccctgacctgggaaggggggaaggggagaaccatgccgtcctgcctgttctcccat

SEQ ID NO: 13164 - DNA, 605 bp, Homo Sapiens
ccggggtctccctggaccttgacagagcagctaactccgagagcagtgggcaggtgcccgcccctgaggcttcacgccgggagaagccaccttcccaccccttcataccgcctcgtgccagcagcctcgcacaggccctagctttacgctcatcacctaaacttgtactttatttttctgatagaaatggtttcctctggatcgttttatgcggttcttacagcacatcacctctttgcccccgacggctgtgacgcagccggagggaggcactagtcaccgacagcggccttgaagacagagcaaagcgcccacccaggtcccccgactgcctgtctccatgaggtactggtcccttccttttgttaacgtgatgtgccactatattttacacgtatctcttggtatgcatcttttatagacgctcttttctaagtggcgtgtgcatagcgtcctgccctgccccctcgggggcctgtggtggctccccctctgcttctcggggtccagtgcattttgtttctgtatatgattctctgtggttttttttgaatccaaatctgtcctctgtagtattttttaaataaatcagtgtttacattaaa

SEQ ID NO: 13165 - DNA, 580 bp, Homo Sapiens
gaccccggtttgatcgaagcgtgggtacaggttggaagtaaaagcaacatagcgaagagtggagtcggaggttaaagtctctggataacttttccaagcgggtggaatgggagtagggtgaggaaagggtgctttgtctcagaaccagtcctttagttcctgactctgtgtggatgagaggctcctccagaggtcgctgttccccaggaatccattactagcgtccgcaccgcgaggccagagctcccactgttcccctggctttgcttctatgaggcttacgcggctctgcatctgcccagaggactcagggacgcggcaatatttccgcccccacgagggtacttacggcctcgccagttaccctgtctgggactcagaagggttacacgtgaaggtgagcgcatgtgcatgtctatggtacacacaggtcgctatggctctgcaccctccctcctgcgctgccccaattcagggccggaagggcgtcctgttcccgaggtgccctgtgccagcaggcggcgtgtaattggtaggagggaggctgccctggagtattcttgctgtccctcagttctct

SEQ ID NO: 13166 - DNA, 340 bp, Homo Sapiens
  misc_feature (45)..(45): n is a, c, g, or t
gtcatctagaggatcccatggacaggcagacgccaggggacaggntcagaaagaggcagccacaagctgagcacagctgcagaggttttagcttgcttactacatttgaattaattgccaaacttttaaactcaggggaattccacaaaaatctaggtaccagcttttcttgaagacaacggaagctcaggccaccctgaggccatcacctctggcagtcacctgccaagcacgtggctccagcttagcccgagcgcctccacctgccccgtcaaggcccagatgcagtggcccttacccatcacacttgcgctgttctgaccacagactcacagtcatg

SEQ ID NO: 13167 - DNA, 327 bp, Homo Sapiens
  misc_feature (305)..(305): n is a, c, g, or t
tgtaacattgttggatctctgtctttctgcacatccttaattatgtccttcagatcaattccaaaatgtagatttgtctgagcaaaggtgtttacggccttgggcactcctgctaaattgctgttggagcacctgcgccagctgaccttcccacctgcaggagctaggtctaaacatgcatctttccctccaccatggaaagtgctaggcacctgtctctcttactcttcccaagtgggtaaggtaagcagccccatcgagcagccccatcatttcactttgaatcctgcggactgtcggtgagntacctgcagctgtgtctgcctg

SEQ ID NO: 13168 - DNA, 267 bp, Homo Sapiens
gggtgatctagaggatccctatggaccaggcagactggtggcaggctggtgcagctggagctcttcctccttgtctcctcctcctcctcaaaggggttatagggtttggactccaggctgcctgttgggctcgtgtgggccacctcctcggtgcctccattctccacctgcctgctgtcctggcttggtggccccgggctgctgcttgggggaagtggggctggcttcttctttggttctgcctgcaccaagcgtgatccatggggg

SEQ ID NO: 13169 - DNA, 309 bp, Homo Sapiens
atgggcaggcagagtggtcctgctccagcagccggttcccggcgcaccaaacaagggcgaaaggcgcgggcctcacatgttgctgtagcaactcggagaagagggtcgagggccagctgctcgtatttcgcctcgcgcgtggctcgggccgcctcggcctccgtctccaggtgcgacatctctttgaggattttgcaggcggccagtgcggctgccacaccttcctgcccatggcccagaagtaggtgccatctcgtggcggttctgcagcacgtaccacaggaacagtcctgcctggtccataagctg

SEQ ID NO: 13170 - DNA, 767 bp, Homo Sapiens
  misc_feature (83)..(84): n is a, c, g, or t
  misc_feature (110)..(110): n is a, c, g, or t
  misc_feature (129)..(129): n is a, c, g, or t
  misc_feature (147)..(147): n is a, c, g, or t
gctcagcagcggggaggaagaggcggcaggctgcagcattgtgccgggtagccctgccataatgccatctggcaccgcgcacnncgaggctgctgcccgaagagccacgnttaagcagaggttcccgcntgcactgtccccgcaagncagattcgttccccgttgagccaaggagggcgcagtgcttgatggcccagcagtaggcgaagaagcactcctccagcgcacggggaagggggcctcaggggccagggagtagtcgatggagatgatgggggcgcccagctcctgggcccagctcttgaggtagggctcgtgggatctggaggtctgggccacaaagccaccgccgtggaagtgcactatcagggaccccgagcggggtgcctgctgggggcgcggccacagctccaggctccgttggccgttggactttatcaggctgctgagctcctcactgtcctgtccttcacgcaggtcataggagatgagcctgacgaggacgggcccagggcctgtgtgggccagtgggggtgagatggtgaccgtgagcgtggggtcggcagtcagtggcatctcaaaggcttcgggtggcaggctgagcaggcggcttaccctcacggtggccgatgccatgttggccagagacgatagcacttccatctcggtgatgttccagaaggctttccagaagtgcacgtccaggttctgtgtgatccgctcaaactcagccccacgcagctcggggtcgatggcaaagcggccgc

SEQ ID NO: 13171 - DNA, 831 bp, Homo Sapiens
tccgcagttgactagcacctgctaccgcgcctttgcttcctggcgcacgcggagcctcctggaggcctgccaccatcctgcctactacgtgctgccctgcgcccgcagccatgtgccgcaccctggccgccttccccaccacctgcctggagagagccaaagagttcaagacacgtctggggatctttcttcacaaatcagagctgggctgcgatactgggagtactggcaagttcgagtggggcagtaaacacagcaaagagaatagaaacttctcagaagatgtgctggggtggagagagtcgttcgacctgctgctgagcagtaaaaatggagtggctgccttccacgctttcctgaagacagagttcagtgaggagaacctggagttctggctggcctgtgaggagttcaagaagatccgatcagctaccaagctggcctccagggcacaccagatctttgaggagttcatttgcagtgaggcccctaaagaggtcaacattgaccatgagacccgcgagctgacgaggatgaacctgcagactgccacagccacatgctttgatgcggctcaggggaagacacgtaccctgatggagaaggactcctacccacgcttcctgaagtcgcctgcttaccgggacctggctgcccaagcctcagccgcctctgccactctgtccagctgcagcctggacgagccctcacacacctgagtctccacggcagtgaggaagccagccgggaagagaggttgagtcacccatccccgaggtggctgcccctgtgtgggaggcaggttctgcaaagcaagtgcaagaggtcaaa

SEQ ID NO: 13172 - DNA, 697 bp, Homo Sapiens
ccagccaaagaacaccgccaacacgcacacctccaacctgggacatcccacgctgggcctcgcacggaggaacctgcagaatttggattctgagggtagtcgggaggcctcggtagccaggcagaacaggatatctgccaaagggtgtctgatgtggggtggggctggcatcctcccaggaaggttctaggtgggaccccgtcttctgggggcgggggtgtcttttcatcttccctggtttcctagaactcacttcctttgacggcgtgtgttggtcccatctctcagaccagctcactgaggcagaggagttgctcagaggctcacatgggcacccccattggttcgtgtgagcagctgcccagccccaggcctgccctcggcctggtccagcatgaaggcgtttccatctgcaaggatgcacggtaccctccccgagagcaggcctgtcccctacccaactgggaataaactggaagctgggtctctttgttgctatgtttttttgtttgaagttcccaggaatatttgaggggttccggtgatgtgtttagggatcttctctgtgggggaaaaggaagaggagggtcttgttctcccatctgtttattctttgggctctgggaacaggggactactttggggctttctccagacttttgtatgttgttattaaaagcgagctattgcatttcaa

SEQ ID NO: 13173 - DNA, 188 bp, Homo Sapiens
gcggccgctccgacgcgggcgggacgggacgctagcgcgggtcactggaaccagggtgccgagatgaaagctccgcctctgcccagttgtccgccgctctccatggagcccgactcccgctcgcctccgctccctccggccgtagccgccaggggaagggcggctagaggcgcgcgccacgcggagac

SEQ ID NO: 13174 - DNA, 337 bp, Homo Sapiens
gcggccgcctacccgggagttgggagcgcgctgggacgccggactaagcgggcgcaaagccccaagggtagccctctcgcgccctccgggacctcagtgcccttctgggtgcgcatgagcccggagttcgtggctgtgcagccggggaagtcagtgcagctcaattgcagcaacagctgtccccagccgcagaattccagcctccgcaccccgctgcggcaaggcaagacgctcagagggccgggttggggtgtcttaccagctgctcgacgtgagggcctggagctccctcgcgcactggcctcgtgacctgcgcaggaaaaacacgctgggccac

SEQ ID NO: 13175 - DNA, 530 bp, Homo Sapiens
  misc_feature (374)..(386): n is a, c, g, or t
gggcacatagtaggcgctcaggaaatgattgctgaatgtggaatgaaagtccccagcaggcaaaaggctgtgacttctgttagtggggtggtggtcctctggggcgagtgtatggagaacttcaaggcctcctcctggctgcccaggaagtagagggcgccaaaggcgacgtgccggccgccagctccaggccgagccccgagcgcctgcaggaacaggccccttcacccggcgcgggacgcagagctgcgagagaatcttgttcagcgcggactcaacgccagggcgccgcctagaggttggtctctgtctcggcctcacccgccgggagaccacagagctgcttccccagccgcccgctgccagaaattggnnnnnnnnnnnnntccagctggggtctaggaactcggcttctggcacctctgaattctccgagactgtctcctccctccccgcctgtaatgaaccctgtgaagggagacaggccaggaagtcccagaaatatttattcttgtgactctaacaaaata

SEQ ID NO: 13176 - DNA, 745 bp, Homo Sapiens
  misc_feature (116)..(116): n is a, c, g, or t
  misc_feature (403)..(422): n is a, c, g, or t
aggatgtattttgtactaatatgacctgacgggaaaaccacatttcagcagataaattaatcagatttctaaaattaccatgccataattgatccccaatcatgaaattgaatttnccgatattccagagaaagattttcaagatgtgttaaagtgttgtttaaaaagggaccccaaaacaaaggatatcaattcctaagctcctggctcatccatatgttcaaattccaaactcatccagttaacccaaatggcaaagggaaccactgaaggaaataaaatatgttctgggccaacttgttggtctgaattctcctaactccattttgaaagctgctaaaactttatatgaacactatagtggtggtgaaagtcataattcttcatcctccaagacttttgnnnnnnnnnnnnnnnnnnnntgatttgcagttattcgtaatgtcagataccacctataaaatatattggactgttatactcttgaatccctgtggaaatctacatttgaagacaacatcactctgaagtgttatcagcaaaaaaaattcagtagattatctttaaaagaaaactgtaaaaatagcaaccacttatggcactgtatatattgtagacttgttttctctgttttatgctcttgtgtaatctacttgacatcattttactcttggaatagtgggtggatagcaagtatattctaaaaaactttgtaaataaagttttgtggctaaaatgacactaa

SEQ ID NO: 13177 - DNA, 440 bp, Homo Sapiens
gcggccgcggcagccacggcgtcctcggcgggtgcggcgggtgcggtgcgttcctggcggctgcgaaagtcctgcagggcgcggcggttctggaaatcgatgagcgccagcgcgatggccgcgttccagcagctctcgcccgcgcagcggaagtcgatctccttgtggtcggtggtgacgatggtgaagtacacgtacttgcccgtgcgctccacgcagtccaccttgaggatggagtggaagcgcagctccttggggcgcgcgcgggggctggcggggaacaggctcaggcggtcggaggtgagcaccccgcgcttcttcttccatagctggaagaggctgtcgctgcgcttctccaactcgccctcgcgtagcacctcgtcgggggatttcatgtcgtgccgagcgcgggactgggagcggcaatgcgggcggtgacg

SEQ ID NO: 13178 - DNA, 579 bp, Homo Sapiens
tacttctgagcttaattcagttgatgttatgtccaaattcaggctgagtgctcaggctgaagcaactctgtagcccacagtccgtgctggccactgtcggggtgaggcacattctaggcctggcatcgctgatgccctctgcacccagtccttgagccaggccaaggacaggaagggcattgctggcctgtagctcctgttacccacccagagccaggcgccacactggaggctcccaggcgggagggcccaggcccacccacgggcgtctggccggtcaagctaccagcctgggccgtggtctcctggggacgccgctggcctcccagcttaggcccaggtgccaggtgtcatggggtctcctgcccatcttcccaaggatgccattgctgtcttcatcgtcttcccccgtgtgagacactggttgtctggtactcggcgacagtgtaccagacgcgcaccctatgtgaggtgctttaaggtccctgtcctcaggaagcgcagtctggtggaagagatgagcgctgaacaaatcactaaataacacaaaacaacaatgtaagcagcactttcttgtgt

SEQ ID NO: 13179 - DNA, 440 bp, Homo Sapiens
gcactgacagcgctctctgcagctcgcgtcagaggcagaccagcctgaggctgctaaattgccgccagttctggggatcccgctcggagcttcggcgtttccaggacggagccattcgggaagctgtggtctgggaggcagcctctatgtcccagaagctgccttattccccaccaggtggtcacccacctcttggcactccatgctgacatcccagaaacctgtgtctcactatgtggggggccccctggatgcacttatccaaggcctgaaagagacctccagcacaggtgaggaggccctggtagcggcggtacgttgctacgacgacctcagtcgcctactgtgggggctagagggtctcccactgaccgtgtctgctgtacagggagctcacccagtgctgcgctaaacagaggtgtacccaccaactccagtcc

SEQ ID NO: 13180 - DNA, 348 bp, Homo Sapiens
caccaggcagactgaaggaaacgcgaaggtgttaggcaccggtcgcggaaggacgcagcatactctgcactgatggcccctcccgtgcagccgccccacaaatacacacctgcatggtcttcccgaggccagggctgggaaataccaagttctgagccagggattactccagcctcgacttgtacagccctgcttagagcaaaagtgagcttctgctcctccatccacacaagcccatccagcctcagccctgcttgaagactacgctgtccacaaacccctcccatgggccacgctggtggctccattctctgtggcctctggctaagtgttcacagctccactggg

SEQ ID NO: 13181 - DNA, 471 bp, Homo Sapiens
ggcaggactggtctgcgaagtaaacttctccagaggtgtcccttgttacattcacttcagctgcaaggttgacaactactgtggtttacagtctcccaggacgtccttctgcccattcttggaaaggccatcccccttattctggctcatctgtcgtgtcctcccgggcatgtcttcaccctctcctcctgtgtgagtctctgggccccttgtttcccattctgccttgtgatgattttccttgctggtttcctggtgttttgggtctgctattgctgtagggcagggtctgcatgtgtgtattcactgttgccctggcactgaatagacaccagtacgcagttgaatgaggggattcccagcttacagatgagagggctgaggcactgaaaggtctggggggtgcgcagatctctctggcttctgtcctgtctgaaaggtttgggaggtgcgccgatctcgctggcttct

SEQ ID NO: 13182 - DNA, 352 bp, Homo Sapiens
tacttggccccatgggacccatcctcagtgctccctccagatcccgtccggcagcttggcgtccacccagcacagcatcactgaatcacagagcctttgcgtgaaacagctctgccaggccgggagctgggtttctcttccctttttatctgctggtgtggaccacaccagggcctggccgaaggaagagagagtttaccaagagagatgtctccgggcccttatttattatttaaacatttttttaaaaagcactgctagtttacttgtctctcctccccatcgtccccatcgtcctcctgtcctgacttggggcacttccacctgacccagctgggcgaagaaaggtcga

SEQ ID NO: 13183 - DNA, 241 bp, Homo Sapiens
  misc_feature (188)..(189): n is a, c, g, or t
gctatggaccaggcaggacagctgagcaggccagctgtggggagaggaggatgggggtccgagcggaccagcatgggtcaccattacctgcttactggacagatgtgaccaagtggaaaaatagacacatggacaagcagactgcaaggagaaatggagcagtgacgcagtgggtccctttcttttanncttcacaacatggaaattgtcacatgacacccatcaacaatggcgagggggt

SEQ ID NO: 13184 - DNA, 405 bp, Homo Sapiens
  misc_feature (105)..(239): n is a, c, g, or t
gtgtagcatcagatgctataaatggcatataaccacctgaacaaatttgctttcatggtgctaaaaggaccaggatttaaataaaattgtcatcatctatttatnnnnnnnnnnnnnnnnnnnnnnnnnnnnnnnnnnnnnnnnnnnnnnnnnnnnnnnnnnnnnnnnnnnnnnnnnnnnnnnnnnnnnnnnnnnnnnnnnnnnnnnnnnnnnnnnnnnnnnnnnnnnnnnnnnnnnnntcagagtcaagacttctttcgactgttctttactgatgtggagtttcaacaccaagtaaccagttatggaattaatctgttatcaaattgatagtagagaaatttaatctggtggatttcacatttggtaatttcaggataagcattaccttagtgcacctttgtt

SEQ ID NO: 13185 - DNA, 127 bp, Homo Sapiens
ctcggtacccagaaacactacagatgtgaagaatgtggcaaacattggttaagtccattataacctcctttgtatagcttacaatcacctacagttttatagccttctcttaattgtaagttctcat

SEQ ID NO: 13186 - DNA, 279 bp, Homo Sapiens
gaccttgatggtctgtgaattatcagttgctttctgcactacctcctgtagatagacctgactgatagcacttacaaaaagactgatagatgccaaatcagtcatttattaaccctactaatattgttgtcccgatcatttggtaaacgctaagagagctataataatacattcacaaagtattggtatttgataagtcttaaaaatgatttaagttagaagcctaacagaagtacttgtaacatatcctacagtaaccctaaaacaataggaaagacg

SEQ ID NO: 13187 - DNA, 525 bp, Homo Sapiens
cattgttaaggtgattagaggtggacacgtcgatctgacaatgctaggagcgatgcaggtttccaaatatggtgacctggctaactggatgatacctgggaagatggtgaaaggaatgggaggtgctatggatttagtgtccagtgcgaaaaccaaagtggtggtcaccatggagcattctgcgaagggaaatgcacataaaatcatggagaaatgtacattaccattgactggaaagcaatgtgtcaaccgcattattactgaaaaggctgtgtttgatgtggacaagaagaaagggttgactctgattgagctctgagaaggcctgacagtggatgacgtacagaagagtactgggtgtgattttgcagtttcaccaaaacttatgccaatgcagcagatcgcaaattgaaatatggatatttgtaccaggctgcgtgtttttcattttaaacacacaagatttaattgaaaggacatcaataatcataattgtgtatttaacaggtggtttcttattagttt

SEQ ID NO: 13188 - DNA, 658 bp, Homo Sapiens
tatcagtaacagtagaaaaatagaagcagtgaaaacctctgtacaactgtaatggtactcaaaagagaaatgtatcgttttacaatgcttcacacagacgaattcaagtttggaggtacctaaataaaaatactatatatttctttaaaaatcactatgtacaattgaagcgtaaacaagttttacaaagtactggttatgcaggttgtagaaaacacttgcataggacatgaaatcagtttaagaaaaatttctgagcctatagcatagaaggcacttgactttataccagtaacagcacaaccacaacaaacgcagtgttgtagatgatttcccacctctctgaagtacagatgtggtgcatacacagcaaggagagttcaggaacctttatctctcagccaccccatcgaagagcaggacttggtaccgtctgcccatgtaccccagatacagttacatgtaggtacagattgatgaagcctcagagcttatgtgatctcttagacagaactcatataaacccctatttcagcggttttttcagaccctcttgcagtatcttccatagaggcggtcccgagtgggctcctaaagcactgcggctcagctgtgctgcctttaccttggcgcccgcgtgcgggagaacgctccagcg

SEQ ID NO: 13189 - DNA, 630 bp, Homo Sapiens
tctagctgaagaacacagtactgcaaataagtcttatacactatatccccacattcatactagtgaatgcctctcacagagcatcgttctctagcgcagaagtagtagaatgtgaaactggaaacaaaggattgagtgacctttgtgccactgcagttgcatcctgtttgcactttgccagggcctggttatagacaaaaggagtttcatcatgtgactttccttcttccaaattgcaagtaaaatacaaagttgatggatatggctaaaacaaaattccttcgaagacatctcagcaaaggacccacagcagatgcattgatgttatttacaacatcaggaaaccaggtgggccatgatgggacaatcacaatggcaggtaatgagtttaataagaactttacattttggttaaaaataacatactggtgtaaaaagatacctaatcaaatcaaatcctattgctttgattaatctgaacaggtacttccatttttaggcacttgttaacaagggttgaaaggagagctcattttaaaattcttccgtgtttgctaaatctgagcccttaagaatatttttgtgtgtgttcaaggctgcagttaaatcgtagcacataaagttcatgtg

SEQ ID NO: 13190 - DNA, 219 bp, Homo Sapiens
  misc_feature (58)..(58): n is a, c, g, or t
agtgctacctccacaaacaagtaaacgaaaagtgaaacatcctagacattttaacaangactttggtcaaaatgagaacgtatgaagactcaccatatatgtggctgctgagctgctgctaatgcatattgctgctgttgagctgcagttaactgttgaactgttagtgcattagtcctctgaaagagctgtttgtggagtagcacttgaaatcctcgt

SEQ ID NO: 13191 - DNA, 949 bp, Homo Sapiens
ctgctgactatacgctgacatgttcagagattactaaacgagaggtacttagtcagaacgtagatcccagttatggtttacccaggaggaaactgatgtgctctgtgagtttacacttggagtgcacagtgagagggactggagatcacctgcatttcctgctgacgcacccaaatttgcactattattttgtaggatacagaaggtgtttttcatttctcaataggaacttatgctgtgctatttgattaaaccctctactatgactgacaaggaaatggagtcaccagaatgtatgaaaaggattaaagttcaggtaggtgattctgagtcgatgggtttcttcacgagagaggagtgaccaagacgatctttaacaattcaacctcaaatttctaatttctaccatctactatttattgagggctaggtaaaaagttctttttgttgtaatcgtcctattaattcataagtgtttaaagggcatggtgctcccagcaccagaaaactatcagtgtttttataagataaattacacaagggaggagatatagatccctgtgctaggactgctagattctatacttgcgttggcctctaactctccaatccagagcctcctgcctctggcgtcagtcttttccctcatccactcactggggtagattggactagaggagtcctgagaggacacttccaacaagagacatttattctctgattttacctgaaaatggtagtagtttacatttatacagtacagtttatgaagcactttcatacgcaggcatctcttgttacctacatctaagctgttcccgaaagagtgttacagaacacaacagtattgtacaatattcgataagacatatcttcatctgcactagatataaaaatgagtggtgaaaaaaagtaatggagacataatgaaaacatataacatttgagc

SEQ ID NO: 13192 - DNA, 271 bp, Homo Sapiens
atctttaaaatatatctctagaacttaaagctgaaatctgcaaatctgtttgtgtgatgaaactatcttttctctctgtgaaataaatgccatactttgttatatatgttagtggtatgtatcagacatattttcaggatggtgcgtcaggatatctggcagtggatttctaatgcttttggctgtatgttatgtaagatttaatatgttgttactgtaagcttaggagttttcccactattaataaatgtgctctatttttacatttaaa

SEQ ID NO: 13193 - DNA, 558 bp, Homo Sapiens
tgggcccccgcctgcaagcacacatggcaaggagggctttagcaggctcacataaccgagtggcaaggcccctgctcccagaggctggatttgaatgaactccgggcctgtttggggaggtgaagctgccaggtgtgcacaggggcctcccaggctcctggctccaccagccaagaaggtgggggcaagggtcagggcaatgggggacaatgccgctcagggtgcagtgagctcccctgggaaaaccgaagccagcaagaccaggagagggccacctcactgggcctgcctcccccacctcctgggcctctctgacctcagctcctagaccctggacccttggctgggactcagcattttccagtctttttcaggggtagacaggggagcctgggttaaactttaccactgtgccctggcccaggcatcaccaacacggcctccctgcagctgccctgccaccgacagaccccgattaaacccacacctggccttggcctcccctgctctataccttgcatggtttttgcctcacttggaataaaattccaactccta

SEQ ID NO: 13194 - DNA, 316 bp, Homo Sapiens
tttttttaaaggtagagatgtgtgtgtgtgtaggtattaaagatgtgttgttggtttccaaaaaggaacactggaaaataaattttgaatgtttatgttctcagaatcaggttgacagtcccttgctgacatggctttgctttgtgtaaatacagtggatctcaatcttcggggtgtgatgaatagcgaatcatctcaaatccttgagcactcagtctagtgaagatgttgtcattatgtacaatacataactagtttaattaactatgtgatgttaactattattaataaattttaacattttccaaaataaaaa

SEQ ID NO: 13195 - DNA, 497 bp, Homo Sapiens
cttcaggaaccagtccttccttggagagctccccgggacagccacgggggccaagtgaaactagcgcgttttcttggatccctacactttatagtgagtcataaatactttaaatacaaagccaacaacatttgctgcaaataaacgtaaaaatactgttaaagtgtaaaatgttttcctccgtaccatctgacgtttctggcggttcgttgaacgcgagagaacgctgagccgtctgcactgagcccgggagcatcttcagggcagcgccgcccacgcgcgaggtgaatgaaggacacggcctcttgacactcccaggcagcacagatagacggatcctggctagaagtgaccccaggatttttttattatcaagagagactagaagaatcatgagacttttcctagtttgcctttcaagaatatgaagaaaaaaatggttctcaaagtgggtttgaatgagtattgttccaataaatgaacttatattcataaaa

SEQ ID NO: 13196 - DNA, 522 bp, Homo Sapiens
atgccacgccccttcatacactgttccctggaccatacacaggctgaagcagaggaaatcccaaagcgggtgcccatccagctcaggtcccaggatccctgcacccatttctgtgacctggggccccagccgtgctgtgctgctcatcccagcagagggacctccctcgtccagcgacttccctttggccatagaaagaaatggtgagcatgagactgggcacagcctgagggcgtgggcagcttcccaccctccctgggccttggaatcccccaaggctggttttcttcctggagacccccatgggcaacttggcaggaaaaatggtgccgtaggaggtcgtggatggttgatgccaagagaggccctccacccgtggtgggcaaatgtccaggcctgggctggcagcccagggctgtttctgggtgctccctggccccagggtggcgtctggttaccatggctgtgtgtgtccatgtctgcaagcagttcttcaataaatggcctgcctccccctcaaaa

SEQ ID NO: 13197 - DNA, 986 bp, Homo Sapiens
  misc_feature (807)..(819): n is a, c, g, or t
gtggaccggtccggaattcccgggatgttgcgccggggcggcggcggctccccgcctttggcggctgcgcccgggggcccggcggtccctctcagcttatggaagaagaaccagtgtcagatttcgcagttcaggaatgactttagacaatatcagtcgggcagctgtggatcgaataatccgggtggatcatgcaggcgaatatggagcaaaccgcatctatgccgggcagatggctgtcctgggtcggaccagcgtcgggccagtcattcagaaaatgtgggatcaagaaaaggaccatttgaaaaagttcaatgagttgatggttatgttcagggtccggccaacagttctgatgcccttgtggaacgtgctggggtttgcactgggggcggggaccgccttgctcgggaaggaaggtgccatggcctgcaccgtggcggtggaagagagcatagcacatcactacaacaaccagatcaggacgctgatggaggaggaccctgaaaaatacgaggaacttcttcagctgataaagaaatttcgggatgaagagcttgagcaccatgacataggcctcgaccatgatgcagaattggctccagcctatgccgtcctgaagagcattatccaggccggatgcagagtggcgatatatttatcagaaagattataaagtgtgtccagttttgcctgtctataaaagatgatagtaatttaccaagtgacatttgcagagaaacaggtgtacagttatcgttgtacttttgtacaatgtgaattttgttaataaattataaaggttgnnnnnnnnnnnnnaaactctgccgtgttgatttttctctggggtggttttttccgccctgaagaccaacagggtcccagcccttgtttcaggttccagcaaacgaaacctgggcccttgggttggggccccatactaaatttttccttttaaataacctggtttttcccttttcacagcg

SEQ ID NO: 13198 - DNA, 297 bp, Homo Sapiens
gagctggggcccctcgcactcctgtgaggcttttgcaggtcgaaggcccccctgaggactctggggggacgttgagaagaggggtgtgggaaggtaaagaaacttgctggacaagtcattaacacactttaagcgaatggtgccctgggaagcgcactccccctgcccgggccccctgcccgctcgcggacagattttttatccctgggatcatgagcgtccggtcttccccacagggcctgtgctgcgacgcacatacatacgtgttgtgtctgtcaataaagtgtaaataaggtc

SEQ ID NO: 13199 - DNA, 413 bp, Homo Sapiens
  misc_feature (360)..(360): n is a, c, g, or t
taagtggaaagaaaacagtactttaatcccacactttgggtggtggtggagggcaggtcatttccctccaatccccccaggtcagaccccaccagcaggccgtggggcctcctcccaggcctgggttatcctgtgatgtctgtccagctctgggccctggaatctgccctggaattagcggaaaacaaggcccagtggtggcgaatctatcaccaagagccggccacccagccggggtaatatttgagaaagatcttcttggccaggtccacagtgtctcctcgcggctggcgggggtacctctgcttgctgagaacgaaggcctgctccagtgggaagacattttttgtcaaactggtngctgttggaaaggggatgccctgggccacactgtcaaccagcgcctccaggaa

SEQ ID NO: 13200 - DNA, 181 bp, Homo Sapiens
tgcacccgaccaccttcagccaattcttgacaactggagcttgagaccctccgttgtcttctgttttacttgtcttaaaagccaaatgccccataatgacttttgaggtcttaatgacctgcttctaccatccttctgcaagaacccacacttctgcaagaaccccgggggatcctctagg

SEQ ID NO: 13201 - DNA, 287 bp, Homo Sapiens
aggctacatatggatcttggtctcataaaaaataagcactaaaattaagttgagttgaggttgagtttagagttagtgctgctcatgccaccctaagcttccaagtatcattcagtcacatcttgtttcctgctttggggttatttaacaggtcattcgtgagttattacataactggaacaaaagcaagatagaatcaaaagaatacttagagctggagtgacatcagaaactgtatgcaacctccttattgtcaggacgggaaaaggcaagtctgggaagcaata

SEQ ID NO: 13202 - DNA, 302 bp, Homo Sapiens
tgaatgtaagtggtggtgaatgtgccggagtagtatgaaggtgcagtatattataagaagttctggtcagtaacggttgtcgagagcagaaataaatctttgcgcggttgaccggtggctcattccagaaccaggctgggatcgctcaaaatctaggttcccaaatgcatcagagtaagttcctagcatgctatatttcataatttccactatatcctcagcgtcttcttgggttgcttcctctctcaattccaaccttgctcgtgcctctgtcagacgaatcaaagattccaaatgccagg

SEQ ID NO: 13203 - DNA, 219 bp, Homo Sapiens
agtaaatcataacagtcaagaaaataaaaaggtgagagtaactgtgcagtggggaaatcttgtgtgtggaaagaatgaatctgtaaaactgttctttcctaagagagttcagcaggatttggatgatagagagctttgtgtacaagggttccagttccacatagtttaggtctaatttcaaaggcaacttctagtgcaacctgtgactcacgctgctgg

SEQ ID NO: 13204 - DNA, 236 bp, Homo Sapiens
gtgggcaatgggccatcctggatcatgaccatcttcacccctgtccgctcctgcaactgcttgattgtttcccctcctctgccgatgaccagacccactttagatgcgggaatgagaatctcctggattgtgctgttgctgtctatgtcattatgaaagcacagctccatttagacagcggtccacaatctgtcccaggagccgtttggcttgttcaatactttctggggttccgg

SEQ ID NO: 13205 - DNA, 408 bp, Homo Sapiens
cgctggatgagctccgaggtcacaaggctctggtcaagctccggagccggcaagagcgagacctgcgggagctgcgcaagaagcatcagcggaaggcagtcaccctcacccgccgcctgctggatggcctggctcaggcacaggccgagggcaggtgccggctgcggccaggtgccctaggtggggccgctgatgtggaggacacgaaggagggggaggacgaggcaaagcggtatcaggagttccagaacagacaggtgcagagcctgctggagctgcgggaggcccaggtggacgcagaggcccagcggaggctgtaacacctgagacaggctctgcagcaactcaggagaggtcgtccttgatgcaaacacaactcagttcaagaggctgaaagagatgaacgga

SEQ ID NO: 13206 - DNA, 614 bp, Homo Sapiens
ctgccagcatcctaaggctcctggcgggcatcctctctgctcaaaattattgacctgtctcccggccacacctgctgtgccctctcagccaggccatcatcaccccctgttcattatgtcaggcctcatgggagcctggccttctccagaagctggccccggcgtcctcccaagctggaccacgtaggccccagatcacacctgggggtccagatgtaagggtcccaggtgcacgcccaatcagaccgagcacttgtgacactaccccaacacctctcccagggctgaatgaggaacgcgccactggacacatgaggaagaggctgccctgggagctactgatgctgtgacctcacctctctggctttgggcggcaggtccctgcacctaggatgcctgcctggaaatgtccttgcattcgtggcctccttcacagcctcctcctcagagaagcctctgcgagtgcacagggagtgtgtgcagccttgtgaagggctgggaccacttgcccagactggggcccctcaggcacaggcgtggggtcctactgacctgtctccccagctcccacacagaaagcatctaaaataaacacacgtgggatggaaagcgtt

SEQ ID NO: 13207 - DNA, 244 bp, Homo Sapiens
gcaccgcgtggtggccaagagcaggcaagttatctgatttcctgtgctggtttcatcatgtgtagtgtgtagaaaatggctgcatctcatcaaggtgttataagggttctatcagatcatgggtacaaagtacttagcacagggcttgacctataagctctcaaatacctgtgcatataaatattatgtatgtaaagttactcaataataaaggcttattataatagtattatgtaatccagcc

SEQ ID NO: 13208 - DNA, 353 bp, Homo Sapiens
gctggggctctgctatcaagaccaaagtttggaaagtgtcatgtagttacttctgcatcctcaacagctaatcactctttaactcctgaattctggctcctgtccccactactttaatgaaattatactctaaacttcgccagtcttctcccaaccaactgccaaatctcatgacatggttttaagcctctctctcttaacttctcagctttccacaagtagacaagtcttcttctggaaactctccacgcatgtcctctatactctcactactgtctccctcttcttccttctccacctgcccccatctcctggcatttctactctctttcctggggctggtgctgctactg

SEQ ID NO: 13209 - DNA, 280 bp, Homo Sapiens
gatgccaaacctggagaactttccctacagccagcagccgctcagcaccggggccttccccgcagggatcactgaccacagccacttcatgcccctgctcaatccctccccaacggatgccaacagctctgtggacacccaggctggcaactgcaagccccttcagaaggacaagctccctgagaacctgctgtcggatctcagcctgcagagcctcacggcgctgacctcacaggtggagaacatcttcaacgccgtccagcagtagctgctctccaag

SEQ ID NO: 13210 - DNA, 386 bp, Homo Sapiens
catctatgaattccatcttccttactgaaaattgttatttatcaccattccagtcacccgaggctcaaaccctcagtcatactgtcactttcgcttcacattttactcattaggtccaccctccctcaagccctgtcagttctgcgatataattgcacttggattctaggctcggaaaaggcatggaacagatagtgagttttgatttcttttccctatattggtctcctttctctactaaaccctacctaatattaattgctacaacagccctgctacgtctaacaatcccaggttgctgaggttgcctcccagctggcaccctcccgttttgctacactcatctttatgaatactattttcatgttacttcatattcaaaattc

SEQ ID NO: 13211 - DNA, 501 bp, Homo Sapiens
tctacgaaacctcctctttctgtctcatatgatatagatactcacggaatatgacctcacagaagtggaatcatacaatatatttccttttgtgtctggcttttctcacttcacgtgttctcaaggttcacccatgttgtggcatgtgtcagaatttccttccttttttaaggctgaatatcctaatgtatggacagaccacattttgggttatccattcgtctgtcttagacacttgggctgtttccaactcttgctactgtggaaaatgctgctgtgaacaagagtgtgcaaatatctctcagagcccttgcttgccatgctcttggaaggcacatttttttaaactgcacacaaggagcagttgctgcaggccaagggaggccaggctgctctcttctttggtggcaaagctcatgtttgatggagaaagcagaaagtctgaagcccttgggtggaaagaggagggtgtcgtgtgagatcctctggatcgactcagca

SEQ ID NO: 13212 - DNA, 460 bp, Homo Sapiens
gaattccctagtaatgcggtggatccctcggctcgtgcgtcgattaaaaacccagctagctgcgagaattaatgtgaattgcaggacacattgatcatcgacacttcgaacgcacttgcggccccgggttcctcccggggctacgcctgtctgagcgtcgcttgccgatcaatcgcccccgggggtgcctccgggctcctcggggtgcgcggctgggggttccctcgcagggcccgccgggggccctccgtccccctaagcgcagacccggcggcgtccgccctcctcttgccgccgtgcccgccccttcccccttcccccgcgggccctcgtggtcacgcgtcgggtggcggggttattttggggtgtgcccggctgagagagacggggagccccgcgcccgcgaagacggagagggaaagagagagtcggctcgggccgagttccctggccgccgaaa

SEQ ID NO: 13213 - DNA, 432 bp, Homo Sapiens
ttgtcagttggtttccgtcagtctcctgagaatggggaatttaggtctagcgtggttcacagttctggttttttaggagttatacttgaaagctcaatgtcggacacatagcatgaaatccgtcactggtgctttgcatttgtcttggaaaggacatacgccccgcctgtcccttttactaactagggagactgtgaatattcccaagcccagcaccacgtgcacacgccgccagctggctcgcgcgttttccacggagccctctggaggggagggagcgcggttcggactagcctctcccgaacaccaagtgccgctcttagccccgtccagcccgccctgttcatcgggggcctcgccgcgccagtcgccccggctgccttatgtaggtatgcgaggcgggcgcgtgacgtgggcgcgggcgtgggcggc

SEQ ID NO: 13214 - DNA, 472 bp, Homo Sapiens
tattagacaataaatactttaataaattgctgcataacacactgagaaaatgaaagagatgtggatatgtggcttttacaagagtgaaagataagttctctagaatatctgtgcccagtggatacaaagtgaaatctagataagggcgtggccacatcacccccttatcaaaacacacggatgcagtacccaggccagcccagtacttctaggtagggtgggtgtgagtcctactgagaatcgcaccaggcctttcccagggcagagtgtttggtttttgtgtgttactgcacttggggatggagatgtttgattcgatgttggggtttggaagctgggctcctggggatcattcgggcctggtggcagccacctcatccggaggctagttagttagaaggtgaaggtgactggccattgctcccttctctcccaggcctgagcgcccttgccagaccagcttggctcccag

SEQ ID NO: 13215 - DNA, 995 bp, Homo Sapiens
ctctggctgcctgggatcttccccatttcacattcagtctgcggccatttacaatcaacttattaaaggacttctcagcagccacttctgcagcctgccgtgtggcaaactggatgaaagcacactgctgtctctgcacaacagtgatcgtccggatctctccgaactggtagaaatgatttcttaaatctgtctcagtaatggtatcacctagaccaccaacatatagtgtggtgatagttttatcctctggtgggtccagccgaggcattgttgaagcccgctttagaagcttgtcagctacaggatcattgattccgtaataacggtctttaatattctgatcagcaagggggtcatctggatctgtaggcttctcatgtctgtatggacattcctctcctctcttacactctcctttcacccagaaggagcaaatgtggggtcgattccttttgtagtagggtgtggtccgggccagtttgagcagcatgtcactggtagatgtggctttccccagcatgccaactggccgtgttccatcagagttagaaatctctctctccatattctgtgtatagtactctttgttgacatctgactttggcatgtcatctttaaaagacaatcctgcgtcacgaacctggatgggcaggccatactctaggtctaagaggcaggtctgacagacattcttcaatttactgcaggtttggcacacttcagtcttcttgaaacgcatgcggactccagggcaccagcgaaacactgtgaatggcctggcacagattttgcattccttcccatacttttctttggtcattcggatatatgggttttctccaagacatgtctggcacagaatggggaagtccgcatcctcccagttctgcctgttgtaggtgttggaacccagagaggtcgccatcttgagagcgtccggaggtagctgtagcttccgaattgggagagaggaccgccacaatcccgtcaag

SEQ ID NO: 13216 - DNA, 1112 bp, Homo Sapiens
agccgcgcggatcgcgcgctcccgccgctctgcccctaaacttctgccgtagctccctttcaagccagcgaatttattccttaaaaccagaaactgaacctcggcacgggaaaggagtccgcggaggagcaaaaccacagcagagcaagaagagcttcagagagcagccttcccggagcaccaactccgtgtcgggagtgcagaaaccaacaagtgagagggcgccgcgttcccggggcgcagctgcgggcggcgggagcaggcgcaggaggaggaagcgagcgcccccgagccccgagcccgagtccccgagcgtgagccgcaatcgctgcggtactctgctccggattcgtgtgcgcgggctgcgccgagcgctgggcaggaggcttcgttttgccctggttgcaagcagcggctgggagcagccggtccctggggaatatgcggcgcgcgtggatcctgctcaccttgggcttggtggcctgcgtgtcggcggagtcgagagcagagctgacatctgataaagacatgtaccttgacaacagctccattgaagaagcttcaggagtgtatcctattgatgacgatgactatgcttctgcgtctggctcgggagctgatgaggatgtagagagtccagagctgacaacatctcgaccacttccaaagatactgttgactagtgctgctccaaaagtggaaaccacgacgctgaatatacagaacaagatacctgctcagacaaagtcacctgaagaaactgataaagagaaagttcacctctctgactcagaaaggaaaatggacccagccgaagaggatacaaatgtgtatactgagaaacactcagacagtctgtttaaacggacagaagtcctagcagctgtcattgctggtggagttattggctttctctttgcaatttttcttatcctgctgttggtgtatcgcatgagaaagaaggatgaaggaagctatgaccttggagaacgcaaaccatccagtgctgcttatcagaaggcacctactaaggagttttatgcgtaaaactccaacttagtgtctctatttatgagatcactgaacttttcaaaataaagcttttgcataga

SEQ ID NO: 13217 - DNA, 950 bp, Homo Sapiens
gccaggcggcggcggcgactggcaatgtttggcctcaaaagaaacgcggtaatcggactcaacctctactgtgggggggccggcttgggggccggcagcggcggcgccacccgcccgggagggcgacttttggctacggagaaggaggcctcggcccggcgagagatagggggaggggaggccggcgcggtgattggcggaagcgccggcgcaagccccccgtccaccctcacgccagactcccggagggtcgcgcggccgccgcccattggcgccgaggtccccgacgtcaccgcgacccccgcgaggctgcttttcttcgcgcccacccgccgcgcggcgccgcttcgaggagatggaagccccggccgctgacgccatcatgtcgcccgaagaggagctggacgggtacgagccggagcctctcgggaagcggccggctgtcctgccgctgtggagttggtcggggaatctggtaataacaccagtacggacgggtcactaccctcgacgccgccgccagcagagaagaagaagaacgagttgtaccggcagtcgctggagattatccctcggtaccttcgggagcaggccaccggcgccaaggacacaaagccaatgggcaggtctggggccaccagcaggaaggcgctggagaccttacgacgggttggggatggcgtgcagcgcaaccacgagacggccttccaaggcatgcttcggaaactggacatcaaaaacgaagacgatgtgaaatcgttgtctcgagtgatgatccatgttttcagcgacggcgtaacaaactggggcaggattgtgactctcatttcttttggtgcctttgtggctaaacacttgaagaccataaaccaagaaagctgcatcgaaccattagcagaaagtatcacagacgttctcgtaaggacaaaacgggactggctagttaaaca

SEQ ID NO: 13218 - DNA, 819 bp, Homo Sapiens
cgggggaaagtgtctgttcttgtcttttgttcacttttcaaaggggctgtttatttttcatattctgagactccagcaggatgtcttatcaacagcagcagtgcaagcagccctgccagccacctcctgtgtgccccacgccaaagtgcccagagcccatgtccacccccgaagtgccctgagccctgcccaccaccaaagtgtccacagccctgcccacctcagcagtgccagcagaaatgtcctcctgtgacaccttccccaccctgccagccaaagtgtccacccaagagcaagtaacagcttcagaattcatcaggagcatgaaaggataaggataattggctcacctcgttccacagctccacctgcatcttctcaccaaagcctaccatggatacacagggagcttctttccccttaaccagtgacctgcccatgatgatccctgacagcaaaagattccctttctgaggctgccatactgccactgtccaggtggagctaagaaaaggaagtcctcagctgtgccagctcccagagcttcggaagaaagagcagcagctctctccctgggaaccatcagacaattctgttgatgtgttctgtgtctgtctgtcacctggtcatgagcttctaccacctttgcaattgtcatttatctttcactccctgaataaagtatctttgcctacgtccacactctcatcgaccacctccgtccccattttataacttagcactacccccccgtacacaatatatgtcggataacaaccccagtgcctaatgtgcccactgcaaacctctcaccatcag

SEQ ID NO: 13219 - DNA, 422 bp, Homo Sapiens
  misc_feature (211)..(220): n is a, c, g, or t
agtctccaactcccggagccaagatgatcctcctgcctcagcccattgactagccaggactacacccacaggccattatgtccggctaattttttttaattggattcctaatgtaaaatctcagtcctctaattataaagttatgtgaaggcaattttcaaatttactgtatctgtcacaaataatgatatctgtcaatttttattaagannnnnnnnnncgactttgtctcttatagtaagagctgtcaatttaacagaaaacccccaaagcaccagtgatgcaaacagtaactacaaaagcttaacactgggcaagggaccacaaatgcgtagataccaattctaccaagaaaaaatctattcgaattactgattcaattatcaaaactgattaaagaaaactttacccttcgtgtattt

SEQ ID NO: 13220 - DNA, 672 bp, Homo Sapiens
atacaggtggtcaatggcctctaggggaccatctgtggggactgccagtgttgtggctgctgtggggaagatggacccgtttaaccctccgagatgagctgctcagactctacagcatgacgactacaatttcttttcataaaacttcttctcttcttggaattattaattcctatctgcttcctagctgataaagcttagaaaaggcagttattccttctttccaaccagctttgctcgagttagaattttgttattttcaaataaaaaatagtttggccacttaacaaatttgatttataaatctttcaaattagttcctttttagaatttaccaacaggttcaaagcatacttttcatgatttttttattacaaatgtaaaatgtataaagtcacatgtactgccatactacttctttgtatataaagatgtttatatctttggaagttttacataaatcaaaggaagaaagcacatttaaaatgagaaactaagaccaatttctgtttttaagaggaaaaagaatgattgatgtatcctaagtattgttatttgttgtctttttttgctgccttgcttgagttgcttgtgactgatcttttgaggctgtcatcatggctagggttcttttatgtatgttaaattaaaacctgaattcagaggtaacgt

SEQ ID NO: 13221 - DNA, 940 bp, Homo Sapiens
  misc_feature (21)..(21): n is a, c, g, or t
aaaggcccaggcggtaccggnccgagttgttaggatttgctgctggcttcactactggccttgtgctgaattcaggtgctggggttacccagagtgtgcccatctttgagggttactgtctgcctcatggtgtgcagcaactggatctggcaggccttgacctcaccaactacctcatggtgctaatgaagaaccatggtatcatgttgctcagtgcttcagacagaaagattgttgaagacatcaaggagagcttttgttatgtggcaatgaactacgaagaggaaatggccaagaaacccgattgtctagagaaagtttaccaactacctgatgggaaggtcatccagctccatgaccagctcttttcttgtccagaggccctcttctctccgtgtcatatgaaccttgaggcccctggcattgataagatatgcttcagcagcataatgaaatgtgatacaggcctgaggaattccttcttttccaatattatccttgccgggggatcaacctctttccctggtttagacaagcggttagttaaggatatagcaaaggtggctcctgccaacaccgctgtgcaagttatagctcctccagaaaggaaaatatcagtgtggatgggaggttctattcttgcatccttgtctgccttccaggacatgtggatcactgctgcagaatttaaagaagttggacccaacatagtacaccaaagatgcttctgaaatacagataaaatggttggaagaaaatgttttgagtatatgtgacagaaaactttggatattatatgtctctgggagaagagaaaatacttcacctattgggatgccaatatttctgttgtatttctataatgggtttgggggataataatggtgaagctcaagaacagatgtctattgagtagaaccaagttaaaataatgtttccc

SEQ ID NO: 13222 - DNA, 615 bp, Homo Sapiens
taacaggtctatgaagcagaatctttggctgttatttatacccagcagaacaaaagttagcttatgtatagtacatacataaggattccaatcccccattccattatcagctaacgggacacagtcagtaaaggaagataagaattgagtataggatattttgactcagttgatgcatttattcagtgttctaaaatgtatttgaatgagaattacaccaactggaatgaattttcaccaaaataatattaactgaagcaacttccatgaacaaaatttaattatttcatcaatatggaccttagaaatatatattgagaaactggagttcacatgaaggcagaagcccacaagtgcttaccaatggtaccacccaaagccatcgctccagacatctgagctagtaattctgggcccggttttaggactccgagggtggctgccagtcctccagcaaccccaatcatgcccagtgcattgccaagacgtgctgttccctgggtggagaggccagccaaggcaccgacacagcacaaacccgagcctaggtacatgatctgttcaatgttataaccactgtagagggcagctaaatatccaccaacaaaggtgccg

SEQ ID NO: 13223 - DNA, 792 bp, Homo Sapiens
  misc_feature (700)..(705): n is a, c, g, or t
  misc_feature (707)..(708): n is a, c, g, or t
  misc_feature (710)..(710): n is a, c, g, or t
  misc_feature (713)..(713): n is a, c, g, or t
  misc_feature (718)..(718): n is a, c, g, or t
  misc_feature (726)..(727): n is a, c, g, or t
ggtggtgatgtgatttacattcttagcaaggaatacaatagatatggctggtgggtaggagaaatgaagggagccattggcttggtgcctaaagcctacataatggagatgtatgatatttgagagtcctggaaaaggaaaattcttctgcttgtctgcaaatgctttggatttagaagcgtcatgaaagcacgagtgacagctcctaacctctccttgttttattaaacattacttatctttgactgttattttatgcagtcactcattaaaatattcctctgacgtgaaattaaatgaaggatattaatgtaaattagatgcaaccagttaagttatacctgttgctattttgcaaagaaataattatagtttttatttacccatttgatttgtgtgaagaattcatcactattttatacgtaacatatagtctactatagcatagtatgctactattgctacttctggtgtgatttgtaatgtttcttaatcattggacatcaattatttttagagagtaatgtataatttcatagcattttaaatttagtgtatcatgcgagttttttttggtagatgctgaagaatgtggttgctaaacaaagaatgctaaagaatgttcaaactttatagataacctttattggtattatttattttcccacaatttaaattcctattaagtacagccgccaannnnnngnnanaangacgnaaaaaaannaacatgtcggcccgccttcggcccctccaaaagtctttcctaaaacctttccttttggccccgcg

SEQ ID NO: 13224 - DNA, 545 bp, Homo Sapiens
  misc_feature (254)..(274): n is a, c, g, or t
tggaggaaaatgtctgtattaaaagccaaaaaaccacataagtacaagaagaaacgcccaccaggccacgtcactggatagatcaacttggaaaaggttcataaagttcattttcagcggtaacaatatatcggtgttaaatccttcccatgccctccccccaattttaaataaattaaaaaaccacaaatttcaaatacaactatgttcagatacaaagagcttctcttactacagcaatagcaatttaatcnnnnnnnnnnnnnnnnnnnnnactaaaactttcatttaaaacagttattaaatatataaaacaaatacacaggatttggtcattttctgccatgaatctagggcacgtgggtgccgggaaggagtcgggcagggggatgcaatagaggggaaagggccccatttccctcctctccgtcttcggagctgcgatcccaccctcagtccaagggcttaaacatctgcttttcggaactggaagcgcagcacaaaccttgcttttcaaaggcgctggggtctctcggcggccccat

SEQ ID NO: 13225 - DNA, 1662 bp, Homo Sapiens
  misc_feature (606)..(628): n is a, c, g, or t
ggggaaaagaagattcaggccctgagaggtctcagctcttggaggagggctaaggctttagcattgtgaagcgctgcacccccaccaaccttaccctcaccggggaaccctcactagcaggactggtggtggagtctcacctggggcctagagtggaagtgggggtgggttaacctcacacaagcacagatcccagactttgccagaggcaaacagccttccaattgcccctccacccccagctgaggcccggtcacctggtcaggacagagcaactgcatctaaaagcacaagaagacagaaacctgtaagctctgaccccacccccaccccttgagaggtcagcggaccacctccttagggacagaccctggcaggtcgctgcccaccgagatttcctcaagtgtgcatagatctgagaggagtcgggagtcgagactcgagattccatcatagcgtaggtgtgtggggttgggagccccctgatgggcttgtctgtgtttgcaccttgtcctgtgtctgaggtcctgtgactgtaccctcctttgccctgggacatctgtatctcttggctttgtaataaatgctgcatactttcgccgccgnnnnnnnnnnnnnnnnnnnnnnngacgaaaggaggcggggggggagacaggggaaaaaacgtgggcggccggcgaccggcctgtggcaggcttctccccccctcagagggggtccggggccgccgggcggcctgggacccccccgtgggccgcctgccaggggggggtcggcttttcccccagcgcgcccgggggttcgggcgcataagggtgggcgctgggacggcgaacatggagagtggtccccgggaccgaaccccaggggcgggtgccgcatcggaggacctcctcaaagggggaggccctctcagacgcgaaatgcgccaccggagcagctgtcacccccccgccggggtatccccaccaccagcggccgccgcccgcagtaggtgccgcgaatgtaaagcggggctggccgcgcgaccgacgggggcggaagcccgcctgggtgggggaggcgatgcgctttcggcgggaggtgggaagaccgggcccttgtggtgggcgcgcgcgccccccttatctccctctggggcgacagggggggaggctgtggcgaggtctagaggggcgcgtccggcccgcgcgagagaacacccccgccccgcactaatgggggtgtgggggcccgacgcgcgtcgacgtaactttatttgcccaccccccgcggccggctgtagggtgtcaccccgcgacccgagccgcgcctgtggagtcgatcgcccccggcgcgtgccggcgcacagaaataaaattagggggtgtctggcgcccgcccacttcgtggagacgcggtggagtagcctccgggggtgtgtggggccagcgcaccgaactggacgagttgctgctagaagccctaccgatattttgctggggccccggcgccggggacggggcctggatgaggcgcccacatgagcgcgcggcccggccgcccgtattcctttcacaagcgcgctcgtggcgggatagcgtcttatggttgcggcgagagtaggactgagcgtcactgtgtgcggggccgggacgcccccagacgcgccaagcagcgggg

SEQ ID NO: 13226 - DNA, 1001 bp, Homo Sapiens
ctttttgagccgtttttggtccacaaggatgggccttcataagccttctaacaacggatcaattacgcagggtatgtgtttaataagccagtgtgttgccaaaaattgtatttgggcctaacttctcaagagttcaaagccatctgcagggggacccctggaacagatccaggtatacaatgctaaagtgctattcagtcagaaggtgccaaaatcagatgcttattgaagaagaagtacagaagattaaaaagatacaagattgagaatatcagaaggaagcataattatctgcctttcatgtatggaattgtgtaaagactttagcagaacaccagcagttaataccactagtagaaaaggcaaaagaaaacacagaacgcaaagaaagctcaggaaaccaaatgaagatgttttcagatatgtacacatttctgcttgctgcacatattttcatggaaaccattatgtataaagaacttagagcaacatcctaattggctcagtgcacgtttggcaatagtgccagcctgtcttgtctttaatgcatggattcataaacttcttccctacctgcatcatgtgcatgtagtgcatattaaatgaaagtgatattaagaatgctttcccaaattccattatttgacattgagtctgacaactgttagttttctggttgtctaactaccatatgaagctagaaaatgcacaaacgatattccttatctgtaatttaaatacttaaaatttgcaattgtcagatcttgattaaactggttgtcttatttcttctcatcattaacggaaaaaaaatcagtatttctatctttgatatctaagtgttttgaggattttaaaactgaattttatctgctataccagttatttgagaaagtatgattttaatgtaaatcatttaaaaaggacaaaagtataatttccagtgattttcactgctgtcagtagaaaagtaataaacatctcaattttattttagtaaa

SEQ ID NO: 13227 - DNA, 974 bp, Homo Sapiens
  misc_feature (63)..(63): n is a, c, g, or t
  misc_feature (311)..(311): n is a, c, g, or t
  misc_feature (339)..(339): n is a, c, g, or t
ggggctaaaagtaagggtgtcgtgctgatggccctgtgcgcactgacccgcgctctgcgctcntctgaacctggcgcccccgaccgtcgccgcccctgccccgagtctgttccccgccgcccagatgatgaacaatggcctcctccaacagccctctgccttgatgttgctcccctgccgcccagttcttacttctgtggcccttaatgccaactttgtgtcctggaagagtcgtaccaagtacaccattacaccagtgaagatgaggaagtctgggggccgagaccacacaggccgaatccgggtgcatnggtattgggcgggggccacaaagcaacngttaatcgaatgattgactttctgcgtttccggcctgaggagaccaagtcaggaccctttgaggagaaggttatccaagtccgctatgatccctgtaggtcagcagacatagctctggttgctgggggcagccggaaacgctggatcatcgccacagaaaacatgcaggctggagatacaatcttgaactctaaccacataggccgaatggcagttgctgctcgggaaggggatgcgcatcctcttggggctctgcctgtggggaccctcatcaacaacgtggaaagtgagccaggccggggtgcccaatatatccgagctgcagggacgtgtggtgtgctactgcggaaggtgaatggcacagccattatccagctgccctctaagaggcagatgcaggtgctggaaacgtgcgtagcaacagtaggccgagtatccaacgttgatcataacaaacgggtcattggcaaggcaggtcgcaaccgctggctgggcaagaggcctaacagtgggcggtggcaccgcaaggggggctgggctggccgaaagattcggccactaccccccatgaagagttacgtgaagctgccttctgcttctgcccaaagctgatatccctgtactctaataaaatg

SEQ ID NO: 13228 - DNA, 609 bp, Homo Sapiens
aagagcagcgtcatcatgaccagctagctatagataaggcacatgtcaccgtacctggctagtaaataatcatattagtaagagacaaggttcaccacgttgcccaaactggtcttaaattcttgagatcaagtgatccatgtcgacctccccaagtgctgagattacaagcatgagccactgcacctgaccagtggctttatataatgtttacctttgttctattgaatatacatctactacttgatatgtcagctgtaagtattatctttgactgccagctactgagacagtcaacaagcttgttctacttttctcccttttcctcctcattcctttcccagtattagttggttatattgtttctacactgtcagaacatataacactttacaactcatatccgcagctttgttactggcttatatctccagttaagtatgttattaataattgtatatctctggtccttttaccaaaaatttccccatctcttggttggctggagctagtattctagtttattcagaaaggctcgtgaaaaatataccccatatttgtgcacattcaaaattggttgaataaagcatttggtttctacatgtaaga

SEQ ID NO: 13229 - DNA, 360 bp, Homo Sapiens
  misc_feature (36)..(36): n is a, c, g, or t
atccaagatcacacacacctcctcttcactgaccangagataattctgacaacccaggatatcccgaaagcttggaggcatatggctggaaaatgaaacgacccaggacatcgtttctggctgcatcattattttgtgtcgcgtagtaccagatgggcagtcagtgagcggcgcagggatgtgaacggacggttttataatgtgaaaattttcccttggtaaagctaaaacggatttaatttccctctcttttctttcactacttccccctctttattccccctctgtctgcaatatcagtgaactcaactttgcagtgaggtggccaaaaagagagagaaagaggagggtggtgggtac

SEQ ID NO: 13230 - DNA, 386 bp, Homo Sapiens
tgtcccgaggactttaacccaaataaccctcactaaagctatactcctcaaatctatttgtatagtcgacacaagagttttacagcaaatgcaaactatacctatgtaggtacatgacacttgtctcactcaaaaataactgaaacagaactcaaagaattctcttttgggaaaattctacatctaaggccgggcacggtggctcacacctgtaatcccagcactttgggaggcttagccggcagaatggcatatacctgtgagttggagcttgcatggagccaaggtcgtaccacggtactccctgcttggcaccttgggcaacagaagggactcgtctctctaattatacatattctattaactacctgtattgagggttattg

SEQ ID NO: 13231 - DNA, 671 bp, Homo Sapiens
  misc_feature (16)..(16): n is a, c, g, or t
  misc_feature (228)..(228): n is a, c, g, or t
  misc_feature (258)..(298): n is a, c, g, or t
actgtgatacccacgntttgtggtgggaggacatccagaggactggtgaacttagcctcacaggcctaataggagtttctctgacacatcatttttatctttttctaatgcagggttaggaggctctagccagatgaccctgcatcaattgtggcagtggcttgtgttaagcaagtgcctgctggagggggaagatggagtgcatgtgtaccctcctcagctcacatngccagtgagtctgtgagtgtctcctacacnnnnnnnnnnnnnnnnnnnnnnnnnnnnnnnnnnnnnnnnngttcaagcgaacttaccaccatagggttaagcacaaggttttaacggaacggcggggaatcggctcaagaagtctgaacaacacctacccggtactagcccgaagcagaccgccatgcagaacaatgtccttccaccatcagtcgttgaaacggaccccgagggaaccagggcggaacgatgctgagtcatggaagggtcggaaagggttccgctaccataaggtaaccgggattaattaactaaatttaccggtgtaaccggaaaaaaccttcccgggggggacgggcacaccttttttagaagggccccaaaaattggccataaggccctataccaggacacagttaaggaacaccccactcttaaacagc

SEQ ID NO: 13232 - DNA, 246 bp, Homo Sapiens
aaaaaaagtctctgatacaagcagagaagccctgtcaggtgaccttagccgaggacacggcactcagcttacaccgccaccagggaccttgagtaacaccagccactgccacctgtggtgcagggtcctctggatagagcctcctctccaggcattagaacaataacactgatgtgtcgggtaaacgcctagaaggcctggcagaacgtcatcctgtccacatgcctcccacacaaacgtttgact

SEQ ID NO: 13233 - DNA, 789 bp, Homo Sapiens
gcggccgcagcctggctcagatgctagacgaggacactgtggtgggtgtgtggcgcgtggccaagctcttccgcctggcgcggcttgaggaccagtgcactgagtacatggccaaggtcattgagaagctggtggagcgggaggacttcgtggaggcggtgaaggaggaggcagcggctgtggcagcccggcaggagacggactctatcccgctggtggacgacatccgcttccacgtggccagcacggtgcagacctacagcgccatagaggaggcgcagcagcgtctgcgggcactcgaggacctgctcgtgtccatcggtctggactgttgagcccctggctgggcagccccaggggccaggagctctcttggagacaagcatgtgtatgcgtttgtgtgcagctcttcttcctgctccctgcacattgagggcttcatggggggtgcgaggggctcagtggggcttctcttccctccatgagcctggagaccccaggggaggatccatttgggatgagccccctccccccaatgcacaagccagcccccaagaccctgggggtggacaccactcagggaaacctggggtgggggtgggctttggtcttagcactttccttctccagatcccccctacccaccccagtcccaaatccagtcctttggcccttgcctagccctgaattgcttctctaagctggtgttcccatgcacagggccattcaggaagggctgggggagtgtgtgtggcaataaagcttgaaggccccgtgggagcatgaaaa

SEQ ID NO: 13234 - DNA, 142 bp, Homo Sapiens
tgatatagtaagaaaatgtcaatttaatcatttactttagcaggcaagcaatttgtaaacattcagtagcggcagcatccaagttacaaacaatttaaaaagaaccaagattagtgattataatttttccttccctttcccc

SEQ ID NO: 13235 - DNA, 646 bp, Homo Sapiens
gctgttgtcgacctcatgcaccgagtactggttgtgtagcgggccgcccacgggctgcaggacgggacaatgcggccaggagacgagcgccttccttgcccacctcactgccacattccagtgggacggccacggggggacctaggccccagggaaagagccccatgccgccccctaaggagccgcccaaacctagggctggactcaggagctgggggggcctcacctgttcccctgaggaccccgccggacccggaggctcacagggaacaagacacggctgggttggatatgcctttgccggggttctggggcagggcgctccctggccgcagcagatgccctcccaggagtggaggggctggagagggggaggccttcgggaagaggcttcctgggccccctggtcttcggccgggtccccagcccccgctcctgccccaccccacctcctccgggcttcctcccggaaactcagcgcctgctgcacttgcctgccctgccttgcttggcacccgctccggcgaccctccccgctcccctgtcatttcatcgcggactgtgcggcctgggggtggggggcgggactctcacggtgacatgtttacagctgggtgtgactcagtaaagtggatttttttttctt

SEQ ID NO: 13236 - DNA, 427 bp, Homo Sapiens
atgtttgttggaacttattttattttagattcaggtcttgttaaccattgctccaggatgctttactttccttgtcttaaacgggaaattcccaggtcatgttattaagaagtgggtgcccaggaagcacgggtcgcagctccacacggacagaggctcctgggacctgggactggctctaggtcatgacagctcagcaggattccagggaccgacggattcagtcctgaggggcagaccaggtcctggtaggtacagcaaggaggactcccctgcaagtctggagcaacaaggccccatgaagggagacaaaaccagggaccctgacacggtggctacaagggcagaggtgagagcagaggtgtgaaggccacgcagcccccaggacgcccccaggacaggctggcctatgctaagccacgcggct

SEQ ID NO: 13237 - DNA, 510 bp, Homo Sapiens
agcgccagctgaaagtgatggcgagcgaccaccgagaggcgctgctggacagggagagcgagaacgcgtctctccgggagaagctgcggctccgggaggcggagatcgcccgcatccgggacgaggaggcccagagggcgagcttcctgcagaacgccgtcctggcttacgtgcaggcgtcccccgtgaggaccctgagccccccaaagtgagacaggccgggaggacccgggcgcagtaggagtgcatcaggcggcgcccgagatggaccaggggctgcgtcccgcccgcgccgcctctttgagacccgggtcgtctgttccacgcggcggttgcggcgactgttggtggtgtcgcggctgcgggggaaccccgtgggaggcgcctgggaagggctccctaccggccccttcttcccggtcgacgccacgtgggagcacaccgggaaggggtcccgcgggcgcgtctccccctcgccttttgcgatgtcaccgtgaacgctgcggccgc

SEQ ID NO: 13238 - DNA, 1116 bp, Homo Sapiens
  misc_feature (671)..(959): n is a, c, g, or t
tagttagttaaaaaatttaattgtaaggatcaagcagtggttattggtgaaaccaatacacactgacagctttgaagtgttcagatgctaattttaaaataaatgtgacaaataccaatcagatgttcataacacttttcaggatccacatcaacttgattatggacatagttcaatacacaagggtaagagaaagagtgtgtaatcaccaataattaaaccagaggcataattttttcaaataattttaagttacagaataaatcctaacttttaaaagtctaaagctacataaaactcaaagcaatctatttttctacctgaggtcaaaatgactttcctttttcctaactaaacataattcttagcattgaggtaaatctgaattcatgtggtatgctttgtcaaacttttccaaaaaattttaagccctgctttagagagaaattctcatgttacacatatatatttacatattttttcttcaaagactaatgtacaatgtatgatgttaataggcctgtaatggaaccatgatactactaataatatgaaataaaaagccactcatttatataaagtgttcctgaatggtgcaataagaaatgggatcacagatttatgtacatatatgaatcactaagagttcagaaattaagctcactttaagnnnnnnnnnnnnnnnnnnnnnnnnnnnnnnnnnnnnnnnnnnnnnnnnnnnnnnnnnnnnnnnnnnnnnnnnnnnnnnnnnnnnnnnnnnnnnnnnnnnnnnnnnnnnnnnnnnnnnnnnnnnnnnnnnnnnnnnnnnnnnnnnnnnnnnnnnnnnnnnnnnnnnnnnnnnnnnnnnnnnnnnnnnnnnnnnnnnnnnnnnnnnnnnnnnnnnnnnnnnnnnnnnnnnnnnnnnnnnnnnnnnnnnnnnnnnnnnnnnnnnnnnnnnnnnnnnnnnnnnnnnnnnnnnncataggacaaaaatgaaagaaacacctcctctattttctcctttggacaagggtggccaaactgtgatgcctaaccaaaacgtggggtctaaagtctcaaaaaccaaaggttagcctaaatggtatagtggcccttaaatcaaacttatcactaaat

SEQ ID NO: 13239 - DNA, 784 bp, Homo Sapiens
gatgtatcccagacccaagtcaatcacctggtgacgttctgccctgggtgagaacgatggcgtgcataccgtgaaggatgcttccaggaagttggccgtcatggatagccagggccgagtctgggcacagaagatgctgctgcgagtgtctcccgaccatgtcacgctgctcgacccggcctccaaggaggagctggagtcgtacccactgggcgccatcgtgcgctgtgacgcggtgatgccacccggcaggagccgctcgttgctgctgctcgtgtgccaggaacccgagcgcgcgcagcccgacgtgcacttcttccagggcctgcgcctcggggcggagctgatccgagaggacatccagggggctctgcacaattaccgctcgggccgcggggagcgcagggcggcggcgctcagggccacgcaggaggagttgcagcgcgaccgctcgcccgccgctgagaccccgcccctgcagcgccgcccgtcagtccgcgcagtgatcagcaccgtagagcggggcgcgggccgcggacgaccccaggcgaagcccattcccgaggcagaggaggcgcagaggcctgagccggtggggacctcgagcaacgctgactcggcctccccggacctgggtccccggggtcctgacctggcggttctgcaggcggagcgggaagtggacatcctgaaccacgtgttcgacgacgtagagagctttgtatcgaggctgcagaagtcggcggaggcggccagggtgctggagcaccgggaacgcggccgc

SEQ ID NO: 13240 - DNA, 511 bp, Homo Sapiens
  misc_feature (70)..(70): n is a, c, g, or t
cggttagaaatgtgccagggttaaaggagtccgcagctcccacggctgctgggaggacatggtcctgccnccttccttcctccctccctccgtctccacttctctctccttgcttttgacaaatttctttattcccctctggactaaagtagtggctatttttgtgccactctgcgccccaccctcactgttggccgctccttatccggcctggcctggagggtgacaccatgtcaccctcaccaggactcgtctctccattcccgtcagagtttgctttgatttccctttcctttccttctcggggaccagttcttacttccttttatttttagctctgcactccatgtggtttcagggttcagtctgatccatcaaaaggttctttttttataatcccttttgaaaatgataatcaaaggaagagatgtggtgtttggtcatgtggaaaactcaatgtataatttagacgtctgtcaaaaatccgacaaataaaatttagctggaacga

SEQ ID NO: 13241 - DNA, 542 bp, Homo Sapiens
atcagtcaaacatgctttggagctccccagagcgaccagccacctctgtctttcagctgcattcactgccttcatgtagaaatgctgctctccaggaatgattaattccattcttgtgttgtctgctgaatgaactttaatttcacaaactgccatctttatgcttcctttgctccctttgcaaacatcatcttgtgaatcatagtaggataagattccattatctaaaacaaaccaacgaggctgccagcctgtgagatagttggtccacttgtacaacaccccctccatgcttcagagccccacaccgcgcatcctcccggcccggcgccggccgcggtgatggggtaggcgcagggcctggggcagcccctcccggcccgcccgggccccctccgccggcacgaagccgctttctgcctgcgcgcgccgcagggacgtggcggcctttagaggccgggacagcgggcgcagcgtggagcttgggggccgcgaggcgcgggcccagacattcccgggtaagcctcggcggcggcggccgc

SEQ ID NO: 13242 - DNA, 1219 bp, Homo Sapiens
  misc_feature (965)..(1002): n is a, c, g, or t
  misc_feature (1120)..(1168): n is a, c, g, or t
accctttttaaccttgagttttttgaggaattgtacaggtaatgtgaagacaatggctgaccggattctgacccatgagatctgaactcagggcacgactagaagccctcaaaacccctgggacctggaaccacatcactgatcaaattggcatgttcagcttcactgggttgaaccccaagcaggttgagtatctggtcaatgaaaagcacatctacctgctgccaagtggtcgaatcaacgtgagtggcttaaccaccaaaaatctagattacgtggccacctccatccatgaagcagtcaccaaaatccagtgaagaaacaccacccgtccagtaccaccaaagtagttctctgtcatgtgtgttccctgcctgcacaaacctacatgtacataccatggattagagacacttgcaggactgaaaggctgctctggtgaggcagcctctgtttaaaccggccccacatgaagagaacatcccttgagacgaatttggagactgggattagagcctttggaggtcaaagcaaattaagatttttatttaagaataaaagagtactttgatcatgagacataggtatcttgtccctctcactaaaaaggagtgttgtgtgtggcggccacgtgcttctatgtggtgtttgactctgtacaaattctagtcccaaagatcaagttgtctgaaggagccaaagtgtgaatgtgggtgtcggctgcggcattaaattcatcatctcaacccagagtgtctggtctccctgctctttctgcatggttgtgtccctagtcctaagctttggttctttagggtgactgtggtaagaaggatatttaatcatgacatgcacggacacgtacatatttaactgaaacaagttttaccaaacagtatttactcgtgatgtgcgtagtgcattctgatatttttgagccattctattgtgttctacttcacctnnnnnnnnnnnnnnnnnnnnnnnnnnnnnnnnnnnnnntgaatttgtattaacgcgggtaaagaaggaaccctacaaccaacgtcacaagcgcatacttaaatttgggggcccccctccgccccctaaaaaaacttttctaaaaaacttccgtttnnnnnnnnnnnnnnnnnnnnnnnnnnnnnnnnnnnnnnnnnnnnnnnnnccccccaaagaaagaaccctgggtataagaaattatagggctttggaaatt

SEQ ID NO: 13243 - DNA, 1301 bp, Homo Sapiens
  misc_feature (530)..(814): n is a, c, g, or t
  misc_feature (818)..(840): n is a, c, g, or t
caagtgctgcggcacagtggttctcataatatcccgctcctgcgggattttaagagggttctctccaagaatgcgtgtgtggggagagggcatttcccacggtgttggggcggggaaaggctttggtgtaaatgttacagaccaagttctttggatattgaagtggcgcaaagggcggggacgggtaaatttcagattatagaggcagtcggattggggcggttccccgagggaggaaagaatgcccagtaaaaaggcgccttcaggaaactcccattttgggattttggttccaggaacacgcttcgggtttccgcgccccgggcggtttttttaattgggtggaggaattcaaggcccctagggttcatagtcccagggttttcctttgggaaaccaaggtatgaaaccagtgtccactttcccttattgggggcccgggtctcccaaacggaatggttttgaaaagcgtttttgagggccgaggcggcccgccaaggtgagggtatatgttaggaagggaggggggnnnnnnnnnnnnnnnnnnnnnnnnnnnnnnnnnnnnnnnnnnnnnnnnnnnnnnnnnnnnnnnnnnnnnnnnnnnnnnnnnnnnnnnnnnnnnnnnnnnnnnnnnnnnnnnnnnnnnnnnnnnnnnnnnnnnnnnnnnnnnnnnnnnnnnnnnnnnnnnnnnnnnnnnnnnnnnnnnnnnnnnnnnnnnnnnnnnnnnnnnnnnnnnnnnnnnnnnnnnnnnnnnnnnnnnnnnnnnnnnnnnnnnnnnnnnnnnnnnnnnnnnnnnnnnnnnnnnnnnnnnnnncgannnnnnnnnnnnnnnnnnnnnnnaagaaactgaagccactacttcgggctcttggtagccttcctcctgggaagctctttcttgaatctagtcaccattccattccaccacgccacatatgtcttctccaggcaacagccaacatcaattgtcagccgtgtaagtgagtttcagatgactgtggccccggctaatgtttgactgtagcacatgtgagaggccccatgcagaaacccctagaaccatggagagcagtcatcctgcagaaccatgagtaagttaagcttaagggtgggttaattatgcagaaataagtaaacagagcactccaccaggtattaaagattattacaaagattatgtaattaaaacaatacagaacagaccagggttgactacaagatcaatgggacagaataaagttacatatccaatgcctgctgctgaccacagggatttgtcacagatctcatcagttagaaac

SEQ ID NO: 13244 - DNA, 297 bp, Homo Sapiens
cgtttgtggtgggaggaccggtttgaacaagtggttggagtctaaagcgttttgtacagttggtggagggctaatgggcctagaaggacaccctacagacatttactatttgactattaattataggattattaaagctatggaaacacatccaacctccgacgaaaccctagactgcatcaatgtaagtcccattttagcattattttcaaacatgtcagaggatcaacacttccaaatggaatctaaagtcctaaagctagagagagacacaaaacaaccatcatgtcctccacc

SEQ ID NO: 13245 - DNA, 388 bp, Homo Sapiens
cacgtttgtggtgggaggacaatggagcaggggcgcccagaggcagcccccagtgtattgctaccatcagagagagacctacggccaaactggtggtcatgggcaacaggggtgcattgttccccttggtttcttgagagggtagagtggctaccccagctctagctggtgttgtcttgtaagacaactgcaggcagcattagtccaggtggggcgctgcttggagtcaagggtactgtggcaacgcactcaccgcacacaacacctggagctcgacggcgtcgtggtcaacgatctccagcgtgagaaccttacacacccaactagttttcttgcccaagtccgaatacattcatcctgtcctcaccaaaagtgggtaccaagtact

SEQ ID NO: 13246 - DNA, 691 bp, Homo Sapiens
  misc_feature (646)..(646): n is a, c, g, or t
aggatactattcctacaaaatgaaatttaaaaatagccgttaagttctttctgaaacagtgtccggacaacctcctcagtaattgagagggaaggctggataaatgggtattataactaaatgccaacagtgcaaaaaaggactgtcaaggagtccaagcctgcacctgctgccaacaagacctcagcaaagtagtctccctccgcttcagacagacactatactcgttctgctttgcgtccctttggaggtatgacagtgttgcacacttctctctagggcaagcctggttcctatacttcttaggctgctactcctgtcaacttgttaaatgggcctacaacctgcaaaaatcctgttcggcgtacttacaaaaccaactgcactgctttcaagctagcttagagtgccgagaggcttaccttatctggggctatgccggcgcaataaaggccaggtaggaactggtattactccagtgctgagttgcctgcagcaacctaaggagggactaaaaagcagactcctgcttcgaagcctcgtcgttctaccaagtctgtctctaacaagtctaagttgccctctaagacaactggttgtgcaactcactttgcaactaggagctaaacgtctgtaaaatcaaccngaagattcgaagtaggtgctttggagtcctcccaccacaaacgtt

SEQ ID NO: 13247 - DNA, 557 bp, Homo Sapiens
tatacagccctgttgtcagacaaactcatgtgcaaacaggggtggatgtggcgtgccgggcagtgtggctatgcaatcagactgggatgaagagaatacgaatacttaccagagcctgagagtgaaaacagagattaaagaatcaatcattaaggtgaacgttcaccagtgaggtttacagctttggaaaacagtgacaggaagtcctgacagactagggatggacacagggcagcaggaggcatcctggacatgggctctgcttcccgctgatgatgcagccggtgtctgtgatcagcttaacacaaagctgcaactcccagtcctggacaggcccaggggatggctatccagaaagaacgggaggggtccaggaggccaacccctaggtgatacatacatttatacaacagtgacggcgagggagcagcagtcttttctggctttactgcattgtaattgtgatcgctcgcccacgacggcgtgctgctctcacaagctgcttccttcccgagtgcttcactccgattgagtccacataacggggtacggagctc

SEQ ID NO: 13248 - DNA, 701 bp, Homo Sapiens
  misc_feature (303)..(326): n is a, c, g, or t
tcgcgatggggctctggaggtggcctgtgcagttgtgaggcaaggggctatttgatgatagaggacgaggagagtgacctcttcacggaagccccccaggatcggcaagctggagcctctgttaaggaggagtcttcatcatccaaacctggaaagaaaatcccagcaggagctgtttctgtatttttaggagacacggatgtgtttggtgctgcctccgttccatcactgaaggagccacagaagcctgagcagcccactccaaggaacagcccctatggtccccctcccactggcctcttnnnnnnnnnnnnnnnnnnnnnnnncgactttttctcggcaccccacagcaaaccttctaaaacacgcaaagtccaatccactgccgatatctttggtgacgaagaaggagatctgttcaaagaaaaagccgtagcatcgccagaagccacgtgtgagtcagacagatgaaaataaagcagagagcagaaaagaaagggttaccttatcttccagcaaaaatctcaagccctcatcagaaacaaagactcaaaaaggcttattttcagatgaggaggactctgaggattggtttcctatctcaaagggcgagtaagttaaaaggtgcatctctgcggccgggcaagctccccacgtcggtttcccggttggatggaagcgtcgcgcatgggtaccgagct

SEQ ID NO: 13249 - DNA, 536 bp, Homo Sapiens
gagtgagaacgggagatctgccgaggataacaacctcccttgtggccgaagggcgggggatccccacacgagggctccgcttcgagagacggcgacaaatgaaagttcgtagcgcgttccggaggcccggccacctctgagaagggagacgacgctgctgggtccgctgagcggggcgacccgagcttatataagaatcggtgataggatcacaacttctgaggtcccagcaagagtcctaacatctagcagctctaccaccaggacaggccccctaaaactaattccaacaagcacctctgaagtcttctcattcacaggttaaggctacctttccagataatccaacagctaaatcaccagtttccaagggcatttgcatcacctatggaaagcatcggatccttatacaccagatgttcttgacagctcatcccgtcattcccccctgcacaaaagtcgctataccagcggacaagcaagacaactactgagcttctttagattgtcaagtagatataatatcactgccagca

SEQ ID NO: 13250 - DNA, 428 bp, Homo Sapiens
tcgcgggtctcaagctgggtcccagctgaggcatgagaggcatctcagtgggggttttatctcctatgcttcttgcttacatcactaagtggctaaatgattagcacttttctgctctatgagaaacatgcagaagagtcaatctacctaagttttcatttttaaattgcagccggacagaaattcactttgctgcagggttgctttttgctaaatgctaatatgatcactgtgtgcccttatttgagtaatactgtaaaatgggagaaaagacggaaggagaactttaaagaagggaaggaccactcttcccctattgatggtatagggcagaaagtaaggacacaaagaacgagattcaaatgccattttacaggacaggagcccctgtcagtttacagcttgagacacgcgacgggtaccgagct

SEQ ID NO: 13251 - DNA, 1518 bp, Homo Sapiens
tttattatgattattagaagggtttagcagccatctcaaaaataaataaattataaataagagggacacagctagtaagagtaagaaagaggtaaaagtgaacaaacgagaaaacagtagcttcaaacacccaagctttcctttaaggaagtccctgggccttaagtcacgatttgtttcaaacacatttcatggagaaagcgaagaaagatggcattttctagtctcaacctgccccacacaacttgggtggtgatctggaaaacttgctcatagccaagccctagaccagctcagccactgtgtggatcttctgatggcgaatgaggttgcagtgtcgattaaagcttttcccacattcaatgcactggtgaggtcgctcccctgtgtggcttctctgatgttcaatgagaaatgaacgccgactgtagctcttactgcactggctgcactgatacggcttttctcctttgtggattctctgatgctggataagacccgcactctgactgaagaccttcccacactccttgcagtggtaccgtttctgtatattgtggattcctcggtgattaaaaagaccagaacttcgactgaaggctttcccacattcattacattcataaggtctttctccagtatgaattctttgatgtcgaatgagacctgagctctgagtaaagctcttcccacattcatcacattggtgttgcccctctcctaagaggtttccccactgcctctctatcctatccttatgttcaccaacttctccatgtgagggatcctgctgtgatacctcccaggtctgctcattaaacattttcccatgtggttccactatcttaggacagtctttccttagcaccaactctctgtcctcagtcttggttacttcatctgtctctccaatagaatggcacttctgagcagagtcacatgtgagctgtggctccttaggctgggactgaagggtcagtggtgtctgctctgctagaggcaccatctctttacagaggacttcttgtctgtgtctgtgggccaccatctcatgttgtggttcatcgagctctctctccagatcctccagcaaaatcacagcctcttctccactctctggacagtgttccctcacccagccctggagctccttgggcagaatggatagaaactgctccagcaccagcagatccaaaatctgctcctttgtgctcacatgtggcctcaaccactggtagcaaagttcctggagtcgagtaagagcctcccttggtccaggggtctcttggtagcacagctgtcgaaagtgccttcggaagatttcccttgccagtggattactgcgtttcagtctggattcctgccattgaaggtgactttttgcttccactttcattgtcagaagttcttcccatgcctcgggaacttgaacacccagggataaaacctcctttgagtttgtattcatcttgaccttgaacagcttaaaaggtaccctccagcatgatacacgccacg

SEQ ID NO: 13252 - DNA, 227 bp, Homo Sapiens
attccactttcttctgcctgctttattttatcctttatactttttgtatcctcagtccaatcaagttgacactcaatattaaccatcacaaccacattctgggccattcaaataaaaaatagattaagaaatgtaaaaatactgaaattatttgtaatgtttttctgatcaccatggaattaagctagaaatgatcaaaaagacgaccaggcacattggctcattct

SEQ ID NO: 13253 - DNA, 920 bp, Homo Sapiens
  misc_feature (77)..(118): n is a, c, g, or t
ggtgaggagatacaagggaagtggctatcgccagagtcggattcgccgccgcagcagccgccgcccccgggagccgnnnnnnnnnnnnnnnnnnnnnnnnnnnnnnnnnnnnnnnnnncgcaccatgccgtcggagaagaccttcaagcagcgccgcaccttcgaacaaagagtagaagatgtccgacttattcgagagcagcatccaaccaaaatcccggtgataatagaacgatacaagggtgagaagcagcttcctgttctggataaaacaaagttccttgtacctgaccatgtcaacatgagtgagctcatcaagataattagaaggcgcttacagctcaatgctaatcaggccttcttcctgttggtgaacggacacagcatggtcagcgtctccacaccaatctcagaggtgtatgagagtgagaaagatgaagatggattcctgtacatggtctatgcctcccaggagacgttcgggatgaaattgtcagtgtaaaaccagaaaaaatgcatctcttctagaattgtttaaacccttaccaaggaaaaaaaaggggtgttaccaactgagatcgatcagttcatccaatcacagatcatgaaacagtagtgttcccacctaggagtgttaggaagttgtgtttgtgtttcaagcagaaaaactgagctccaagtgagcacattcagctttggaaactatattatttaatgtaggctagcttgttttcaaattttaaaagtttaaaaataaaatactttgcattctaagttgccaataaaatagaccttcaagttattttaatgctcttttctcactaataggaacttgtaattccagcagtaatttaaaggctttcagagagaccctgagtcttctcttcaggttcacagaacccgccgcctttttgggtaga

SEQ ID NO: 13254 - DNA, 1558 bp, Homo Sapiens
  misc_feature (1416)..(1425): n is a, c, g, or t
gcggccgcctgctggccggcgcctaccacgccgtggtgttgctggacgagcgcagcgccgccctggacggcgccaagcgcgacggcaccctggccctggcggccggcgcgctctgccgcgaggcgcgcgccgcgcaagtcttcttcctcaaaggaggatacgaagcgttttcggcttcctgcccggagctgtgcagcaaacagtcgacccccatggggctcagccttcccctgagtactagcgtccctgacagcgcggaatctgggtgcagctactgcagtaccccactctacgatcagggtggcccggtggaaatcctgccctttctgtacctgggcagtgcgtatcacgcttcccgcaaggacatgctggatgccttgggcataactgcctcgatcaacgtctcagccaattgacccaaccattttgagggtcactaccagtacaagagcatccctgtggaggacaaccacaaggcagacatcagctcctggttcaacgaggccattgacttcatagactccatcaagaatgctggaggaagggtgtttgtccactgccaggcaggcatttcccggtcagccaccatctgccttgcttaccttatgaggactaatcgagtcaagctggacgaggcctttgagtttgtgaagcagaggcgaagcatcatctctcccaacttcagcttcatgggccagctgctgcagtttgagtcccaggtgctggctccgcactgttcggcagaggctgggagccccgccatggctgtgctcgaccgaggcacctccaccaccaccgtgttcaacttccccgtctccatccctgtccactccacgaacagtgcgctgagctaccttcagagccccattacgacctctcccagctgctgaaaggccacgggaggtgaggctcttcacatcccattgggactccatgctccttgagaggagaaatgcaataactctgggaggggctcgagagggctggtccttatttatttaacttcacccgagttcctctgggtttctaagcagttatggtgatgacttagcgtcaagacatttgctgaactcagcacattcgggaccaatatatagtgggtacatcaagtccatctgacaaaatggggcagaagagaaaggactcagtgtgtgatccggtttctttttgctcgcccctgttttttgtagaatctcttcatgcttgacatacctaccagtattattcccgacgacacatatacatatgagaatataccttatttatttttgtgtaggtgtctgccttcacaaatgtcattgtctactcctagaagaaccaaatacctcaatttttgtttttgagtactgtactatcctgtaaatatatcttaagcaggtttgttttcagcactgatggaaaataccagtgttgggnnnnnnnnnnagttgccaacagttgtatgtttgctgattatttatgacctgaaataatatatttcttcttctaagaagacattttgttacataaggatgacttttttatacaatggaataaattatggcatttctattgaaaa

SEQ ID NO: 13255 - DNA, 659 bp, Homo Sapiens
  misc_feature (404)..(503): n is a, c, g, or t
  misc_feature (512)..(572): n is a, c, g, or t
  misc_feature (577)..(587): n is a, c, g, or t
atcctggtgaatatagtgctgctatgttgacattattcttcctagagaagattatcctgtcctgcaaactgcaaatagtagttcctgaagtgttcacttccctgtttatccaaacatcttccaatttattttgtttgttcggcatacaaataatacctatatcttaattgtaagcaaaactttggggaaaggatgaatagaattcatttgattatttcttcatgtgtgtttagtatctgaatttgaaactcatctggtggaaaccaagtttcaggggacatgagttttccagcttttatacacacgtatctcatttttatcaaaacattttgtttaattcaaaaagtacatattccatgttgatttaattctaagatgaaccaataaagacataattcttgtgnnnnnnnnnnnnnnnnnnnnnnnnnnnnnnnnnnnnnnnnnnnnnnnnnnnnnnnnnnnnnnnnnnnnnnnnnnnnnnnnnnnnnnnnnnnnnnnnnnnntttggcggnnnnnnnnnnnnnnnnnnnnnnnnnnnnnnnnnnnnnnnnnnnnnnnnnnnnnnnnnnnnngaacnnnnnnnnnnnctgtgccaaaaaggtttttttccaagagaaaccccggcgccagagaaaaaggggggtgggttttcccccccc

SEQ ID NO: 13256 - DNA, 1471 bp, Homo Sapiens
tgtataatatcactttggaccatggacatgagctggaaaaataatgtatttttgtagattgtatgcacaagaatgactttagaaccgcatgatacggtggaaggagcactggactagtcgtcactaccctttttggattcagggctcctcacaattaaaatgagtgtaatggaaacaaggtgaaaatatagaagcatcccctttgtatactgttgtgctacttacagtgtactgggcaatgctttatctcactggattctcatggtaggatttctgagatcttaatctaagctccaaagttgtctacttttttgatcctagggtgctccttttgttttacagagcagggtcacttgatttgctagctggtggcagaagtggcaccattacccaggtctgactgaccaccagtcagaggcactttatttgtatcatgaaatgatttgaaatcattgtaaagcagcgaagtctgataatgaatgccagctttccttgtgctttgataacaaagactcccaaatattctggagaacctggataaaagttggaagggctagattgggatttgaagacaaaattgtaggaaatcttacattttggcaataacaaacattaatgaaagcaaaacattataaaagtaattttaattcaccacatacttatcaatttcttgatgcttccaaatgacatctacagatatggtttcgtggacatctttttctgtttacataaatttatccacttaaaatgtgataatgtggagacaaagcaagatttgattacataaacttttctctgcattggtcttttcactatcttatttgctaacttttcttatttttcttcaacctccccaccctccattttttggatattaaacagggaaagcttgctacattataaagattgttggcaccatttattttacacaaaggctaaaggttaacttttggaaatgatgagctacttttatatatgtgtttactcatgctttgtgatatttctggatcattccagtcataaagacttattacatgtactatttcttgctacctgtgaaaaggtatattttaaagaatgtataaccaacagtccatttactttttattagtatgtagaggatttgtatctaattcatgaatgtagttttacagtagtttgtcattgtaaatggagcaaagtacattatcttctaaaatgtacattatgtaagaattgtaaatatacttaagtaatttgtatgccaaaaaattacattacagtcaataaacatctcacctcggactccgccacaacccactatccccgcaatagcctgggggcccggcttcgcacccttcaaatagtttctctaaacacattccctttggacgacgcggggccctactaaggtaggggaccccgcggccttttaatcgtttcctaaagaagaccccggccccctgaacaaccggattgagatccaccaccc

SEQ ID NO: 13257 - DNA, 605 bp, Homo Sapiens
gggagagtcactcctgccttcaccatgaagtccagcggcctcttccccttcctggtgctgcttgccctgggaactctggcaccttgggctgtggaaggctctggaaagtccttcaaagctggagtctgtcctcctaagaaatctgcccagtgccttagatacaagaaacctgagtgccagagtgactggcagtgtccagggaagaagagatgttgtcctgacacttgtggcatcaaatgcctggatcctgttgacaccccaaacccaacaaggaggaagcctgggaagtgcccagtgacttatggccaatgtttgatgcttaacccccccaatttctgtgagatggatggccagtgcaagcgtgacttgaagtgttgcatgggcatgtgtgggaaatcctgcgtttcccctgtgaaagcttgattcctgccatatggaggaggctctggagtcctgctctgtgtggtccaggtcctttccaccctgagacttggctccaccactgatatcctcctttggggaaaggcttggcacacagcaggctttcaagaagtgccagttgatcaatgaataaataaacgagcctatttctctttgcaaaaaaa

SEQ ID NO: 13258 - DNA, 275 bp, Homo Sapiens
gatgaggagacaccagagcaggagatggaggagaccccttgcagggagctggaggaagaggaggagtggggctctggaagtgaagatgcctccaagaaagatggggctgttgagtctatctcagtgccagatatggtggttacattaaaccttacgtgtcctgtaggaagtaggacacagtaaaagtggtgggcatccctgtggtgcctagacctgtctcgctacctcctgtgtgagtatagtcttcagacgtttagtcatgcttggtttacttg

SEQ ID NO: 13259 - DNA, 433 bp, Homo Sapiens
gtaggctactgacgagccacgatggctatgtcaagttctggcagatctacattagaggggcaagatgagccaaggtgtctagcacgagtggaaacctcatgatgggcggcccctctcctgcctcctgttctgtgacaaccataagaaacaagaccctgatgtccctttctaggaggttccttattactggtgctgaccagaaccgagagttaaagatgtggtgtacagtaatacctggacctgcctgcaagactattcgcttctccccagatatcttcagctcagtgagtgtgccccctagcctcaaggttagcttggacctctcagcagaatacctgattctcagcgatgtgcaacggaaggtcctctatgtgatggagctgctgcaaaaccaggaggagggccacgcctgcttcagctccatctcggagtt

SEQ ID NO: 13260 - DNA, 408 bp, Homo Sapiens
gcggcggtggatagaagcggttgtaggacaggtagccagtgaacatgctcagctcactggggatgatccaccagggctcacccagctcctggcctggcgggggaaggaagggctggaagtggcgggtggcaaacactgcacttggtgaggcggcggctgtccagtttcggaggccggacagggcgaggcgggagacccctaggaagccatctttgctcttggtcatggtctccgggagcagaggctggaatcgggcttctatggtgagcgtctcctcgctagggtcagggggcaactcctcctcctcgcagctggccgcgggagttgaccctgttagcttctcagcaatgggtttgaactcctcagggctgatgtacatatccccgtcagtgtccaaggaggaaaaga

SEQ ID NO: 13261 - DNA, 1520 bp, Homo Sapiens
ggtcagtctttaaagaagagtttccttcgcaagttgaaagtacttttcagaagcatcaaatggttgacgtgttacaaaatcctaccaatccaaatgttttcaagtacaaacttatgaaaccttattttctctcttcctaagagtatttatcgttgctcacggatctttggtcgcaagaaacagaaacgccgcggcaggctggagcgtgggacaggaggaaggcgtggcctccccgcccactgcagcccgtccccgaggcgtgcgcttcacgacgtggggcctacatgatgtacaccttctcggcttgtgagaagtggaagacttctttggttctcgggcacacgactttatcatcttgacggatagaaagcagagaattgtagccgtagacgtagccgttgggcagcatcatgggcggattgttctcgttcatcacgtcgccagaaatcttgcagaccaggcgggagttggcacagtgggccatgggcaggggctgcgccagcttgttcagggagcggctgcacacagggcagtcagggctcttggagctgccgtcctccttgtagcactgtggtgtcttgatggctgagaggccggcctgcagggtgagggtgaacacagaattgtttcccagctggtgtagtcggtagttgtcgtaccggaactgctggatcagcatccgccaccgtgcagggtccagaaggtccttgtacggggagatgtgcgtgtcgggcgggaaggccagcatgcccatggcctggcgcacctcgtccagctggctcccttctgcttggctgaagtgctttcttgcatgtctcacagcgtccagtctcttattctgccggatgagttcaatgaactcctggattctgaggctgaactccaggcagctcttcatcttccggagccgggacttgttgtcatggcaccaggccaggcaggtggccgtctcacgcctctccagggactcctccacctctttggccgtcaggaacatctcaatattcactaggtcctcgatgccgctctggcgcgccagcttgacagccgtgttgtagtagccgcaacgcagcaggtgctccaccatcatgcgatccatgcgcttcctcttccacacgctggccgccgcgggctggtcgctgctatgctctttgaggtgctcgatccggcgcttgcacagcttggcgctctcgtcctcggcctggatggattccaccgccttcctcttgaggacgctgagcttctccaccacgccgtccagcaggctgaccacggagtccacggcggggcagccgctcaacgtcttctccagctcggccaccaccatggtgacgtggctggtctcccggtcaatgttcttctgagcggcgcgaaagcgtttgttcagcgtctcgtagggcaccttgagggtcgggtactcctggaccttcagggtcatggacaactgagccgccgactcctgcaccgccatcttgaagcaaccaaaacattagcgggcgggatccggataattccggacc

SEQ ID NO: 13262 - DNA, 554 bp, Homo Sapiens
gagcttatgcgtcagtctggcgggaccgttcctatgagcgatccccctttgcccagattgcgttacagctaggccccttgctggagtccaggaaggcctatgtgaacatgtcccctgtttgagaaccttcacttacgcgggcattgatgccacagctgaggaggcatgagctgccatccagccagaacgtggctctgctggccggagcaaactctgctgtctaacctgtgaccagtctgacccttacagcctctgacttaagctgcctcaaggaatttttttaacttaagggagaaaaaaagggatctggggatggggtgggcttaggggaactgggttcccatgctttgtaggtgtctcatagctatcctgggcatccttctctctagttcagctgccccacaggtgtgtttcccatcccactgctcccccaacacaaacccccactccagctccttcgcttaagccagcactcacaccactaacatgccctgttcagctactcccactcccggcctgtcattcagaaaaaaataaatgttctaataagctcc

SEQ ID NO: 13263 - DNA, 745 bp, Homo Sapiens
ggcacccgagttcttcaagcggcaagaacaagtccgagactccagagatctacctggcctatcgaaacttgatgattgacacttaccgactgaacccccaagagtatcttacctctaccgcctgccgccgaaacctagcgggtgatgtctgtgccatcatgagggtccatgccttcctagaacagtggggtcttattaactaccaggtggatgctgagagtcgaccaaccccaatggggcctccgcctacctctcacttccatgtcttggctgacacaccatcagggctggtgcctctgcagcccaagacacctcagcagacctctgcttcccaacaaatgctcaactttcctgacaaaggcaaagagaaaccaacagacatgcaaaactttgggctgcgcacagacatgtacacaaaaaagaatgttccctccaagagcaaggctgcagccagtgccactcgtgagtggacagaacaggaaaccctgcttctcctggaggcactggaaatgtacaaagatgactggaacaaagtgtccgagcatgtgggaagccgcacacaggacgagtgcatcttgcattttcttcgtcttcccattgaagacccatacctggaggactcagaggcctccctaggccccctggcctaccaacccatccccttcagtcagtcgggcaaccctgttatgagcactgttgccttcctggcctctgtcgtcgatccccgagtcgcctctgctgctgc

SEQ ID NO: 13264 - DNA, 207 bp, Homo Sapiens
ccacgcgtccgggatgattctgatggtcttacattatagtttagtatgttttcaattgtgttttacaaatgttatcctgataatcatagagaaactgctgaaacaagaagagatgagtgtcaagttgacaagctagaaaattttgcaatagcccaagaaagataaacagccagtgaagggatgaactatgggtgagacattgagaat

SEQ ID NO: 13265 - DNA, 975 bp, Homo Sapiens
  misc_feature (885)..(885): n is a, c, g, or t
tgtcggcttgctggagactcggcagaggtgaccacagaggccacactagtgggggtggagttggcctgagcggaggtggctgttgtccccttcagtgatgctggggtgggctgtgggatgttgacgagcaggctggtgttgggaacattggcgacgcggatgaggccctgctggatgatcctctgtccctgaatctgcacactgggcaccgacgcccggggggccaggaggaggggcggtggccctgtgctggaatgttgcctaatgctgtggatttgctgagcccccctgacgagtgggggcatgacgacctgtgagctcgcctgtggcaccagcttcgaggacgcctgctgcccacctcggaccaggggcgggggtatgacactgccgggcatccgagctgaaaaggtctggagtcatggcttgccagcaggaatgttctgagtgccccgaacaagcgggggaggggtggtcacggtgctcccaacagaacctgtgggcttctgggcggtggcttccttttgtatttgactctgccgcaactttttcaacaacacgagttttgcttcttctaacctcaattcttccttcagctgcttgatcatcctttctcgttcttcaggactgcttttcatgagggcctcggtgctagtctccttcaaggccaccgtggtcagcccattcactctcgggctcgagggctgctcgttgtcggagagcacaatcacgtcaggtgaggggggtctcctctcggacttcatgtcactgtgtgaggtgcgcatgtccacgggcccatcgcccaccagcccttcgcctctgccatggccatgccgtggcctctgttgccctcagcaatccttgtggttggacctgctcccggctcanggtgtcaccctcatgtctccgtcagtgtttaaatctgaaccatcaatcctcagtccttcacccaagctaggtacagcctcgattcgtatc

SEQ ID NO: 13266 - DNA, 872 bp, Homo Sapiens
gggaacgttaggcgccggaagtggccgttgctggggcttgcgtgggaggaaggtgactgtgaggaaggtgtgtgtccaccgagcacttggattcagcttcttcatttccaacatggaagaaacttacaccgactccctggaccctgagaagctattgcaatgcccctatgacaaaaaccatcaaatcagggcttgcaggtttccttatcatcttatcaagtgcagaaagaatcatcctgatgttgcaagcaaattggctacttgtcccttcaatgctcgccaccaggttcctcgagctgaaattagtcatcatatctcaagctgtgatgacagaagttgtattgagcaagatgttgtcaaccaaaccaggagccttagacaagagactctggctgagagcacttggcagtgccctccttgcgatgaagactgggataaagatttgtgggagcagaccagcaccccatttgtctggggcacaactcactactctgacaacaacagccctgcgagcaacatagttacagaacataagaataacctggcttcaggcatgcgagttcccaaatctctgccgtatgttctgccatggaaaaacaatggaaatgcacagtaactgaatacctatctcatcaaatgccagaccctagaagactgttgccttcttccttctacccagtgggggttctcatttttccctccctaatcttaattatagaaatgggaaaaactcccctgtggacctttcccaaacgtgaacaagccccacttttttttcctccccccccttgtgaatccttcattttaaatggcaaggaacccccctccatacctccgagaagagctttccacaaattaaacacctttttgga

SEQ ID NO: 13267 - DNA, 1373 bp, Homo Sapiens
cagcactttcaatgatagagtttttgccagtgaattgaatgcaggaattataaaaacagatcaaaactatgaaaagatgatgtttaaagaagctttgaaaacagggttttttgagtttcaggccgcaaaagataagtaccgtgaattggctgtggaagggatgcacagagaacttgtgttccggtttattgaagttcagacacttctcctcgctccattctgtccacatttgtgtgagcacatctggacactcctgggaaagcctgactcaattatgaatgcttcatggcctgtggcaggtcctgtggatgaagttttaatacactcctcacagtatcttatggaagtaacacatgaccttagactacgactcaagaactatatgatgccagctaaagggaagaagaccgacaaacaacccctgcagaagccctcacattgcaccatctatgtggcaaagaactatccaccttggcaacataccaccctgtctgttctacgtaaacactttgaggccaataacggaaaactgcctgacaacaaagtcattgctagtgaactaggcagtatgccagaactgaagaaatacatgaagaaagtcatgccatttgttgccatgattaaggaaaatctggagaagatggggcctcgtattctggatttgcaattagaatttgatgaaaaggctgtgcttatggagaatatagtctatctgactaattcgcttgagctagaacacatagaagtcaagtttgcctccgaagcagaagataaaatcagggaagactgctgtcctgggaaaccacttaatgtttttagaatagaacctggtgtgtccgtttctctggtgaatccccagccatccaatggccacttctcaaccaaaattgaaatcaagcaaggagataactgtgattccataatcaggcgtttaatgaaaatgaatcgaggaattaaagacctttccaaagtgaaactgatgagatttgatgatccactgttggggcctcgacgagttcctgtcctgggaaaggagtacaccgagaagacccccatttctgagcatgctgttttcaatgtggacctcatgagcaagaaaattcatctgactgagaatgggataagggtggatattggcgatacaataatctatctggttcattaaactcatgcacattggagatttatcctggtttcttaggaatactactactctgattgtgtctactgattggctatcagaaccttaggctggacctaaatagattgatttcatttctaaccatccaattctgcatgtattcataattctatcaagtcatctttgattcctggacctaataaattttttttccctttctttgggtgtctaa

SEQ ID NO: 13268 - DNA, 294 bp, Homo Sapiens
tgagccaccgcccccagctgattccaggcgaattcttctctgatgggcgggcgagggtgtgttcgtgtgatgggttggagtgtgtgtgtctgagtacacagatgatgtgttttcccttcagcttcttacgttttctgagcatccgttgtgccttaacattttctgcttgtcctttgggacaaagcagtattttactcattctttgaatgttctcattcttttgtatcatgtgacttattaaaatcagtttctaacccgggactaacaagcccaaaaatatatatccctgtcggc

SEQ ID NO: 13269 - DNA, 1493 bp, Homo Sapiens
ccgctgctgctgctctgcaaaattcagctgctgcctctgtcttgaggaccccagcgccgggttcccccggggccatgcggcctgcagccacagcctccctcctggggcccctcctcactgcctgcgccctgctgccttttgcccaggccagacccccaactacaccagacccgtgttcctgtgcggaggggatgtgaagggggaatcaggttacgtggcaagtgaggggttccccaacctctacccccctaataaggagtgcatctggaccataacggtccccgagggccagactgtgtccctctcattccgagtcttcgacctggagctgcaccccgcctgccgctacgatgctctggaggtcttcgctgggtctgggacttccggccagcggctcggacgcttttgtgggaccttccggcctgcgcccctagtcgcccccggcaaccaggtgaccctgaggatgacgacggatgagggcacaggaggacgaggcttcctgctctggtacagcgggcgggccacctcgggcactgagcaccaattttgcggggggcggctggagaaggcccagggaaccctgaccacgcccaactggcccgagtccgattaccccccgggcatcagctgttcctggcacatcatcgcgcccccggaccaggtcatcgcgctgaccttcgagaagtttgacctggagccggacacctactgccgctatgactcggtcagcgtgttcaacggagccgtgagcgacgactcccggaggctggggaagttctgcggcgacgcagtcccgggctccatctcctccgaagggaatgaactcctcgtccagttcgtctcagatctcagtgtcaccgctgatggcatctcagcctcctacaagaccctgccgcggggcactgccaaagaagggcaagggcccggccccaaacggggaactgagcctaaagtcaagctgccccccaagtcccaacctccggagaaaacagaggaatctccttcagcccctgatgcacccacctgcccaaagcagtgccgccggacaggcaccttgcagagcaacttctgtgccagcagccttgtggtgactgcgacagtgaagtccatggttcgggagccaggggagggccttgccgtgactgtcagtcttattggtgcttataaaactggaggactggacctgccttctccacccactggtgcctccctgaagttttacgtgccttgcaagcagtgcccccccatgaagaaaggagtcagttatctgctgatgggccaggtagaagagaacagaggccccgtccttcctccagagagctttgtggttctccaccggcccaaccaggaccagatcctcaccaacctaagcaagaggaagtgcccctctcaacctgtgcgggctgctgcgtcccaggactgagacgcaggccagccccggcccctagccctcaggccttctttcttatccaaataaatgtttcttaatgagg

SEQ ID NO: 13270 - DNA, 876 bp, Homo Sapiens
ggcccggagcactttgcagagcacgtccagccctcatggggtccctgcatagaaatgtgaacccctgccactgaggaagatgaaggtagaccctgtgtctggaggtgctggagggcagcgggtcacctcttgtattcccaccttagtttggggtgttttgaagaggttcagagactaaatcttaaaccttatttgaataccaacgatagctattttgggaatttcgatcttaaaaagtgacaaaacacatttcccattttcatttttcagctgaattttagtaacttatttttgatgttttaattttatcatggcctcctctttggaggccaaccttcccatgggtctcaaaagcagtgacatttggtagtaaatcactgcctctcaggagtcggtatgcacaagcactcagcagccactgttgatgccttctagggaaaccctaatttccgttggtaaaggtaggggcctcggaactgttccggatctgctgtagaacttcaccgtgtggaatggtgacagccacacaccgttgaccagtttagaaaaggttgcattcaataaaactcttagcttgagcttatgcaatgattggttaagattttggcattgtaagaattaggagatgatcatagaaaatatatgtaaaggattcaattttcaatcattttcaaattactgttataaattgtttttgctgagttgtaatacttttgagatacaatgtattccttgtactgaaagaatgaaaaaggactttttcagcatttgaggtaagttctttaacgtttcattaaaaacattttttacaaatattttgtacatgcacttgcagtattgaggttaatcattttaataaattcggaaattaaaccc

SEQ ID NO: 13271 - DNA, 1759 bp, Homo Sapiens
  misc_feature (940)..(967): n is a, c, g, or t
tcgagccggtaccctccccatctgcacatcctgaggacagaaaagctgggtctgctgtgcctcccaggcttagtgttccctccctcaaagactgacagccatcgttctgcacggggctttctgcatgtgacgccagctaagcatagtaagaagtccagcctaggaagggaaggattttggaggtaggtggctttggtgacacactcacttctttctcagcctccaggacactatggcctgttttaagagacatcttatttttctaaaggtgaattctcagatgataggtgaacctgagttgcagatataccaacttctgcttgtatttcttaaatgacaaagattacctagctaagaaacttcctagggaactagggaacctatgtgttccctcagtgtggtttcctgaagccagtgatatgggggttaggataggaagaactttctcggtaatgataaggagaatctcttgtttcctcccacctgtgttgtaaagataaactgacgatatacaggcacattatgtaaacatacacacgcaatgaaaccgaagcttggcggcctgggcgtggtcttgcaaaatgcttccaaagccaccttagcctgttctattcagcggcaaccccaaagcacctgttaagactcctgacccccaagtggcatgcagcccccatgcccaccgggacctggtcagcacagatcttgatgacttccctttctagggcagactgggagggtatccaggaatcggcccctgccccacgggcgttttcatgctgtacagtgacctaaagttggtaagatgtcataatggaccagtccatgtgatttcagtatatacaactccaccagacccctccaacccatataacaccccacccctgttcgcttcctgtatggtgatatcatatgtaacatttactcctgtttctgctgattnnnnnnnnnnnnnnnnnnnnnnnnnnnnacatcagctgtaatcattcctgtgctgtgttttttattacccttggtaggtattagacttgcactttttttaaaaaaaggtttctgcatcgtggaagcatttgacccagagtggaacgcgtggcctatgcaggtggattccttcaggtctttcctttggttctttgagcatctttgctttcattcgtctcccgtctttggttctccagttcaaattattgcaaagtaaaggatctttgagtaggttcggtctgaaaggtgtggcctttatatttgatccacacacgttggtcttttaaccgtgctgagcagaaaacaaaacaggttaagaagagccgggtggcagctgacagaggaagccgctcaaataccttcacaataaatagtggcaatatatatatagtttaagaaggctctccatttggcatcgtttaatttatatgttatgttctaagcacagctctcttctcctattttcatcctgcaagcaactcaaaatatttaaaataaagtttacattgtagttattttcaaatctttgcttgataagtattaagaaatattggacttgctgccgtaatttaaagctctgttgattttgtttccgtttggatttttgggggaggggagcactgtgtttatgctggaatatgaagtctgagaccttccggtgctgggaacacacaagagttgttgaaagttgacaagcagactgcgcatgtctctgatgctttgtatcattcttgagcaatcgctcggtccgtggacaataaacagtattatcaaagagaaa

SEQ ID NO: 13272 - DNA, 663 bp, Homo Sapiens
ggggttgtttcggagcgggagctcttccgagacgcactgggggccggatgaatcctgcttatctgtgaaatgcagttaacacatcagctggacctatttcccgaatgcagggtaacccttctgttatttaaagatgtaaaaaatgcgggagacttgagaagaaaggccatggaaggcaccatcgatggatcactgataaatcctacagtgattgttgatccatttcagatacttgtggcagcaaacaaagcagttcacctctacaaactgggaaaaatgaagacaagaactctatctactgaaattattttcaacctttccccaaataacaatatttcagaggctttgaaaaaatttggtatctcagcaaatgacacttcaattctaattgtttacattgaagagggagaaaaacaaataaatcaagaatacctaatatctcaagtagaaggtcatcaggtttctctgaaaaatcttcctgaaataatgaatattacagaagtcaaaaagatatataaactctcttcacaagaagaaagtatcgggacattattggatgctatcatttgtagaatgtcaacaaaagatgttttatgaaatgtcagaaatattaacaaaaattctcagcattaaagaaaacattgattttcctttcctgactgg

SEQ ID NO: 13273 - DNA, 914 bp, Homo Sapiens
  misc_feature (265)..(314): n is a, c, g, or t
cgcgatctagaaccggacgcgtgggtcgacccacgcgtccggacgcgtggctgtggtaacaatttgtcatacacccaagacacagcatggacaatccttgcaaattgttggcacctacactcgagaactggtttctgcttacttaaatctgttttatattgtttatgatatctaaactcatttttctgtttcttgccccaaacagtgacacagtgatagaataaactgaagctgttacttggcacctgtaatttttaaaaatgannnnnnnnnnnnnnnnnnnnnnnnnnnnnnnnnnnnnnnnnnnnnnnnnntccaaatcctattagatgtgtacagtaactctactgttattcctggaaaaatatctttgctttgatgaatctatgagatttctaatataacaacattcttagctattaagacccctacttagaagtttgttaccttagaaagtttttctttattcatgtacaaattatatgcagcagtgggaagatgcatataataccctgcccaggtcactagcaaggatattgcaccaaaagaactttctaaggtatggcagcaagtaattgacaaattttacatgtttcgtattcaaaaccacatgtcatgaaaattgacaggcatgtgcctgtctgtctatctctttctctgatcatttcatcttccttttaagcaatgatatttgaattctttatttctgaaagatcttttatatttaatttgtctgtataaattcacttggtgtgaaattgaatgcaaaaccagaacttctgagcatgtacttttactgatatttttctttcattatattttttgaggaaatgacaatttggtaagggctcagatgcatcatagctacaaaaagtcggacgcgtgggtcgacccacgcgtccgcggacgcgtgg

SEQ ID NO: 13274 - DNA, 905 bp, Homo Sapiens
ccacgcgtccggccctgctctagcgggccgcgtagcggacatggcgggctcccggctcccgcggcagctcttcctccagggcgtggcggccgtcttcatgtttgctttcgcttccctctacacgcaaatcccaggcctgtatggccccgagggcatcctacctgcaaggaggacgctgcggcctcagggcaaggggcgctggcagcagctgtgggagaccccgacgctgctgtgggaagcgccgagactggggctggacacggcccagggcctggagctgctgagcctgctgggtgcactagtggccctgggagccctgctgctgagcccactgcgccaacctgtcatctacttgctgctgtgggccgcctacctgtcagcatgacaaggtgggccaggtgttcctttatttccagtgggactccctgctgctagagactggcttcctggccgtgctggtggccccgctgaggccagcctcccaccgcaaggaggccccccagggcaggcaggcaggggccctgccccacgaagacctccccttctggctggtgcgatggctgctgttccgcctcatgttcgcctcaggcgtggtcaagctgaccagccgctgccctgcgtggtgggggctcactgccctcacctaccactacgagacccagtgcctgcccacgcccgccgcctggttcgcacaccacctgccggtctggctgcacaagctcagcgtggtggccaccttcctaattgagatcgctgtgccgcccctgttcttcgcccccattcgacgcctgcgcttggctgctttctactcgcaggtgctgctgcaggtcctgatatcatcaccggcaactacaacttcttcaacctgatgacgctggtgctaccactgcgctgtggacgagcac

SEQ ID NO: 13275 - DNA, 678 bp, Homo Sapiens
ccacgcgtccggcagaagttacaagaatattgcggagaggttggaaagcaggatttaacctctagttctcttgttctcagagaacagcaggttgatagtagattatgtctctaggtagagacagatacatgagaagagcctccaaaactggaagcccatcataaggcatgagaatgtttaactataaagccttttattagttctttgatagctaagatggttgttggagaaagtgcttaagccactgtttatgttgctgcctcctctctcaaaaccagccaagatctgttcacacacctctgtggctgtctttccctgaaacatggtaactcaagactgcctgcctaggtttcttagattaattattcacataaattttgtttaatattggttgaacaagaaatctgactttaaaagattattaaggagaatattccttaactatactggcttgatttgaaacaggctcttattgccatttaaactgccagaaatctttgccaaggtcctggttaaaaaaattggaaacggttttcttagccccagctttaaaagctagagatctcagagaaatagctggcttaacaatgacagaacagcctaaaatttgtgcctacaccatgttctgagagtcgttcacatcaaattcttatcttttccaagccagtaagttggctt

SEQ ID NO: 13276 - DNA, 640 bp, Homo Sapiens
atcccccaagcagcttcattacagagtgatattgggaaagtgagatcctctcaccattttgccaagatactctaaaatgacatccaagtttaccagtagaaagacacaggatgcacagaatgggcatgaccttcagctcacgagcacacctggagaaattcagaaccaggttctgaatcatcacgattgccttttgcatgaaaacatcggctggtgatgtgacttctcttcaggccatgagcctaacaccctgccggttttcatgcccgctgcagtaatggacgtttgtgtgaagaaatgaactgtggagtacaaaatgctttgagtctttccgattgctcattaattcacttttttgttacttctttccaaaatggaagtgctgaagccatggtctttctgcccctccaagctgatgaagggaagcctttgccaatggcccatggaagacacttggtttgagaaaccctgcccacttccaaagaccaaagagattaggaaaagcctggcagtattctccaactccaaacaagctctagagtgctccaggaaaagttatattcagtatatgaataagtgttattctccattattaatgtgttctgaaaatatattatgaataaatacatcaccacaccca

SEQ ID NO: 13277 - DNA, 1248 bp, Homo Sapiens
  misc_feature (85)..(197): n is a, c, g, or t
ccacgcgtccggtggcgcgtgcctgtagtctcagcctcctgcacagctgggattacaggcatgcgctgccaaaatgcccagtaannnnnnnnnnnnnnnnnnnnnnnnnnnnnnnnnnnnnnnnnnnnnnnnnnnnnnnnnnnnnnnnnnnnnnnnnnnnnnnnnnnnnnnnnnnnnnnnnnnnnnnnnnnnnnnnntgaaccaccacgcccagcctgttatttgtaaatgttgaatacatgttacattttcatcctaatgggctaaatttgcaccatttgccattcagaacaattctgtttctgaggtactctgttggtgctttagggccaactgggatctatttcagagaggaatggaataattgactgtaaatgtgatgaggaagaaataaacacttttaaaaaaaatgacacctaccatttattgaactcccatctacaaggcacttggctaagtacttcagaaaccactcacacttattaccctcagagtaggtatgttgaggcaacgagatcttagactcttgctcctatttaccccaactacactgttctgcttcccccagattattggtgtcagtgatggagacatttattaatcctgttagtttctgggagctagaaattgtgatttcttcttagtaatacaatcttgaataattttcaagctgatacccgtttagaagtatcagaagagaatttgtacatgaagcctgcacatacgtggggtgtaactcatgttcaattaggctaaaagttattgttgcgtgcctcttttcagaattttaggtacttgtgcttaaatttgattcagaactgttttggaaaagccttgagtatgtttgaaataccttccctcttgaaagtaatctcaagtttttaataagggttaatcatgttaaaaaaacaaaactgtctattcaaccagacattggcatttcttgaccttttttcctgtcttacctggatcttgcaataaaggatgcctggtttaattttcttgaaaatcacattagggaaggctttgaatgaaattgatctggaacaataagtgatgatttggaaaaacaattgctatacttctatgtaacctgctgcagctctccccatgtctccacctctagaggtggggttcagggatttgcataactaaaaaatttatgaaagtgttgtcctacctttctcaggaacaccatttgtgaattattttcccaaatatcgagggaggtgatcttctgggatcctt

SEQ ID NO: 13278 - DNA, 889 bp, Homo Sapiens
actgttatttccatttcttccccttctttcctatcacccgtttcagttaccattgctgctgcataaaaaattttttaatttaaaaaactggtgaaaatgataaccattttattatactcatacattctgtgggtcaggaattcagaaagggtgcatctgacactttgtgacactctgtctctgctccacagtgtctggggtctcagccgggaagggtcaaaggctgagagtgattcatgggataggacttgacacatccattggtttgttcacccatgtcttggtggttgacactgattatcaacaaggatatctaatggagcaactgtcagccaaaccttggtatgtagctgcttgggcatcctcccagcatggaggctgagttacaagagtataaacatcacaagaaaaccaagcagaagctaaatcacctttaatgacttaagaagtcatgtagcattacctctatggcagtcacaagcttccccaggttgaagaagagggaatgtgggctccacctctcagtgagaagagtgtcagagctagatctatattataagaaataacgttgcccattgatggaaaatacaatctgccatattgtcttttccttttttaataccctgcctctttttctgactccaggaaatcacttttggttccattcatcatttcctttcttccactccatttcttcgttgtagaatatattcttatttccatagatatattgttattctttgaaattcagcactctccctaccacaaagtactttcagaagtaaatgaatatttcatgaaaacacctagcaaaatatctgatgtataagaaggattcaatatatatattttattgaggtataattgacctcaataaaaggtcaattgt

SEQ ID NO: 13279 - DNA, 1015 bp, Homo Sapiens
actgctgcggaaggccgtgcaggcccaccgaggctacaccgaccggcccatccgcggggaggcctttgatcgacacctgctgggcctgaagctgcaggccatcgaggacctggtgagcatgcccgacatcttcatggacacctcctacgccattcgccatgcacttccacactctccaccagccaggcaccctgccaagacagactgtgtcatgttcttcgggcccgtggtccccgacggctacaggtgtctgctataaccccatggaggcccacatcaacttctcacatgtcggccatacaacagctgcagcaggagacacaacgccgcccagcctggcgcattacactggagaaggcagctcactggacatgcagtgccctgctgcagagccacccccagggccaagctctgagcccctaggactcaggcctgccaatgccacagccaagcccaccctaggatgggccacccaccagggctcagctccttggttccctcttccttgttccctcttccctggtccccccaaatctactgagccacggaccgcatcctccagggggcctgcaggccccagccaagtgccttccgtgggtcatcccagcacctgccagggcccgacctggggctgagtgcagaggctgagcaggacgttaggcccgggcccctggcacgtcctccaccggtgcctcctctggggaagggaaccagccctccagagcaggagactggcaagagctctttgtctcaccagctcagccccggccactccctgccaactccatgaccaggccaccatctgtaccctgcttcccaaactcccaggacctggagacaggattgtctggggccgaggggccagggtgtgaggtttcacctccgttgcggctgtgctcctgtggataacattgctagcgagccgcctctggttccactcagcttggttcctgcccccgccctgctgtatgatattaatgtggaaggtcatcaataaaggggaattgtgttggtg

SEQ ID NO: 13280 - DNA, 941 bp, Homo Sapiens
ttacaggcaatttaacgcacaatttaatgaccagttcaatgagctggtttatttgcttgtaaaattattttatctaatgtaaaaatacttggtaaagaaaagttcttaatggggctggaagacaaaaagtctgcatttaaaaaaggttaacaaaatcaataatatatgggtaagcataggcacagaagaataaaaaatttaaaaatgttaaaatcaataataaagccactaataaccacaaaaggaaaactatggttctttttactttgtcaaagttctgcatctgttcccggttggtcagccaggattccatgtcctgcgcagtctgaatgacaaatgcttcgtaatctgcaaacatctgtgtaaaacggttagcaaagacctctcggagctgtacattgagctggtagtcccttagttctgcctcttcacaatgcagttttaaatccttgtctttttcacccagagaagcagagaggtccattttttccacagccacaccagtacgcttggccagagcctgcaagcgggctatggtttcattgcccttcagtaactcatacatgctgatgttattagtacagacattgccgttctttttgtcattgaccaagtctttcagaaccatattcttcagtttgctggtactctcactgcaatgtaggctgccctcaggagggatcccaaattgaacaagaacctcagagagttcttggataaaatccactttattggggaactgtggaaattcttcaggcaactcaataaaatggttgtcaatgtccacaaaacacaaattagcctcttgaggaagttctagtttagaacggtcagttccttcttttgactgaaggcccatcagataagggacaggagcatcaagaaaatgtagcagagaagcaggtagaatgggcacataaacatgttgcccggacgcgtgg

SEQ ID NO: 13281 - DNA, 1275 bp, Homo Sapiens
cgataggaatatagaacagtcgtacaaaaagaggctggtacggtccggaattccgggatatgcgaccacgcgtcgggaaaggtgtagttgtttaacaagcattgaagataatcaggaaagattttttcttaatgtttctctcgagcgtagtactataacaaaaacttaatgccgtaagaaacattttatatgctccttggatatgcaatttaatctagattatctatttttctcccatgataactaatctgtttttagtatcagcagcattggcaagtttattttttggatataaactgtggttcatctgttcactgttttctagaaaaaaatcattgccataagaaaaagtataaattagcaagaaaggagagtgacttgatttgctttggaaacagaaatgcttaattaattattctgtatttggccttattcgggcattaggaaatctagagatctaaagggttgaatgacaatagtgcccccgtttttagcagaccagccttaactctgggttgaatcctaaggagatgccacagtgagacttaaggaaatgtttggttggcagatgagcaccaatgactgcagcgtggagtgacgcactgatggtctgtttattctctaattccaatatgtctttgcttccagaagccaagaaaagtttcttctctcccctccttcccacccttttttcaaaggcaccacaagtatagacagttgcactacatcaaatctttttttgacacttgtagaaaccagtacacttttagattagacagtatcttcttttaatattttgatttgttttcctttagtttgaaaagttgtataatacttaactgactgtagcaaagttttatatgtggtagcatacctttaatttatcctattacaaaactgttctgaattttcttttggtttttaaaaaacaaaacttgttgcttagaagccatgaattattttattttacttcaactgtcgaaacttccttgttttaaaaaatgatcatttgggttcactcaggaaatgcatgtcaggaaacttgtattataagtttattagttgtgatgtatcagtaactgctgttacccctttttcaaagaaatgtaattgattttgaagttttctagattgtcacatgctttgtgactaatgcaagaaagcaagtcctgtgttgtatttgttctagtcatttttattcaggctatatattgtagcttaatttttatttgcaattaatttatttaaactaagtaaatacttttcaaaatacat

SEQ ID NO: 13282 - DNA, 529 bp, Homo Sapiens
ttccacagaaggttagaccctgaaagagatggctcagcaccacctatggatcttgctcctttgcctgcaaacctggccggaagcagctggaaaagactcagaaatcttcacagtgaaatgggatcctgggagagtcagtcactttccctgtaaatatccaagaaccacggcaagttaaaatcattgcttggacttctaaaacatctgttgcttatgtaacaccaggagactcagaaacagcacccgtagttactgtgacccacagaaattattatgaacggatacatgccttaggtccgaactacaatctggtcattagcgatctgaggatggaagacgcaggagactacaaagcagacataaatacacaggctgatccctacaccaccaccaagcgctacaacctgcaaatctatcgtcggcttgggaaaccaaaaattacacagagtttaatggcatctgtgaacagcacctgtaatgtcacactgacatgctctgtagagaaagaagaaaagaatgtgacatacaa

SEQ ID NO: 13283 - DNA, 1145 bp, Homo Sapiens
  misc_feature (62)..(86): n is a, c, g, or t
gggggggtgcgtgagaacgccggcggtgaccgcagccacagcggtgaccgagtgagaggaannnnnnnnnnnnnnnnnnnnnnnnntgaagtcactgctgctctgggttcgggttggcgactgaaggcggtaccggcctcccggaacagcccgggggagggcttaggtgcagaagggcaggctggccgcggccggtttggtctggggaccacgggctggagcaggtggaaatttaaaattgtttacagtcaacactgtttccagccatgggtttgtctccatctgctcctgctgttgcagttcaggcctcaaatgcttcagcgtccccaccttcaggatgcccgatgcatgaagggaaaatgaaaggctgtccagtgaatacagagccatctggcccaacctgtgagaagaaaacatactctgtgcctgcccaccaggaacgcgcctatgagtacgtggagtgtcccattaggggcactgcggctgagaataaggagaacctagatccttcaaatctgatgccaccaccaaatcaaacaccagctccagatcagccatttgcattgtctactgtcagagaagagtcatccattccgagagcagattcagagaaaaagtgggtttacccttctgagcagatgttctggaatgcaatgttaaagaaagggtggaagtggaaggatgaggatatcagtcagaaggatatgtataatatcattagaattcacaatcagaataacgagcaggcttggaaggagattttgaagtgggaagcccttcatgctgcagagtgtccttgtggtccatcattgatccggtttggagggaaagcaaaagagtattcaccaagggcacgaattcgttcctggatggggtatgagttgccttttgataggcacgattggatcataaaccgttgcgggacagaagttagatatgtgattgattattatgatggtggtgaagtcaacaaggactaccagttcaccatcctggacgtccgtcctgccttagattcactttcggcagtatgggacagaatgaaagtcgcttggtggcgttggacctcgtaaagcactgtttcagatggaaaaatataaactatttttttctgagcgatacattaaactattttccccagataa

SEQ ID NO: 13284 - DNA, 725 bp, Homo Sapiens
  misc_feature (560)..(568): n is a, c, g, or t
ggcttggacatggaagataagactttagcttttgaacgtggatatgagttcctgggggttgcttttagaggacttccaaaggtctgcttatacccagcagtttctgctgtatatggcaacacagaagtgactttggtttaccttggaaaacctttggacggatgacagtggctttcttgtgatgacagacagaatggaggagagatctgcttatgggaagtagaaccatgaagtgactgtcacacatgcatgtccaagaaacatcctgaaaacacatgaagtcgtaaactggagaagcagctctacagcagagattatcttcgtgtttcctctttctactgggccagaaaaatcctcagggttgcagttggttgagtgggcagttgacatatgcatgttgcacccgatgttgtctctaagttagcaatgtgttatttccagctttaaaggtgagattgtagagatgctgtcaaagggataaggaaatagcaagatttttaagtagtgtgtttgtgaagactgatccccattttacaactgcctgttctttctccagtccnnnnnnnnncagccagcttgactattagaaaagtatgaaactggttggggtttatttaatatttttaatatattgagaagcatggtctgcctgggactgcacttctctaaaagtgagaaataaacccgcgcagctattttaaaagttgtaaaactaatgtgtgtaa

SEQ ID NO: 13285 - DNA, 557 bp, Homo Sapiens
  misc_feature (325)..(437): n is a, c, g, or t
tgggcgtgcgcggcggccgcagctgccgcaaaccaggtgaagctttgttctaagaatatttgtttcatctagtttatgagtccaaatgatatagactgtaaatgtcacagcagtggtgaaagactgctcggtcatgagcaccgacagtaactcactggcacgtgaatttctgaccgatgtcaaccggctttgcaatgcagtggtccagagggtggaggccagggaggaagaagaggaggagacgcacatggcaacccttggacagtaccttgtccatggtcgaggatttctattacttaccaagctaaattctataattgatcannnnnnnnnnnnnnnnnnnnnnnnnnnnnnnnnnnnnnnnnnnnnnnnnnnnnnnnnnnnnnnnnnnnnnnnnnnnnnnnnnnnnnnnnnnnnnnnnnnnnnnnnnnnnnnnnccaagtttatgtatttttattctttttcatgaatgtgatttgttaaatgagtgattaaatataatttttatatatttgtatgacttttctgtaaataaaatttaaaatcagaaaaaagcc

SEQ ID NO: 13286 - DNA, 504 bp, Homo Sapiens
gaaagggttttttcttcgtccttttggtttaaaaagtttcacgtcttggtgccttttgtgtgatgcgccttgctgatggcttgacatgtgcaattgtgagggacatgctcacctctagccttaaggggggcagggagtgatgatttgggggaggctttgggagcaaaataaggaagagggctgagctgagcttcggttctccagaatgtaagaaaacaaaatctaaaacaaaatctgaactctcaaaagtctatttttttaactgaaaatgtaaatttataaatatattcaggagttggaatgttgtagttacctactgagtaggcggcgatttttgtatgttatgaacatgcagttcattattttgtggttctattttactttgtacttgtgtttgcttaaacaaagtgactgtttggcttataaacacattgaatgcgctttattgcccatgggatatgtggtgtatatccttccaaaaaattaaaacgaaaataaagtaaa

SEQ ID NO: 13287 - DNA, 1084 bp, Homo Sapiens
  misc_feature (243)..(432): n is a, c, g, or t
  misc_feature (596)..(769): n is a, c, g, or t
  misc_feature (907)..(947): n is a, c, g, or t
  misc_feature (962)..(1022): n is a, c, g, or t
ctggtaccggtccggaattcccgggatcctgtggtgcctcagtaacaggggaggatgaaattatcattcagggagattttacagatgacataattgatgtcattcaggaaaaatggccagaggtagatgatgacagcatcgaagatcttggagaagtaaagaagtgaatttgaaaatttgtctgtatttaatggcctgaactgagagttgatatggccaaagggagagaggccttttaaaaannnnnnnnnnnnnnnnnnnnnnnnnnnnnnnnnnnnnnnnnnnnnnnnnnnnnnnnnnnnnnnnnnnnnnnnnnnnnnnnnnnnnnnnnnnnnnnnnnnnnnnnnnnnnnnnnnnnnnnnnnnnnnnnnnnnnnnnnnnnnnnnnnnnnnnnnnnnnnnnnnnnnnnnnnnnnnnnnnnnnnnnnnnnnntctacagtaaaactgtagacgggcctcgtccttggcattttcactgttctgtacaaggctgcttgtttttttattgccaaagtcaaataaacgggagactgtcatgctcatgcatgaatagaatttagtcaaataaaaaattttggtcatttggtactgacttnnnnnnnnnnnnnnnnnnnnnnnnnnnnnnnnnnnnnnnnnnnnnnnnnnnnnnnnnnnnnnnnnnnnnnnnnnnnnnnnnnnnnnnnnnnnnnnnnnnnnnnnnnnnnnnnnnnnnnnnnnnnnnnnnnnnnnnnnnnnnnnnnnnnnnnnnnnnnnnnnnnnnnnnnnnnnncaggtaaattttggaattttaagtaaagatggggctttccctatggttgggccagcctgggcctccaaactccggaacctccggaattggccccacctcaaccctccccaaaggggcgggtaattaccagaaggggannnnnnnnnnnnnnnnnnnnnnnnnnnnnnnnnnnnnnnnntttttaacctttaannnnnnnnnnnnnnnnnnnnnnnnnnnnnnnnnnnnnnnnnnnnnnnnnnnnnnnnnnnnnttttactcggacctaaaagctgaagggagtttttttaaaaaagaattttgaatttggggttt

SEQ ID NO: 13288 - DNA, 735 bp, Homo Sapiens
ccacgcgtccgggtctctgcagccatctgctttcatcagggctgcagcccccaggcagcagtactgggagcccctctcatctccgagaataaactctgaagccagcgaccctgcggacctgaatcatcagggagcctgtcagaggaggggcagtgactctgcgggacaagcaagcaggctatataagtttcagaaggctgggctccactcagatcttttccagcagctgctgcctgccagagaggcgccttcagagacccagcgcttacacaatccccaccatgtcccaggctggtgctcaggaagcccctatcaagaagaagcgcccccctgtgaaggaggaggacctgaagggggcccgaggaaacctgaccaagaaccaggaaatcaagtccaagacctaccaggtcatgcgagagtgtgagcaagctggctcggccgccccgtcggtgttcagccgcacccgcacaggtaccgagactgtctttgagaagcccaaagccggacccaccaagagtgtcttcggctgagaagtgtgcgccactccccttgctgcccgaatgctcggaaacaggagccttacccaggaactcttttttatgccagaacgcttcctctcccctgctgtctctggggctgccaccctccctcacagtccaggcccttcagccaagggctctgcaccagcaccttggaagcaccaataaagaggatgcccacgtggccccagcaatc

SEQ ID NO: 13289 - DNA, 617 bp, Homo Sapiens
ccacgcgtccgagcacttcactgtggttctgtgtctttaaccacctcataataagaactgttattgaggactgggctacagaatgtgcttagactacatctatggcttccatagattttagtaaaatttaaacagataatttgtgtttactgctgatgttactttaatattgaattagtagttcatcctgagagttatatttcacagaggaaaataaccaacgagctgaaaacaacaataataaagctctggtgagtctgactcatactcgcagaaagtttttggaatacatacacatttggtgcatataagagttgggtttccttttcccactttctgagatgtactaacctctgccagacccttaaatgattttgttatgttttgcatttttgaggccaaccttattttgtaactgaaaaaagtccagttttgcatacacagaaatttggtcattttagaagtctcacaacctgaataatttgataataattgaatatgctattaacagctttttaagaaaaggttctattagtcagttttttccttgtctgtcatattatgttggttaatgtctcttatggccaatcttagtaaacagacctaacactcactgc

SEQ ID NO: 13290 - DNA, 750 bp, Homo Sapiens
ccacgcgtccgcccacgcgtccggcaggaggtttcggctaagttggaggtactggccacgactgcatgcccgcgcccgccaggtgatacctccgccggtgacccaggggctctgcgacacaaggagtctgcatgtctaagtgctagacatgctcagctttgtggatacgcggactttgttgctgcttgcagtaaccttatgcctagcaacatgccaatctttacaagaggaaactgtaagaaagggcccagccggagatagaggaccacgtggagaaaggggtccaccaggccccccaggcagagatggtgaagatggtcccacaggccctcctggtccacctggtcctcctggcccccctggtctcggtgggaactttgctgctcagtatgatggaaaaggagttggacttggccctggaccaatgggcttaatgggacctagaggcccacctggtgcagctggagccccaggccctcaaggtttccaaggacctgctggtgagcctggtgaacctggtcaaactggtcctgcaggtgctcgtggtccagctggccctcctggcaaggctggtgaagatggtcaccctggaaaacccggacgacctggtgagagaggagttgttggaccacagggtgctcgtggtttccctggaactcctggacttcctggcttcaaaggcattaggggccacaatggtctggatggatcgattcacccatgctgcgagattgattcacccatgctgcg

SEQ ID NO: 13291 - DNA, 182 bp, Homo Sapiens
gaaaggggtttgggtcagtctccacctgggtatggtattatgttttataatcctgcatcacttctatcctatccagtcatatttaatgtagaaaattagtttccagtgaaagtaaaatgtagggcttttatgaaatttgtgggcaaaatcccctcttccattgaggatatttgatgtaaagg

SEQ ID NO: 13292 - DNA, 909 bp, Homo Sapiens
gggatatcgtcgacccacgcgtcgggaagactgtggctacaacattccacagacagattgacggtcaagccctcatgaccatagcctatggtcatggatgccatctgcgccctcttcatgcgtgccactctgcctcatggtgtgtcagtggcgctgcctccgctgcctgcgccagcagatgatgactttgctgatgacatctcccgtgctgaagtgaggaggcccatgggcagaagatagagattcccctggaccaacctccgtggttcactttggtcacaagtaggagacacagatggcacctgtggccagagcacctcaggaccctccccacccaccaaatgcctctgccttgatggagaaggaaaaggctggcaaggtgggttccaggactgtacctgtaggaaacagaaaagagaagaaagaagcactctgctggcgggaatactcttggtcacctcaaatttaagtcgggaaattctgctgcttgaaacttcagccctgaacgctttgtccaccattcctttaaattctccaacccaaagtattcttcttttcttagtttcagaagtactggccatcacacgcaggttaccttggcgtgtgtccctgtggtacccaggcagagaagagaccaagctgtctccgtgcgtggccaagcccagaaggaggacgactgcaccaggtggcgtatacgcttacgagaccgggactgtataaacaagccacccatgcggcaaacgatggcccccgactgcaccacacacgcagagcggcactaatccaaatgggggcgcggaacaaagaaccagcaggcccaacccgcactcggggccccgaaggcaccaaccacccacgatccagcttccgccgaccccccaagccgcgaacgcacacaacaacggcaag

SEQ ID NO: 13293 - DNA, 1033 bp, Homo Sapiens
  misc_feature (744)..(744): n is a, c, g, or t
  misc_feature (780)..(780): n is a, c, g, or t
ggtactgttgcccccactcaggctagggtaggctgtctcttcagggtccaggggggtgggcagtggtgggggaaagtgcaggttggtgaggtcaggtagggagccccccgtgttcatggcaggtgggaggacaggcacattggcaggctggtcaggagatggaaagatgttaattccagggacttcacaggaccgaggtcgggaagaggatgaggatagcttcttagcatcccatggcttcagcaaatgcttgtcatctagcaagttctcctcaatagcaggtactttggggtccatttcaccatccagaatacccccacgtcggctgggcaggatgctgggaggtgtggggcctgggtaggtatcctggggactggggttcatcacacttgtatgaagggcagagtcagagcttgtcctgttaagtgcagatggtagtcgaaacaactgccccttctctgcagggaaattgccccaggccatcgtccttcgccagctagactctgggggaggagataagtaggcaggactatagggagagctgtcaatgtggcgggtgtatcggcgaagtggggacaccattcttcgaggatctcgctgcacccgttccaccaagcccattggtgcacgagtgctcacgaagatgaatcccaaaggttgagtggaggggggctcttggaactcaggccaaggccaagagccaaatctgggttaacaattgggcaagagacccacccataatgnagagctcacttgtgtatgcccacgtcgcagtttttngggcctgtaaccagggtggagcacgatgtccatcatcacctcctcgaaggccgccgtctcctcggcctgacgctgcttctcaagcagcaatcttctcactaaatttgcgcaggattggaagcacgaggccgtggccgaaccaggcccgttcgcccccgacgtcgccatattccttccccgtccctacctgccaccctcccagtaccagccgcggcctccgccacggcctcggcccggctcctccagccgtagc

SEQ ID NO: 13294 - DNA, 536 bp, Homo Sapiens
ccacgcgtccgtccatgccctgccacactggcagcatcaacagcacagacagcgagcgctggaaggccatcaatgcctgagggcagctgccagggcctgtggaggacaggccagagaggaggccagcaggcccagagtccccaggggaggaggaccaggtcaagggacgttctgtgggcagtagccctgtgtggccctgttcccaccatgagtctggaggccccacctccctggggctcccaatcccctttgccatctctgctctcactggggaccctcctccccttcccacctgctctcatactgctcagtgacatggcccaggctttccttccagggccatgcttggcaaggttggctgagggcaccctccttctctgcacccttggcacgagggcagggctggctctcccaatgcctccatcccatccccatggtgctttggcctcctcaaagcatccaccatggtggatggactgaagtgtgtatattttcttgatctattttttaataaaaaggaaaaggagccaccaaaa

SEQ ID NO: 13295 - DNA, 784 bp, Homo Sapiens
  misc_feature (448)..(457): n is a, c, g, or t
  misc_feature (727)..(727): n is a, c, g, or t
ggggctctttctgctttccctctccttggccctagatttgtaatccatgaaaaagcacaaggtcctggctccttgcggtcacattctggttctctgtgttttgtggactctgctctcactgttcacgccagcactagcagtaccagatggttctgtggagtcctggggaatggagagagcacagtctgactcccggccaagtagccaggagttgacttgcccatggtccgctggcgttcccaccacttcctacaggatgggatctaagagactcaagagctgggcttctttcagcactctgtactgtcccaaatagcaaacaaatcactttgtagccagatttctgaatggaaatgagaaattgaattctccatggacttttaggtttatgggggagttttagctgcgtttcttggttttatttcagccaaacatgtctgcttttgannnnnnnnnnaaagtataagtggtctatatatatgttcaccttttaaatgtaaatgtttaaaaagtaagcatttatgtgtttccataactgacatctgatgcagacctcattctctccccctcttctaccctcctcttttcccccttttcatactcttgtattggttctaataaatggttggcttttgcaacgcaccgccttataaaaacgaaccataaaaccttggccggcccggccctcgggccctccgaagaaggctttttttaaaaacccatttcntttttgggctccccccgcgggcccccaattcaggggtaaaacctggaaaaccacggc

SEQ ID NO: 13296 - DNA, 572 bp, Homo Sapiens
gagctcggtacccatgcgcgacgcttccatcaatttcctcctcctcttcttcactgctgtcttctcgttccatgcgccaagcatctccttctacttctgagtcactctctcctaccacttcaggttccactatttttcgatgtcgagccaatctctcttccacatcttcactaatacggttctgtaaacgccgtagccgggggtcactggatgaatcctcctcctgttcctcaggctctgcttcttgttctttggctttcttaatgaactgaaattcttcatcctcctcatctgaggactccataggggcatagtctggcctttttccggacacataacgctttaccttcactttttccattgaaatctcacctttctcattgcgaactgggacggccccagccgtagactgaatgggcggttgcttcatgagagcgcttgggaccgacatgttgatggcagcgacggtgattcccgaaacttgactaattccaaacagtgaacaccagcaacgtcaacgaagagaagaaattccttccacctgagtccgcgaacacagctgcgcgactctc

SEQ ID NO: 13297 - DNA, 1431 bp, Homo Sapiens
  misc_feature (1100)..(1137): n is a, c, g, or t
  misc_feature (1402)..(1402): n is a, c, g, or t
gggggctaaatgcgactccatctcccccgacccaagcgcgtaatggccgctggctatcttgggggagccagctgttggactatgccccactgccaggaaacaggcgccggaaggttctctgacaagatctcgctttcctagggcggtgaaggcgttcaaaggtcgggaaggggcgctgggagaagcggggcagcgctgagccatgctcgcgaactgtgggtctgtctgtgaagagacccagtttcgtgggaccacggtggcgcctgcgctgggagagttcttcactaccacaaccaaggagggatatgataggcggccagtggatataactcctttagaacaaaggaaattaacttttgatacccatgcattggttcaggacttggaaactcatggatttgacaaaacacaagcagaaacaattgtatcagcgttaactgctttatcaaatgtcagcctggatactatctataaagagatggtcactcaagctcaacaggaaataacagtacaacagctaatggctcatttggatgctatcaggaaagacatggtcatcctagagaaaagtgaatttgcaaatctgagagcagagaatgagaaaatgaaaattgaattagaccaagttaagcaacaactaatgcatgaaaccagtcgaatcagagcagataataaactggatatcaacttagaaaggagcagagtaacagatatgtttacagatcaagaaaagcaacttatggaaacaactacagaatttacaaaaaaggatactcaaaccaaaagtattacttcagagaccagtaataaaattgacgctgaaattgcttccttaaaaacactgatggaatctaacaaacttgagacaattcgttatcttgcagcttcagtgtttacttgcctggcaatagcattgggattttatagattctggaagtagtattaatgctcatcctgctgtggctgttggcttcttagaacaccaaaccgggagagatttactttgaacattgtcagttgcagcaaaaatttactacacaagattattcgaagtgtatacggactaaaagaggaagtgttttagaatgagaagagatacnnnnnnnnnnnnnnnnnnnnnnnnnnnnnnnnnnnnnnctttattatattgaaaagctgtcactcagacctggtttgagatagaagagcattttgtccttttgatagttaatagaaattgaaccagagttttcttatgtttgcttgaacagttgtgtaaatcatacaggattttgtgggtattggttgaatatttgtaaaccattccctagcctacatatttattactgaattaactttcctgataaccattgcataattacatttttctataaaatgaaagattattaccaccaaacccacnacccacaaaaccaaccaaaacttgtcggc

SEQ ID NO: 13298 - DNA, 966 bp, Homo Sapiens
ctccagggcccatggtcagtattgcacctgtgttatgaacccccagatgctgtgcagggcaggggcgggggctgctgttttattggggaggggagcatcctaaaaatggggtccaggcagacccctccagacctcacactgccgaggaggcctttcccaaagggcgtcctcccgggatgcagacggcaggtgtgtgggaagcgccgtttaaatacacagcacgacgtatccttgtaccgacttctcccggttcttgtttgaaaatactgtagttcaggctcttgatctagatggcagataggaactttcttgtcacaaaaatactggaggaaaatgttgtaaaaatagacttttggacacacagctgttggggctgcactgagctgcaatttttaacatggatttataacttaatgtttctgtttataaaatactaatgatttgcaatgtatcctactggccaattaaaacagatgttttattccgagatggtacagtggacaaaaaaaatagacatgtcgcgtcgccctcggccctccaaaacgcttttctaaaacaattccttttggcgcccgcgtccccattaggccaacggcacattggcccataagctgtgttccctaaagaaaaatcctggcccatggaattaagcggtttgggatctccccccttataaacaaaccgccccgccggccaaacccgagcgctccctgaacctaatccccaaaaggggagcttcctggagggccattcaacgtggaatctatatccaccgggacaccccaaacccgcaggtttcgcaaacataagatttacccaccgccgtgcctttggccaccttcattccgcgaggaaagtgtttggtccaatttcccttacaggccctctcttggacctgaacctggtgaaagcccactctcaaaataagcgggacttgctaggcaacacaccgtcaaaatccttgac

SEQ ID NO: 13299 - DNA, 728 bp, Homo Sapiens
  misc_feature (223)..(223): n is a, c, g, or t
gggagctcgtcactcttttgacaaaaagggggtgattgtggttgaagtggaggacagagagaagaaggctgtgaacctagagcgggccctggaagatgccaatcgaagcagaagctaaggatgtcaagcaaactgaagatgaagaagaaaggaacgtttttaaatttatttgtgatgcctcttcactgcaccaagtgaggaagaagctggactccctgggccntgtgttctgtgtcctgtgcactagagttcatccccaactcaaaggtgcagctggctgagcccgacctggaacaggccgcacatctcattcaggctctcagcaaccacgaggatgtgattcacgtctatgataacattgaataaccaggctacatgtgcccccgggttccttcctagaaatgtggcagcccattccagcacacaggcttctgcagcaatctctgagggtaaagccggtgggaggctcagcaggccaggaggcccaaggacaggacttgcgaccttgaagccaaaggaatctcacttgtggggcctccttgtcagctctgctgctgtctcagagccatctggatgagtgtcccgacaccctctcggatgcagggcaggaccacccagctggtcagactctgatgttgggtagctggcctctgtggggattgtaagtgccctgaggcgctctgtactagaaactgctcttaataataacggtgattattggttgctgc

SEQ ID NO: 13300 - DNA, 681 bp, Homo Sapiens
  misc_feature (597)..(628): n is a, c, g, or t
ccacgcgtccgtatcaccaactccacattggttaccactaatgtcacctggggcattcagccagcgcccatgcctgtgcctgtgtgggtgatcattttagcagttctagcaggattgttgctactggctgttttggtatttgtaatgtacaggatgggcttttttaaacgggtccggccacctcaagaagaacaagaaagggagcagcttcaacctcatgaaaatggtgaaggaaactcagaaacttaactgcagtttttaagttatgctacatcttgacccactagaattagcaactttattatagatttaaactttcttcatgaggagtaaaaatccaaggctttactgctgatagtgctaattggcattaaccacaaaatgagaattatatttgtcaaccttctccttataaataagttcagacatacatttaataacatagggtgacttgtgtttttaggtatttaaataataaaatttcaagggatagtttttattcaatgtatataagacaggtagtgcctgatttactactttatataaaatagtacctccttcagttactgtttctgatttaatgtacggaactttatnnnnnnnnnnnnnnnnnnnnnnnnnnnnnnnnttaaagcagtccaaatttggaccttagcaatcatgtcttttgtataggtactt

SEQ ID NO: 13301 - DNA, 2692 bp, Homo Sapiens
  misc_feature (1459)..(1539): n is a, c, g, or t
  misc_feature (2563)..(2629): n is a, c, g, or t
ccacgcgtccgcagagagagccccagactgagggaagcatggatggatggagaaggatgcctcgctggggactgctgctgctgctctggggctcctgtacctttggtctcccgacagacaccaccacctttaaacggatcttcctcaagagaatgccctcaatccgagaaagcctgaaggaacgaggtgtggacatggccaggcttggtcccgagtggagccaacccatgaagaggctgacacttggcaacaccacctcctccgtgatcctcaccaactacatggacacccagtactatggcgagattggcatcggcaccccaccccagaccttcaaagtcgtctttgacactggttcgtccaatgtttgggtgccctcctccaagtgcagccgtctctacactgcctgtgtgtatcacaagctcttcgatgcttcggattcctccagctacaagcacaatggaacagaactcaccctccgctattcaacagggacagtcagtggctttctcagccaggacatcatcaccgtgggtggaatcacggtgacacagatgtttggagaggtcacggagatgcccgccttacccttcatgctggccgagtttgatggggttgtgggcatgggcttcattgaacaggccattggcagggtcacccctatcttcgacaacatcatctcccaaggggtgctaaaagaggacgtcttctctttctactacaacagagattccgagaattcccaatcgctgggaggacagattgtgctgggaggcagcgacccccagcattacgaagggaatttccactatatcaacctcatcaagactggtgtctggcagattcaaatgaagggggtgtctgtggggtcatccaccttgctctgtgaagacggctgcctggcattggtagacaccggtgcatcctacatctcaggttctaccagctccatagagaagctcatggaggccttgggagccaagaagaggctgtttgattatgtcgtgaagtgtaacgagggccctacactccccgacatctctttccacctgggaggcaaagaatacacgctcaccagcgcggactatgtatttcaggaatcctacagtagtaaaaagctgtgcacactggccatccacgccatggatatcccgccacccactggacccacctgggccctgggggccaccttcatccgaaagttctacacagagtttgatcggcgtaacaaccgcattggcttcgccttggcccgctgaggccctctgccacccaggcaggccctgccttcagccctggcccagagctggaacactctctgagatgcccctctgcctgggcttatgccctcagatggagacattggatgtggagctcctgctggatgcgtgccctgacccctgcaccagcccttccctgctttgaggacaaagagaataaagacttcatgtcacagccnnnnnnnnnnnnnnnnnnnnnnnnnnnnnnnnnnnnnnnnnnnnnnnnnnnnnnnnnnnnnnnnnnnnnnnnnnnnnnnnngaaagacaaaaacaaaacaacaacaaggaggaggggcggcgcagacacaaagacacaacccaccggacgacgagggcagcaccaccaatacccacaccaccaaccagctacacgcgaagcggcgaggcggacacaaagaagaggggaaagtcacttcaaagcacacgcgcagcggagcggcgcacagcgcaacacgccgaggacagcgggaggggacagacaagacgcacagcacacggaggaggaccagatgagagcgggcagctgacccaacacagcaaggagggggagcagagaagcacgacggaggagggccgacaacagcggccgtagaagagagagcagaacgacgcgagcggggagggcccacccgacaacgggccgaggagggtgcatcggcggcgagacccacacccaccaggcccggttccactacggtgcgggcggggcgtagagcgccccgcacgggcccacgagagccaggcgagtgtagacagcgagggacgagagaccgtactacagcaggcgcgccgacgagcagacagacgaagcacgagcacagcacgaccgcgcaagagtacatgggctgacgagtagacaatcggagtgagcacgcggacggcgacgcagcgtcctccgggcgcgtggccaaagcgtggtcggcaggaggacacgaggagccggaggcggagcggaggcgcgggaggaccgcgagggcaagggagcggcgcgggcacgagaacagccgagggcgaaggcagcccaggacagtagcacgagagagcagcacatcagcacgaggagcaacaccggcagcgccgccgagcggcagcggaggcgcaggcaggggagcagccaggcccggcgcgagcgaggagcgaggagggcagcgcagcgagccgcagtaggacggacgccggggggcgccgagcagcacagagaagaacgcacgcgcgagaatacagggcgcgacgagagggaggggaggcaacggtgcgcggcgaagaggcgaccgctgaacccnnnnnnnnnnnnnnnnnnnnnnnnnnnnnnnnnnnnnnnnnnnnnnnnnnnnnnnnnnnnnnnnnnncggcggccgcagaggcgcacagaacagaggtggcgcgaccgcgcaacgcgcagagagacgaac

SEQ ID NO: 13302 - DNA, 828 bp, Homo Sapiens
ccacgcgtccggacggttgctgagcgggcctgggacagcgggtcgcggcacctccggcctgcgcgtgtctaatccgtctgtcgggtcccgaaagagctaagccgagcctgcgccggacgggtgggctggactgagagaattctctgagctggtgacaggtgccacaggcactggggatctcaccagaaaggaaccgacggagctaggggccagcgagatggcggacgaggccttagctgggctggatgagggagcccttcggaagctgctggaggtcacagcagatctggcagagcggcggcgcatccgctcagccatccgggaactgcagcggcaggagctggagcgcgaggaggaggccctggcatccaagcgtttccgtgccgagcggcaggacaacaaggagaactggctgcactctcagcagcgggaagctgagcagcgggctgccctggcacggctggcagggcagctggagtccatgaacgatgtggaggaattgactgcactgttgcgaagcgctggtgagtatgaggagcgcaagctgatccgagctgccatccgccgtgtacgggctcaggagattgaggctgccaccttggctgggaggttgtacagcgggcgtcccaacagtggctcaagagaggacagcaaggggctagcggcacacaggctggaacagtgtgaggtgccagagcgagaggaacaggaacagcaggcagaggtttcaaagccaacccccacccctgaaggcagcagccaggaagtgacgacagtgacactcgtgctgcgagccccacctgggagcacatccagctactctgcctc

SEQ ID NO: 13303 - DNA, 861 bp, Homo Sapiens
ggccaggtgcgggcgccgccatgggtaacctgttcggccgcaagaagcagagccgcgtcacggagcaggacaaggccatcctgcaactgaagcagcagcgggacaagctgaggcagtaccagaagaggatcgcccagcagctggagcgcgagcgcgccctggcccggcagctgctgcgggacggcaggaaggaacgggccaagctgctgctcaagaagaagcgataccaggagcagctcctggacaggacggagaaccagatcagcagcctggaggccatggttcagagtattgagttcacccagatcgaaatgaaagtgatggaggggctgcagtttggaaatgagtgtctgaacaagatgcaccaggtgatgtccattgaagaggtggagaggatcctggacgagacgcaggaggccgtggagtaccagcggcaaatagacgagctcctggcaggaagcttcactcaggaggatgaagacgccatcctggaggagctgagcgcaatcactcaggaacaaatagagctgccagaggttccctccgagccccttcctgagaagatcccagaaaacgtccctgtcaaggccaggcccaggcaggcggagcttggtggcagcttcgtaacgtggcctcgtcttgtgggacaacacgggcatgccccagggactgtggcccacagagagttaaagtcacggccagcccctgaccgcgttcccttggagcccagtgcgcacggtgctgagcaggagcttgcgccacgcaggcgcatttgcggaggactccagagcgtctcctggagaccttgagccttgacgcactcaggcgccactggcctgctctcaggcccggattaactca

SEQ ID NO: 13304 - DNA, 2236 bp, Homo Sapiens
ctggtctgatggcgtgctgccactgagcaccaactgctacagtttgcatccttgtcacttctacaccaggaactcaattttgcgggtactgttatcacagttaccacacaaaagagctctcccgatcccttccctgagtcaaaatgtggcacaggtttatccctggtccccatgcctggccctagctaaggggaggctgggaaagtcagtgtctagcattttcaggtactcttaagtggaggtagttattgcccccccatgaagtctcataaaatagggggttctctggagacaagaaggggtccagataccaggcacccagacccaataacaaatgtccagtattacccacaacaaagacaaatatcatcaacatagaacaataagagatattgataccctatgagcttgttacatctctgtcattttacacattgagatcaaaatccaaacaccaggaggccctctggtaaaagagtgctggctgcctacccaacattctcccctaatgtcttagtgtcagaacccctttgttattagggatagtcacgtacccagcaaataagccacatctcccagcctccattccaggtaggggtgggtggttagtgagatggaagcagaagtcattgggtggagcttttgggaaagctctttaaaagcgccctttgctcttctcccctttcctccattttcccttccctaaacacaaaataggcagctagagctccagtaaccatcttgtagcaaacctaacattggaagccatttgtcaaggttggcagggcagagatacagcctctgagtatctgatgacctgtcctgccagtcctggactccgaaacattatttttcttttatgtgctggaaaaaataaacctgcttctcgttgaagccattgttagtttgagtcgctcttcctagcagctgaaggtaattccttactaataccagctggcctcagtagtttcacaggtccttctcttctagcaatccaagatgtcatcatcctctggcgcataagaaaatcccaggaatgcacttgaggccccagagctgctggccacagtgtcaggggtacagcaaatggacttggacacagcttcctgggtgaactctgggtcaaaatgcttcaagtcagcaggtcctgtcacatttgggttgaagggtggagttagcctcttgtggtacaggtcatcccagtttatggggctgaagaatacatggttcttaatctcaagaaagtctgctttggagcccagccgctgcctctggtccttgtggagaaggctttgcaggaggtcacaggcggccactgtccggcctccggggatctgtagcggctggtgcagaatgttctcatacatctgggatacatcttggctgtagaagggcggcaggccatggagcatctcgtagaggactgcccccaagcaccaccagtccactgctcgatcataaggctctttccgaagcacttcaggtgccaagtactcaggggtaccacagaatgtggatgtggtgtcttcaggctctacaccttccttgcagaggccaaaatccgtcagcaccacgtgtccctggcagtccaagagaatgttctctggtttcagatccctgtaaatgatgttgagggagtgcaggtagccaatggcgctggccacctcagcagcgtagaacctggcccggggctccaggaaccggcgctcccgctgcaggtggaagaagagctctcccccgttgacatagtcgagcacgaagtagagcttctcaggtgtctggaaggagtagcgcaggcccacgaggaaggggtgccgcacgttcttcagaagcacactgcgctctgccatgatgtggctctgctctttcttctttaagatggactttttctgtagtaccttcactgcatagaacgccccatcagacttgcgcttggccagtaggaccttcccgtagttccctttgccgatgactttgaggaagtcgaagtccgtgggctgggcatttgggttggctgaaggccccaggttgatgttcccattggccctggagggctgtggacttggggtcccagctgggctagagttcattctgtagcaatgatcaggcagctctgaaaactccaggttcctgctcaggtcctggggagcagccccatgcacggctctgccctcttctctctcttcatggtccttctgactggaggcacaatcctgacttgtcaagcaaccttccc

SEQ ID NO: 13305 - DNA, 201 bp, Homo Sapiens
cctcacccccccaccaccccttcccatttcatcggtggggacgtggagagggtggggcgggctggggttggagggtcccacccaccaccctgctgtgcttgggaacccccactccccactccccacatcccaacatcctggtgtctgtccccagtggggttggcgtgcatgtgtacatatgtatttgtgacttttctttgg

SEQ ID NO: 13306 - DNA, 905 bp, Homo Sapiens
atttcctcttctctctggaagctcatggctctgcaagcagtgctgtcaaactggcatgtgttctgactgctccgccttaacttcctttctgcggctgctaagcctcatttacctgccatggataaaaaagaggagtctgatccaagggaaccctcaggggagccacaatgaccagctcaaacaggagccacagaaggagagggacaactccagccaacagcaccgcaactatcaaagtctgcatgatcatgagagaccactctgtaaccttctggaagatcactctgcgtccctgaggcatccatgccaccatcaccgtcacagcccttatggttagccagcaaacatagagaccacaagcagctgtgtagagctcatggattttggcagtccccgtccaaaacgacattaaccaacggccagcaaatactggtaaagtaaggcagatgaggctggcaatcagtaatgttatacacatgaagacaatcaacagaaatatcctgagtggaaaatttaaaggtcggcggtaaggctgaaagccaacaggccctccctgctggagtatggcttggtgggctgcatgaaggccttctcccaccacaggaatagcgttgttatttcgagcatgctgattattgttaacttgttgatttgcactgttttcattttcttcctggtctcccaataaataagaatgaagatccagcaagtatccggcggtcacagtccacgctcgcaccagccccttcagccactgcctcgtgtgtccctgttcgagtaatgctggcaagacaacctgaagcagaagcagctcgagggacagttcactcactggagcatcactgtagagcatgacattgtatggaagaaaattaggcagcacactcttaattatacgtatagga

SEQ ID NO: 13307 - DNA, 917 bp, Homo Sapiens
tggtcccccagtgcgttcctgcgaaattcaggtgttcaggcgagttgtttcacaaaagtgaatgagagaccttctcacccacccgtgaggctaattcccgggccttggttcggacagcggttgtccgaaggaattcccgctccgaaccgggcccatcgcatcaatcctcctggtaagttttggtcagcttcctcgcgagatgtgggctggaatgcaagcaggcccttcccgtttccgcacgaccaccacctgcaccggtacatgctcaggaaggcggatgggggccctgaagtgcatggccagagagaccagcaggtggaggatggccaccaggttcttcccgtgaattgagtccacgctccaccggagcgcccagcctcggggccgcagcaggtcatgtactgcttccagcaccgtctgcagcttctgtttctgccctatttcggactgtgtcacctcagccacattcagcttgcaccctgccagtttttccaagagcttctgcagcacctggccgtcatacaggtcttcctccagctgcttcacaatgatcctctcctccaccagcacgtcattaatccagtcgaggaggaccttgaccagttccttgaacttggggtcttccttggaagtggggtcaatcatcgtgcgctcctcgttctcctcgagctgggtgtcttcagggtgaacatccgccagggcgggggacatcggtgagttgatggcattcttgccttcttcctgcaggtcactcacctcgcgcgccctccgcttcctggccagggtgccgcccagcttgcccaggaacgactcgtccttcttcatcctgcggggccgcggggtgggcgagcgcggcccggaggacatgggccgcgcgtggggccgcaggcgggcagcagcgcgtgtggagccgcccg

SEQ ID NO: 13308 - DNA, 836 bp, Homo Sapiens
ggggctgggaaagcgcgtccccgccgcggctccgccagtttgaacttggcgggccagatgtgggcggcggggcgctgggggcctacttttccctcttcctacgccggtttctctgctgactgcagacccaggtctcggccctcctcggactcctgctcagtccctatgacgggcgcacgtgggcaggggctggaggtggtgcgctcgccgtcgccgccgctgccgctgagctgcagcaattccaccaggtcgctgttgtctccccttggccaccagagcttccagtttgacgaggacgacggtgacggggaggatgaggaagacgtggatgatgaggaagacgtggatgaagatgcccatgattcagaggccaaagtggcgagcctgagaggaatggagttacaggggtgcgccagcactcaggttgaatcagaaaataaccaagaagaacagaaacaggggcgcttaccaaaaagccgccctgacaccatggggaggtgggggtttaattgggccaggaaaaaaagaaggaaccgtggaccgggccttgcaaaacttgaaaaggcttctaagaagggaaatttaaattccaaccccgcgccccggcggccccggaacggtagggagacggtattcctgtggttcgggcccggccctcgggcccccctgagagaaagccctttcctaaaaccaattccgcttttggccgaccccggagccccccgctaaagggaaagcgggaaaccatgggcgcctaagagctggttttccccaaggggaaaacccccgggggcacatgagactaaaagggccttgggtaatttccctcccccaag

SEQ ID NO: 13309 - DNA, 1050 bp, Homo Sapiens
  misc_feature (74)..(74): n is a, c, g, or t
gagagacttgaagttgcactcaaggaggccaaagaaagagtttcagattttgaaaagaaaacaagtaatcgttntgagattgaaacccagacagaggggagcacagagaaagagaatgatgaagagaaaggcccggagactgttggaagcgaagtggaagcactgaacctccaggtgacatctctgtttaaggagcttcaagaggctcatacaaaactcagcgaagctgagctaatgaagaagagacttcaagaaaagtgtcaggcccttgaaaggaaaaattctgcaattccatcagagttgaatgaaaagcaagagcttgtttatactaacaaaaagttagagctacaagtggaaagcatgctatcagaaatcaaaatggaacaggctaaaacagaggatgaaaagtccaaattaactgtgctacagatgacacacaacaagcttcttcaagaacataataatgcattgaaaacaattgaggaactaacaagaaaagagtcagaaaaagtggacagggcagtgctgaaggaactgagtgaaaaactggaactggcagagaaggctctggcttccaaacagctgcaaatggatgaaatgaagcaaaccattgccaagcaggaagaggacctggaaaccatgaccatcctcagggctcagatggaagtttactgttctgattttcatgctgaaagagcagcgagagagaaaattcatgaggaaaaggagcaactggcattgcagctggcagttctgctgaaagagaatgatgctttcgaagacggaggcaggcagtccttgatggagatgcagagtcgtcatggggcgagaacaagtgactctgaccagcaggcttaccttgttcaaagaggagctgaggacagggactggcggcaacagcggaatattccgattcattcctgccccaagtgtggagaggttctgcctgacatagacacgttacagattcacgtgatggattgcatcatttaagtgttgatgtatcacctccccaaaactgttggtaaatgtcagattttttcctccaag

SEQ ID NO: 13310 - DNA, 708 bp, Homo Sapiens
caacagctgatacagcggagaggagcaacaagaaggagatgaagaagacaaactcactgactggaataaactggcttgtctgctttgcagaaggcagtttcccaataaagaagttctgatcaaacaccagcaactgtcagacctgcacaagcaaaacctggaaatccaccggaagataaaacagtctgagcaggagctagcctatctggaaaggagagaacgagagggaaagtttaaaggaagaggaaatgatcgcagggaaaagctccagtcttttgactctccagaaaggaaacggattaagtactccagggaaactgacagtgatcgtaaacttgttgataaagaagatatcgacactagcagcaaaggaggctgtgtccaacaggctactggctggaggaaagggacaggcctgggatatggccatcctggattggcttcatcagaggaggctgaaggccggatgaggggccccagtgttggagcctcaggaagaaccagcaaaagacagtccaacgagacttatcgagatgctgttcgaagagtcatgtttgctcgatataaagaactcgattaagaaaggagacaagttccatgggatacaacctccctcttgttttgtttgtctctccttttcttttgttactgttcttgctgctagaacttttttaaataaactttttttcaatgtgaaaaaattaaaaa

SEQ ID NO: 13311 - DNA, 364 bp, Homo Sapiens
ggggtgtgagcttggttgtcctaccaaagccagcgtttcggctcgcgtgcgccggcctagtttgctcgcgtcctcacgcgctttgggtttcccggtctcatggccggcctgaccttatttgtgggccgcctcccgccctcggcccgcagtgagcagctggaggaactgttcagtcaggtggggccggtgaagcagtgctgcgtggtgactgaaaaagggagtaaggcatgtcgaggctttggctatgtcactttttcaatgctggaagatgttcagagggccctcaaggagattaccacctttgaaggttgcaagatcaacgtgactgttgccaagaaaaaactgaggaacaagacaaagaata

SEQ ID NO: 13312 - DNA, 466 bp, Homo Sapiens
ggtacccgttcactccagtcccaccccacgcctgactcccctctggaaactgcaggccagatggttgctgccacaacttgtgtaccttcagggatggggctcttactccctcctgaggccagctgctctaatatcgatggtcctgcttgccagagagttcctctacccagcaaaaatgagtgtctcagaagtgtgctcctctggcctcagttctcctcttttggaacaacataaaacaaatttaattttctacgcctctggggatatctgctcagccaatggaaaatctgggttcaaccagcccctgccatttcttaagactttctgctgcactcacaggatcctgagctgcacttacctgtgagagtcttcaaacttttaaaccttgccagtcaggacttttgctattgcaaatagaaaacccaactcaacctgcttaagcagaaaataaatttattgattcaaa

SEQ ID NO: 13313 - DNA, 867 bp, Homo Sapiens
  misc_feature (585)..(585): n is a, c, g, or t
  misc_feature (608)..(608): n is a, c, g, or t
ggggttctcgcgagaggcgggaaagggcgcagggtttgaaacatggcggacgacgtagaccagcaacaaactaccaacactgtagaggagcccctggatcttatcaggctcagcctagatgagcgaatttatgtgaaaatgagaaatgaccgagagcttcgaggcagattacatgcttatgatcaacatttaaatatgatcttgggagatgtggaagaaactgtgactactatagaaattgatgaagaaacatatgaagagatatataaatcaacgaaacggaatattccaatgctctttgtccggggagatggcgttgtcctggttgcccctccactgagagttggctgaaacaaagaatttgtcctgtatggaaaacgggagactttgtacagtggcctctctaaaagtacaaaacattcataagagaaacctgcatacattttgatattaagaaataattccggggattcttccactcctgaaatgagttgatttgcagataactcacaacttcttaagctaaatggtattttcatttttctcaagctctccaataaatatgaccaccaagatgcagttggnacaaaaaaggcgcggggaagaangcccttgtcggccgcctcccccctcgaaaagctttccagaccattgcgttggggggcgcgggccccagtagggaaaggggaccatggcccaaagctggtttcccaagggagatcccgggttctggaccaagggcctggaatctccccaccacataaaaaaacccccccggggggcaaaccgagcgggttcggaaccaaatttccaaacgggagttgcgcgggggccattaccggggctgctataaacggcgggtgcccc

SEQ ID NO: 13314 - DNA, 478 bp, Homo Sapiens
  misc_feature (451)..(452): n is a, c, g, or t
tgaaagtgagatttgtatatgggctgcactcacgcatatacgagttggtttatctttgtgtacatgactataacccagtgatgctgaggtcatgtgctggaatgctgtatttggaccacacatttcaaagttgccctatggaaatgaatcctacttagtgacaagtcatcaaatgtttgtcacatgtgatgaagacaaatatgtatacctggcatagagaaaaatatatacctggtacattggagaaaaataattacactttcaaagagaattccctttgcaattttatgtttggatcaccactgtaagcacactttatttgcatttgatctgtatttgtatatgctgatgcaatgataaaaatcactgtaatacttcattgtgttgtactggatgcaaagctagaaaatattgcaataaatgagaccgatgaaagacttctccaaaaccnnaacccctctccaacccctaatcttgt

SEQ ID NO: 13315 - DNA, 651 bp, Homo Sapiens
  misc_feature (487)..(512): n is a, c, g, or t
aggagcacacagaggtggctttccacctcgataatgttgaagacattgaacctattcatcctcctctaaccttctttattgtaattaaatttcaagtgggagacttaactttagaactcacttccagcttgcactttgctttaatttctctgagctgcaagaatgtcttagcgagccttgcttgcagttgtcacacacactgtctggtttttttcaggataaatgaatgattctgccttttgttatgtgcgtgaacagaatggaacaactcaagtagcttcatcttcagagactgaatttattctgatagacttcagctaattacaaaggattttgctaatttttgggaataaataatggaaaaagatccagtctgtggtatcatgctagtgctgacagggccttgatagaatagagttggaaaagatggtaagcttttgtcagggttttaacattttcttgatgaaacaataaaaagaggtaagcnnnnnnnnnnnnnnnnnnnnnnnnnnaaataaactcagatataatttgaatactgaagaaattaagagactttgaacaaaatctcttcccaaatctaaatttgataggggaggtggagattccaggggtgggtgaaagaagagatagaacttagcaggcagcctt

SEQ ID NO: 13316 - DNA, 1175 bp, Homo Sapiens
  misc_feature (382)..(382): n is a, c, g, or t
ctgaaagttcatagcagccatgcattgactgtcgaagtagtgcaaaggtgttctgggttgattgaggtcatatccaaaacccgccaaactgacttcatcgcacagatgtgtggctaagacaacggcaatgacaccgattgtggggacgttcttatctcggccccagaaccttgactgaggctctgagtactgaaggatgtcaaaggcagtctctttgatgataactggattcaaaatcctgaaatgttttggctgcagtgggattttttctgccacctgcttccaaaagaagagtcgtacccagaatggcagggtttccttttttaccattgcttgaagccagttgaaatcaacactcttaaataaaaccagcaacaaatanagtcaatggaataatattcaaggtcagaccagtggtgcgcccttctggataagtcatccttatagtagttttatttccaacatgttctgaatatccctcaactggtgcactgtttaaccttatcacaacatcgaactggttcagggtgtggcccagttctaatccgtgcagtattcctccgcttccaataaccacacagcgccgacaggtcttggctttcaagtgttcagggaggtcgtgctctggcaagagttccaagagggtctggactttactggagaacttccggaacccaaaaggaggatcgtacttggactcagcttcactgtctttgggggccttctgcacaaaagggagtagtccacgctatacctgtgctcaaataacagcgccattgatgtcttggcaaacttgggacgacattccttctgcaagacttgctgagcatatttctgagctctctttacatggtcagggtccacataatgcatttttttcatgtcacattcttcagtagtataatttaacttgaggatataaaggatccacactccaaacacaagcaatgtacatttgaggatgtcttttaataacaagctgggccttctcatcttgctttgagctcgggtgtaccattgcagggaaggcctcgagcaatcacttctcagtttcacataggtgtactcacttggcattgctcggccggcaggtgccgccgctgcctcggtccgcggctgcaggggacgccgctccgcgcagcccgccgccttcgtccgcatactaatgagggggc

SEQ ID NO: 13317 - DNA, 607 bp, Homo Sapiens
gtgtcatgttcatgaaaatgcggttagagaggtgctattcaagtgattctgaaggcaccccaaggtatatctgtaatttaaagattactgcaaatatctttactttactgtgggtttttagtacatctgttaatttagtgtttctttgtgtgttttgtagactagtgttcttccatccttcaactgagctcaaagtaggttttgttgtaacattgtgattaggatttaaactaattcagagaattgtatcttttactgtacatactgtattctttaagttttaatttgttgtcatactgtctgtgctgatggcttggcttaagattttgatgcataaatgaggtcactgttgatcagtgttgctagtagcttggcagctctttcaataaaagcatattgggttggaaaggtgtttgcctatttttcaaattatttaatagatgtatggtaccatttaaaagtggttgtatctgaatttactgtggggataacatacactgtaatggggaaaaattacctaaaaccaatttcaaaatggctttctttgtatttcagtttaaaaacccagtgcatgtacgccctctgagatgcaataaacaccttgaac

SEQ ID NO: 13318 - DNA, 934 bp, Homo Sapiens
  misc_feature (715)..(715): n is a, c, g, or t
cggcgccggaggtcgccatggctaccgagcccgaagccgcggagccggtggtgccttcgctcgtggatcgatacttcactcgctggtacaaaccggatgtcaaaggaaaattttgtgaggaccactgtatactacagcactctaaccgaatatgtgtcatcacattggcagaatctcatccagttcttcaaagtggaaaaacaattaaaagcatttcctatcagatcagtaccaactgtagcagacttcagaacaaggtctctgggaaatttaagcggggggcacagtttctaacagagcttgcacctctctgtaagatttactgctcagatggtgaagaatatactgtgtctagttgtgttagaggacgtttgatggaagtgaatgaaaacatcctccataagccatctattcttcaagaaaagccatctactgaaggctacattgcagttgtgttacccaaatttgaagaaagtaaaagcataacagaagggttactgacacaaaaacaatatgaagaagtcatggtgaaacgcattaatgccacaacagctacgtcatgaggattgacatggaacaaaaagcaaagtgggattcttgttacctggcctaaccatcagggtactaaaggagaagaaccagtatatgtaaagcatacctaacagccagccatatgcaggggaggcctagtgcttcacttagttttccctctctngtctcataatgagccttgggtcccatttgtctacagcctgccagatctgggcctgcccatgtactcaccctggttctcttgcatctctctaacaactggcatgcaaggcatgtttttcctgattaaaaacaaacaaagctccttttgagaaaaatttagaaaataccgaaagaggttttaagtacgccaggtaaaaataatttttcccccctccatccc

SEQ ID NO: 13319 - DNA, 999 bp, Homo Sapiens
  misc_feature (51)..(51): n is a, c, g, or t
tcccttgtgcatgcatgtggtataaaaaaaagtcattaagttgcttgcagnaaaaacacaatgcaagtcattaagtaatgctagaaatgtctcaattgacccaaccctcaagacacttcaaaatgtactttatttttccacgcaaagttaccgagccaagttctgcacagttggtgcatgctggacacacttgcaaactcttgcgctgtaatgtcagtctggactctgggagccaggctcagctttgagatttacatgcagggactcttaagagtcaacaggaaaacacataacagatctgtagaatgacacctgttcacatacgagaagcacctatgacttgggtatcacactgctttcagaagcttgtccctggctgcccacagtgaagcacgagggacagagcgactgcagctgtggacagaaaactgaggtactgtgtttacatggtgagtggtcgttaccaaccaaaagcacaaggccacaaaaaaggggcatcaagcaaaccatgcataacgaggcctggaaaccatcaagaacagccacaaaagaggtcactcagacctctgattcaaacttctggtgtttgagtgacaagcatgcacgtttaggctctgcccaaatatcagggaggatttccaatctccacaagagactggtttcacatatggcctttctcctggctgtcaaaccaccagggttcctccaaaacaaaatgagagcagctgttttgctgatcaaccaatcacactagcagttctatttcagtttaaaacaaccttgcaggaataaaccacataaagactccgtggctaagggctgctattacttacacctaccaagcgaacacaaacggctggctcttctatggtaacgcttcactggcatgcaaaccccaaggggccactgaatggaatgaatccacatgaacagcatacctggagcaggaacatgcaccccacaagaggtgtcaggagactaagctgctcggacgcgtgg

SEQ ID NO: 13320 - DNA, 1260 bp, Homo Sapiens
  misc_feature (981)..(1019): n is a, c, g, or t
ccgcccggtgttgcgctccgcccggtgttgcgctcccgcccggtgtcgcccccgtccactctcgactgccggcgacggccgggtatgggcccgacgctccagcgccatccattttcagggctagttgattcggcaggtgagttgttacacactccttagcggattccgacttccatggccaccgtcctgctgtctatatcaaccaacaccttttctggggtctgatgagcgtcggcatcgggcgccttaacccggcgttcggttcatcccgcagcgccagttctgcttaccaaaagtggcccactaggcactcgcattccacgcccggctccacgccagcgagccgggcttcttacccatttaaagtttgagaataggttgagatcgtttcggccccaagacctctaatcattcgctttaccggataaaactgcgtggcgggggtgcgtcgggtctgcgagagcgccagctatcctgagggaaacttcggagggaaccagctactagatggttcgattagtctttcgcccctatacccaggtcggacgaccgatttgcacgtcaggaccgctacggacctccaccagagtttcctctggcttcgccctgcccaggcatagttcaccatctttcgggtcctaacacgtgcgctcgtgctccacctccccggcgcggcgggcgagacgggccggtggtgcgccctcggcggactggagaggcctcgggatcccacctcggccggcgagcgcgccggccttcaccttcattgcgccacggcggctttcgtgcgagcccccgactcgcgcacgtgttagactccttggtccgtgttacaagacgggtcgggtgggtagccgacgtcgccgccgaccccgtgcgctcgctccgccgtccccctcttcgggggacgcgcgcgtggccccgagagaacctcccccgggcccgacggcgcgacccgcccggggcgcactggggacagtnnnnnnnnnnnnnnnnnnnnnnnnnnnnnnnnnnnnnnncgccggggcgggggcgcggggaggaggggtggcagagcggtcgcaccgtgggaggggtggcccggcccccccacgaggagacgccggcgcgcccccgcgggggagacccccctcgcgggggattccccgcgggggtgggcgccgggaggggggagagcgcggcgacgggtctcgctccctcggccccgggattcggcgagtgctgctgccgggggggctgtaacactcggcggacgcgtgg

SEQ ID NO: 13321 - DNA, 639 bp, Homo Sapiens
ctaagagacagaagaatgcatcctgcctcaagttttagttgcataggttcaccctacagtgaggtaatagttacacattcttaatgaaaagatccaaaagcccaatacatcctgttctgcagcatataaagcatcttcttcagacctggtccaagactactctgggatttttgagtcagaagagagccagagcctattcagtatgctgtttgactctgatcccagcagccaccaccatgttaacaggatgagcagggcttccttcaactcagggttcctgtgaaattaaaaagaattctcatcttgactcaggattgttgaacactattgatatttcttccaaggtctcacaagagtttgcctcctctcattgccatgtgaagacctccgtgggggaacaatgcatgggttcttggggtattataggggactacagagaagtgtcacctccacccaacagcctgattcagtctactcctcaggaggaacacaaagtggtctctctagtgccatgaaaccccaaaaagtgtcaaccagtattaaaggcctgcctgatatacaaccctcgaatgcaacacagtgtccttctgaggccactctaaaggccaggaaaggtttgctaagaagtctgtgctgtta

SEQ ID NO: 13322 - DNA, 962 bp, Homo Sapiens
ccacgcgtccggccaaggagcagggaggaatgtcatgtctttatgcattatttcttccttcccagcttgtgctaactgcactattttaatatttaaaatcccacgtttttatgactgtatttcaagtcagaatctgacttccttaggaatcccccaaaatgcctttgcatcctgccctgaagggcacctcctttccttttctaacttccccatgtgcttcctctgtgaccttcagccaggaaactacagagcaacaacaggaattagagggaccatggccttcagttagaagacagtagtcaaaagacaggctaaatcacgtgataagtgctaaagtacagtttgtgaggctttttatttaaaatgggagagttgctggttgatatgaaatgatgaaatgactgaatatattaacaagctggattttcactgaagaccacaatttaattgttaattaaatttagtggttgcatttctgcagatgatgattttggaagctataccaggcatggttatgagttgttttcttgtaggttatgtattataagagactagtctacaaaccaagatttgtctagtaagaattgtcttttttatattgattggaaccattcaagtataaccagtatgttttaaaataatcattgttatgcataatgtttaggaacgggaaatggaagccaaaaaacgagccctggaagaagaaaaacgacgccgggaaatcctggaaaaacgattacaggaagaaactagccagaggcagaagttaatagaaaaggaagtaaaaataagggagagacaaagggcacaggttggtcggtcaatctgaatgcatatgggcaggttgccccctggtggcagttcctagaagacagctattctgtgtctgaggatgctttcctgggcactgagcattagcacttgacatgtaagggttaagagaagagtgtgcattcctgtgc

SEQ ID NO: 13323 - DNA, 1485 bp, Homo Sapiens
atggactcgcgggtatcggagctgttcggcggctgctgccggcccggagggggcccggccgtgggcggaaccctcaaggctaggggggccggcagcagcagcggctgcggggggccaaagggaaagaagaagaacggaaggaacagagggggcaaagccaacaaccccccgtatttgccccccgaggctgaagatggaaacattgaatataaattgaagctggtgaatccatcccagtaccgctttgagcacctggtgacacaaatgaagtggcggctccaggagggacgtggtgaggccgtctaccagattggggtagaggacaatgggctgctggtggggctggctgaggaggaaatgcgagcttcgctcaagaccctgcaccggatggcagagaaggttggggcagacataaccgttcttcgagagcgagaagtggattatgatagcgacatgccccggaagatcaccgaggtgctagtacgaaaggtccctgacaaccaacagttcctagacctccgtgtggccgtcctggggaatgtggactctgggaagtcaactctgcttggagtcctgacccagggaagagctggacaaatgggcggggccgggctcggcttcaaccttttccgccacctgcatgagattcagtctggccgaacctccaggcatcagcttcgagatcctgggctttaacagcaagggagaggtggtgaattacagcgactcacggacagcagaagagatctgtgagagcagctccaagatgatcaccttcatcgacctggcaggccaccataagtacctacacaccaccatctttggcctcacatcatactggcccgactgcgccctgctcctcgtcagtgccaacactgggattgctggcaccacaagggaacatctggggctggccctggccctgaaagtgcccttcttcatcgtggtcagccaagatcgacctatgtgccaagaccacagtggagaggacagtacgccagctggagcgggtcctcaagcagcctggctgccacaaggtccccatgctggtcaactctgaggatgatgccgtcactgctgcccagcagtttgctcagtcaaccaatgtcacccccatcttcaacattgttccagtgtggctggacgagaagtcggacctccctcaaaagtccttcctgaatattctggccgcaaatcaccaaacaggcaacgagcaggagcgactcatgcggcagctgccggagtccaggtgatgcagctaccagtacacgccgtggggactgggtggcggcacacttcaagggatttgcgaagggaccactggtgggcccagacatagggcccggacgacataggaacaagacacaccgcagtcgacgaagaaggcaatgggcagggagacaggaaggagcagagcgaaaacaaagcgaggaaacaaaacaaagggcgaaagaaggacaggagacgacaaagcacagacacagc

SEQ ID NO: 13324 - DNA, 859 bp, Homo Sapiens
ccacgcgtccgcagtaaccccagacagtttaagaaaacctctccttttgagctgatacaggttttttccccagaatccttttctggcatgtttattgtatgaaataatgaggctctccatggaaggatgaacacatatgagtcaagggattgcaattctctctgatagacttagttttcagaccttataactattgtatatgcattgaagggtgatatatttgcatataaaaataaatgcacctgctctgggaactacttgtctttagttagtagaactgttttatttcaactaatctttacttcaaatgtcttattttttagaaaaagggtatctcatactcatttaatattttggcaaatttcttctttaaaaatgttacctgatgtaattcctgcgtgacatagctgaatttttaccctgccctaactctgcttatctttaagaaacaggatgcctgtgatgaaaagttccttttgtaaccagtccagaggagactggttacaaccacgatagctgaccaaacgactttaaaaagacctcagcctttttataatcttatttctgtgctaaataacgctcctgctagctccatgacagttgacaatcgccatgacagtgaccagaagaagccatgaaaggacaaaaaggaaggcagcactctggttttaggaagttcactgcccatttctgaaaaatccaggaatattcctccctttgcttgaatgtgaaacacctttattagaaaaattatattttaaccccctcactcctcattagttgaaaagttgatttgtgagccatactcctgcttctcaattcagtggcgattgaataaaacctgcagtgtttgtcactc

SEQ ID NO: 13325 - DNA, 658 bp, Homo Sapiens
gggggagatcacccctctaattatttctgaacttggttaataaaagtttataagatttttatgaagcagccactgtatgatattttaagcaaatatgttatttaaaatattgatccttcccttggaccaccttcatgttagttgggtattataaataagagatacaaccatgaatatattatgtttatacaaaatcaatctgaacacaattcataaagatttctcttttataccttcctcactggccccctccacctgcccatagtcaccaaattctgttttaaatcaatgacctaagatcaacaatgaagtattttataaatgtatttatgctgctagactgtgggtcaaatgtttccattttcaaattatttagaattcttatgagtttaaaatttgtaaatttctaaatccaatcatgtaaaatgaaactgttgctccattggagtagtctcccacctaaatatcaagatggctatatgctaaaaagagaaaatatggtcaagtctaaaatggctaattgtcctatgatgctattatcatagactaatgacatttatcttcaaaacaccaaattgtctttagaaaaattaatgtgattacaggtagaggccttctaggtgagacacttttaaggtacactgcattttgcaaaaaa

SEQ ID NO: 13326 - DNA, 1185 bp, Homo Sapiens
  misc_feature (47)..(60): n is a, c, g, or t
  misc_feature (73)..(83): n is a, c, g, or t
cggcggcggcggcggcggcgatccacagtgattcggccgccgcgccnnnnnnnnnnnnnnctgcgccgggacnnnnnnnnnnncagactgaccgcggggcagctgcggagcatgtcgaccccggcccggaggaggctcatgcgggatttcaagcggttacaagaggacccacctgtgggtgtcagtggcgcaccatctgaaaacaacatcatgcagtggaatgcagttatatttggaccagaagggacaccttttgaagatggtacttttaaactagtaatagaattttctgaagaatatccaaataaaccaccaactgttaggtttttatccaaaatgtttcatccaaatgtgtatgctgatggtagcatatgtttagatatccttcagaatcgatggagtccaacatatgatgtatcttctatcttaacatcaattcagtctctgctggatgaaccgaatcctaacagtccagccaatagccaggcagcacagctttatcaggaaaacaaacgagaatatgagaaaagagtttcggccattgttgaacaaagctggaatgattcataatagacaactggtctgttaatctttttcatcattgttgtgtataatttacctctcattagaaaggctaacaaattttaagtgccacaggttttaaggattctgcagaaaaaaaagaaaaaagtccttcagtttagaacctacaaaagcttgtgtatcttgattaatgtactttttattgcatggtgtgaactaagttattgctgcataaatttgtaatatatcctgtttgtatttttttccaagtgtataatgttggtgtggagttttcatgacagaatatacacattttgtaaatctgtacttttttcaaatattgaatgccttatttttgaattctttagatttttaaattggagaaaagcacttaaagttttttatatatgaatattacatgtaaagctgttaaaatacataactttcagtgccagaagactttgggccctaattttccttatgtgtggaagggaggaggttaataagacctctagcctcctccctcttattggaaagatttccttttaacaatttccaaaagaaaccttccttaaatttttattcagggggaggcccttccaaatttgtgaacccaaaaaacaccgcattaaagatccccta

SEQ ID NO: 13327 - DNA, 740 bp, Homo Sapiens
ggatctaaagttttttgaagaattatttggttttcattgcattaaaattctatcactcccagctttgttttcatttaaaaaaatatacaaagagctttgtaaatacaacacattttatttctcccccttcttttaatgtacagctttttggccacttatatatacttaaaatatccccatgaattatgtccagttcttcttggaaaaaaatttggttttgaatgaacctgcaaagcatcctgcagcgtgagcagctcctccacctggagctccgaagcatcttctcaggccaaagcggcattacccgtgaatctgtcttctccgccacagcatggtttgaggcgcagtctgttaatatagctgggccatgtcagtgactgttgtgtttgtggggtcaggtggggggcatggtatttgcaaaaaaaacaaattatggctaatttattattttgttgcagtggggttaactgtaaactcatgtaagagtctgtgatttcctcattggttgatctctctctctgtaatcctcattgcaaattttcaccaggacagcgttttttgattagaggggagctctggcacagtatgctttaatttagcaggaacttccagatgatttaaattctcgatgctgtgatgacacacatatgatctttcgtgtttctgagcgactctactttcattgtttgccagcgtggctcgttgctgttgcccaataaagcttgtgtacgttctgcaaa

SEQ ID NO: 13328 - DNA, 985 bp, Homo Sapiens
  misc_feature (807)..(815): n is a, c, g, or t
accggtggagctgtttaagccaaggagttgtggagatctctgtgatgatccaaaatctgactaatataaaatcaactctgatgctaattaaatctgacttataacttgtctgctaaaagaaattataacaggaaactttggtgactggtaaggaatgttgaaaagggaaaatcagaaggaaaaacctggttcataagaaggaaggaaatattggtccaagcacgtcaagggctctaagtaaaaaccgatggcactacaattccacataatccattacatttggaaaaagaagctcctggtagacacagggcctctttgggatattgttctttgttctgattctgtgctcaccaggaaacaaatttcatctccgtagggggcccgtccttcagtaggaatggccctgctcctaggttcttggctcacttgccaagactacaatagcactcgcgtttatcagttatgcttgtgtgaagctggttattgcaattcattgttctcaaaatactttcatgaaaagcctgacctgagaaaaagccttctctgtaatcatattaattagaacataaatgtctactttgccataattatacaaagagcccaaatgggcaattaactccagttggttgcttctctctgagccttacttgccagctcttattaccacattccagagagagtcaacctggatggagtttgtcccctaaataaatgtagcgacaaagaaaagggtgctccaaatcagtttcatcagaatgataaggtacagtactgcagccatgtctgcaatagcacttcaattttacnnnnnnnnncccctagcatgtccttaagcattttctccccagcttttcacaatctttcttctaaggctgtaatgtcttacatccttaataggcatgattagatttctcccaattttccaattaactttctttcatgtaaccaaacaaacctgggtagggctttgcctggggatcctcta

SEQ ID NO: 13329 - DNA, 1371 bp, Homo Sapiens
  misc_feature (1056)..(1116): n is a, c, g, or t
  misc_feature (1146)..(1146): n is a, c, g, or t
  misc_feature (1175)..(1187): n is a, c, g, or t
  misc_feature (1300)..(1300): n is a, c, g, or t
aaaggatgcgtagagtaattgacaccacgaattcccaacggtgtagtagcaacgggggacttggatccgggatgtttcacagccccccatctctacgtgcggcactcgtgcgacacagcaagcccggggtcatcatggggcgccaagaaaggaagaggcgtccatcaagaccgtgcatggccagcagagggaagttgccataaacggaaatgtttggggcggaaatcaggaagcgacggtccgaagtcgttgatcctggccgattcccatcgctgctctattgtagaaaaggtttcctcctagtactgaattcctcggaatgagtgatggacttcacaacaactagccaggaagggtgacaagtaccttctgcctcctccattcttcctgggtgcagaactgtagaagaccctgaggactcctgggctagtgtgagcagctattctgcatgggtgcagatggctggatgtgaaagagacatgctctagctgcagaggcaaatttgaagtgccacggaacgttgtcaagaggtagtgagattgttgctgtgagcaaggctctgggagagtcacctcaggctcaggattctgaaccattgagatcagaaaccagatacttagccttctactgtagctacggaaccagattctggtgaatttgtccacaatcagccattggcctgtctggggagtttttggaagacagcaaagaggggcaatggctgctttcagctttgaggacagatgctatcctaagggcatggcagtacccatgttgatttgacatctctctagcccatccattgcttacagtagaagagtggggctgtatgcttgataatcttgaacattgaacttaatagatgacttgacaaggtagagatctgatattttgagattttggagaccatttcctgtgccagaatcactgctctattccataccgtgccatggaggctgttttagaagtggttggataacatgttaaataaaatattaagtgtaaaaaacaaaccccccatatcatcttttcttccgcccttcctccccaccttgnnnnnnnnnnnnnnnnnnnnnnnnnnnnnnnnnnnnnnnnnnnnnnnnnnnnnnnnnnnnngccctctcctgggtcgcgcggatttcactngacctatactttgctatttttttcggcgnnnnnnnnnnnnntcaaaaaaatcttttctaaaattttttttgtttgggagggggcggccccccctaccacaaaacaaaaacaaatgggtaaataatttttcttccccacaaagagacatccgcgngcccacaacaaaagagttgggttgtgttttctcctccgcccccaagaataacacaccccccggcggcgcga

SEQ ID NO: 13330 - DNA, 612 bp, Homo Sapiens
tagaatcttatccctacttatataatctgtatacgttttctagggtttttgaattgatgaaagaagtcctacatgaatcacactattgtaggccagactagttacagcagctgttaacgagcattggggcacaactcatattgtgcttacaatcagatgacgtggtttggagggtttcaattctttgacttccatccttccgcagcttccttggcttcacattgttttccaggggtgaaaagctgttggtgtgtccattcacagcagccatggacccattctggtggtccttcaggtggtctttccttcgggaggcccctttcttgttgtaggtctgaatgtagaagtttgtgaagagagcaatcagggaaatcatgtatccaatctggaaatacaaccaaccaagagggaatgtgcacggccagatgaccccgcagctggtctggatgattgtcagcacaaactgaagcagctgcccctgagtgatgtacttcttccaccagaggtatggacgcatggaagggactgacgacaaaccatagtaagagtacatgaggacgtggatgaagctattaagttgcaccaaaaaaaggcggccgctcgggatcctca

SEQ ID NO: 13331 - DNA, 1014 bp, Homo Sapiens
  misc_feature (89)..(105): n is a, c, g, or t
aaaacataagttgcatttattcacgtccacgccatctaaagctactgtgtacagtaatcaggactggagaagggacgatttagtatctnnnnnnnnnnnnnnnnncactgggacatgccccctgaattgcaagttggagttcgtaagaatctacttgctggcaagccggtttcctccctgagaagcacacttcccgcttccttctctccttccagcgtcttctgtccctctcagttaaggcctggacagtgtgggatggtgttgcaatctctcctgcagagctgtcagtcgcccgtgggctcgggctgcgtgcactcaggctcccggtcgctgggctctgcgctccgccgccgcagctcctccaccgtctgcagcagggccgaccgctccagttctaaggtaagcatggcctgcttcagcttgctctcactgctcaggagcttctcaatggtggcctcaaggctttggatcctaccatttgccacctgcaactgttcaaggaggtcaaggttctgtttgcgtaagctgctgttggttttctctaatttatccattctttggttgtcactgagaggagaggaatcgataagttcttcttgaaggacgtggtactcaacttcataagcttgtaactgtttagcgatgtccatttcaaatacctgattggatggtcttttccatctgtacccaagccaaggttgggtagcgtgcctttttataaagtcaactatggtttctaggttttcatgctgcagaatcaagggcttatggcttcccaacagacttaaagccactttaaatatgacctctgttccctgaagaaaaatcatatcaaagactctggctacgaatcccagcgggaactgtgaggcaaacatggtgaggaaccagggggcagcgtagaggctggggccgatctcgtgctcctccaggtgattgtagaggtctctgtggtaatcatgaagcaacctcgagagctggtacatctggatctgtaaaataatcatgtctggc

SEQ ID NO: 13332 - DNA, 563 bp, Homo Sapiens
ccacgcgtccgcttactcggtcatcgtgggagcactgatggcaagtggaaaagaagtagcaggaaaaattcccaaagggaagttagtcgactttgaagctatgacagcccctggttcagaggcctttagcaaagtcgccaaaagctggatgaacttgaaaagtatttcaccttcttataagactcttccatcagtttcagaaacgtttccaacgttaagatcgatgattgaggtgctaaacacagactcttctccacgttgtcttaagaaactctagttctgctgctgtatttatacaacgtaaagggccggacctcttgcttcttaagttattttttaaaacatggaattataaagaaattaggtcctctattacttttgataccaatttttataggaattgaatacttgaaatcattttctttacttttctgaaccataatgaaaatcatgaaagaggctttcggggggaaaaagctacttgacttggagggaaagcgtatgtattagccggcagcctgttggttcccacttataaagtcatataactccttccttacagt

SEQ ID NO: 13333 - DNA, 422 bp, Homo Sapiens
taatgaaatttaaggaccctctcccccaaaatatacatataaaaaaacaaggcagtctatggacctactgagtaactctcaagatagtaagtaaggagagaaagatctatgtttccctctttgataagtatgaaatatttggaggagatgctaatttttgcacgtttatgatatttgcaatctttcatttttgtagcagattatactcaaaaatttgatccagaacttggcccctattcttttatcagcactttaacttgtaaactgaaaagtttaccatcatctgtatgacatcctaatgaggttaaaaagataaaatgcagttatgattatgataggtataactgtatccaggtttccacagcaaaaacaaaacaaaacatacaccatgttctggggttattgacagcctcctaaaaaaa

SEQ ID NO: 13334 - DNA, 1068 bp, Homo Sapiens
gcgaataacgtgttaaaaagcaggtggtacggtccggaatctcgggatatcgtcgaccacgcgtcgggaagatgacctgatccacctagccttttcttctggatctgtcctccctcacccctttcacctgagctgtccacagtaggaaacataaagaaacaatgtcccctacatatccccatgactacataatccatcatcgtaggaaataggaaagcaaatttgatttgtggttttgtaaaagcgtacatgcttcaataattctttttttgtgtcttaaatacgtcataggggaaaaaaagcagctcacccaaggtgttaggtttcacatatatattcatcaactattttagaagatttaattctatcaaatcttgtattacctcagatcattttaaatagcaagccaataacgagctttgaaggctattttaccattcctgttcacaaaaggttctcatggtgcctgacaggttacccttgagggcttgtgtctactttttaaaagtcaatggttttttttcttgtgttctagtttccataataggagagaaaatatagaaatatatgcaaaaattatagttttctttagatcagaaactgatattttcgggtcagccatatgtatcttgtttaaaggatttaaaataaagtgccgtcatgtagccctgtggaagggagcacataaccagctgtttggcatgacaggtgacttagtatatttgtaattggttttaaaaccaatacaccatactttctttctgcaaacagccatctttatacttagggaagaaaaattgttgggttctagacttttttaatataaattttgttgatatggaattaggtaagtttaagtgtctatgtgcatatgtttttatataagttttttctattcagtttcactgatccaactggcagtgggtaaatatggcataagttaataacacttttccccaaaatggtgctttggatttgaaaagggtctgatggggagaaggagaacgtatcatcctagcttcctctcttataaacctagaaaaacgggtagtaaactgtggatagtca

SEQ ID NO: 13335 - DNA, 903 bp, Homo Sapiens
tgagccgctgtgtccggcccacatatcacattttctaaaaattccctcttactggccctggggttggccatttcctttggtatatcaatgccttccaacattttcttcattgtgacacacatgcaaagtgttattacaatacatggtgcaaatagaatgcagcttctagctaggggtgaccagctgcagctctggccattccaagtactagctacacacctcaagagctaagaggattagtagctgagcccactgtcatgcagctgcatcctacatgtgtaccgtaccccatcatctaggaagctctgcactatgcctccattgttttcactagttccctctaatgttatacttcttactctgcactgtaattatctgtctttagatgtatccctgccaataaactaggagttccttgtggacactggccatattccaatcatctctggatccccagtgatagaaaaatgcctgattgctagaaggattttccctgaaaataggttgactaagtggatgactgcattggtgaaaaaaatcccacaaacttatctcatttgtaataatcatgacctccactcctgagtgttaatcaaaataaacatgagacccttaaaaattccagggacacagattttgggcacaggacagtccagaagtaggcagacattataggtacataccttcttttaaaaaatattagtttagttttgtttttcctaggggattatggtagtaggtgatagggagttggataattggtatttcctacgttatgaccaattcctgttaagggaataattacagcaggctcattggaaatcccagcctaggactttgtctgttttgattgtttctgagcaaacagaccaatgtacataaacaatctttgctcctaaattt

SEQ ID NO: 13336 - DNA, 1008 bp, Homo Sapiens
  misc_feature (772)..(818): n is a, c, g, or t
ccacgcgtccgggcagatgacacatcagctagcatcatctccgacctgatctgccagggggctcagcttggggcacggactgaccgtactggcgagactgctttgcacctggctgcccgttatgcccgtgctgatgcagccaagcggctgctggatgctggggcagacaccaatgcccaggaccactcaggccgcactcccctgcacacagctgtcacagccgatgcccagggtgtcttccagattctcatccgaaaccgctctacagacttggatgcccgcatggcagatggctcaacggcactgatcctggcggcccgcctggcagtagagggcatggtggaagagctcatcgccagccatgctgatgtcaatgctgtggatgagcttgggaaatcagccttacactgggctgcggctgtgaacaacgtggaagccactttggccctgctcaaaaatggagccaataaggacatgcaggatagcaaggaggagacccccctattcctggccgcccgcgagggcagctatgaggctgccaagctgctgttggaccactttgccaaccgtgagatcaccgaccacctggacaggctgccgcgggacgtagcccaggagagactgcaccaggacatcgtgcgcttgctggatcaacccagtgggccccgcagcccccccggtccccacggcctggggcctctgctctgtcctccaggggccttcctccctggcctcaaagcggcacagtcggggtccaagaagagcaggaggnnnnnnnnnnnnnnnnnnnnnnnnnnnnnnnnnnnnnnnnnnnnnnncaagaagctgacgctggcctgcccgggccccctggctgacagctcggtcacgctgtcgcccgtggactcgcttggactccccgcggctttcggtgggcccctgcttcccctggtggcttccccttgaggggcctatgcagctgcactgcactgcagtgtctctggcacagttggtggccaggcgggcggg

SEQ ID NO: 13337 - DNA, 803 bp, Homo Sapiens
ccacgcgtccgcggacgcgtgggtccagctgaagaggaaggagttgaaatgaaacttacactgaggcccagatccaagaagaaggaacagtggtggaattgactggaaggcagtccagtgaaatcacaagaaccataaccaaactctcatttgtgaaagtggactcacactttcgacagggaattcccttctttgggcaggtgcgcctagtagatgggaaaggcgtccctataccaaataaagtcatattcatcagaggaaatgaagcaaactattactccaatgctaccacggatgagcatggccttgtacagttctctatcaacaccaccaatgttatgggtacctctcttactgttagggtcaattacaaggatcgtagtccctgttacggctaccagtgggtgtcagaagaacacgaagaggcacatcacactgcttatcttgtgttctccccaagcaagagctttgtccaccttgagcccatgtctcatgaactaccctgtggccatactcagacagtccaggcacattatattctgaatggaggcaccctgctggggctgaagaagctctccttctattatctgataatggcaaagggaggcattgtccgaactgggactcatggactgcttgtgaagcaggaagacatgaagggccatttttccatctcaatccctgtgaagtcagacattgctcctgtcgctcggttgctcatctatgctgttttacctaccggggacgtgattggggattctgcaaaatatgatgttgaaaattgtctgccacacaggtggatg

SEQ ID NO: 13338 - DNA, 593 bp, Homo Sapiens
ccacgcgtccgatgggggaagaggaagatgcagctgcacatctagcacaagctctagtcactgtggatgaagtaattgatgaagaagaactaaatatggaagaaatggtaaaaaattcaaattcactttttacattagatgaattaattgaccaagatgattgcatttcccacagtgaacctaaagatgttactgttctgtcagtggctgaagaacaagatctcctcaaacaggaacgcttggtaactgtggatgaaattggagaagtggaagagctacctttgaatgagtcagcagacataacttttgccactttaaatactaaaggaaatgaaggagatactgtaagggattccattggcttcatttcttctcagatgcccgaagacccttctactttagttactgtagatgaaatacaagatgacagcagtgatttgcatttagtgactttggatgaagtaactgaagaggatgaagactctctggcggattttaacaaccttaaagaagagcttaattttgttactgttgatgaagttggagaggaggaagatggagataatgatttaaaagttgagttagcacaaagc

SEQ ID NO: 13339 - DNA, 884 bp, Homo Sapiens
ggggcttgttatagtcacttataagtatctgggtctaagtaatttccttagatgtttctaaagaaacattttcagctttgctcccattatgattccaataaggaacgctttcctagtgcaattttaggagtaaagtttgaagagataaaaatagccaaagataggagacgtctgaattttgaatgataaacagtgatgttttaaaaaagctgttgttcttcaggaggcatttgcctaggatattgctggattataccccattggaggcttttaattttatttgtatgaattttccaggatttcattaaaaattattattgtattttttaccttaatgaaagattttgggttcaaatatctttctatattaaaagctgattgagtctgtacatatgtaaaattatgcctaatggaggttctgttgactttcttccccactgtggaagaggccagtttttgcctccatttgcacattcattttcagtaatttctgatccataaatataacatttacaaaatttcttccttgaacctggcgggaaatgccttcaaccagtttccctctttaatgaaatccaataaaaatccttttaacttgatggctaaaaccaggaccactttatacgaaacgttaccttgtcggggccgcctttggtacctctgaaaaacctttttctaaacccattatttttgggccaggcgcgcccccataggggtaagtggaaacctgggccccaagccttgtttcctctggaaaaaccctgggccaatggacaacggcctttggaattctcccccaataaacaaaacggcccgatggccgaacccgagcggtctttcaaacataccccgaagggaggtctcgcgggggcccttaccgcgga

SEQ ID NO: 13340 - DNA, 519 bp, Homo Sapiens
  misc_feature (492)..(492): n is a, c, g, or t
ggggcccacatataaatcctcaccctgggagcctggctgccttgctctccttcctgggtctgtctctgccacctggtctgccacagatccatgatgtgcagttctctggagcaggcgctggctgtgctggtcactaccttccacaagtactcctgccaagagggcgacaagttcaagctgagtaagggggaaatgaaggaacttctgcacaaggagctgcccagctttgtgggggagaaagtggatgaggaggggctgaagaagctgatgggcagcctggatgagaacagtgaccagcaggtggacttccaggagtatgctgttttcctggcactcatcactgtcatgtgcaatgacttcttccagggctgcccagaccgaccctgaagcagaactcttgacttcctgccatggatctcttgggcccaggactgttgatgcctttgagttttgtattcaataaactttttttgtctgttgataatccccccnaccaaaacaaaacccaaaaaaccctgt

SEQ ID NO: 13341 - DNA, 878 bp, Homo Sapiens
  misc_feature (806)..(835): n is a, c, g, or t
tgtaaacccttggccctgttcttcgtagctgctgtgatatcccttgccgatgttttgtgccccctacattaagccggggcacactttctctggtgttggttcttgtggcacttcaggaatggttcacaaacagggggtttcccctcctaggcccttccgttgtgcgaacgctcttttgtcaaggccatgtaatgtgcccattttttacctggctgtggacaaaggttatctgctcttggccctctcggtgtgttgcggccccagagtctgaagaaatggcacagggacagtgaatggtagtgttgccaccctgtgctgaggcctgaggcctcttcctcagctttatctccctttccttcactcaagggccatttccccagtccctatctcccccatcccctcccggcttataggccccacaggtgctatttgttgtgctggcccaggcgtggggctaccaagcaaaggcttggcatataccaaaggccagctgcatgcccatcagtctggtctttttcctctgcggtcatgttggctttcatgctggatcaaatgttttactttcccagactggtggcatctgagttccccatcctaccactctcaccccactttcctgccccacctaaaccctcgttttagtaatttgtagtgactgttcccttccctctgttgcagggaaccaggaggaaagggaaagatgttgccatatttcctactctttaggcatggactctcctttccctttgttagtgtcctgggttcccatggactcagggatttgttggctaaggtttctctgtgcnnnnnnnnnnnnnnnnnnnnnnnnnnnnnnttaaatacacaaatatattgtacagaataaaaatgttttattg

SEQ ID NO: 13342 - DNA, 1332 bp, Homo Sapiens
gggctctcgccgtggcgggaaaacggcggccgcggcgtctcctccgggacgctgaggggcccgaggagaccgtgaggctctggcctgcagctcgcgccgccatggacgctgccgaggtcgaattcctcgccgagaaggagctggttaccattatccccaacttcagtctggacaagatctacctcatcgggggggacctggggccttttaaccctggtttacccgtggaagtgcccctgtggctggcgattaacctgaaacaaagacagaaatgtcgcctgctccctccagagtggatggatgtagaaaagttggagaagatgagggatcatgaacgaaaggaagaaacttttaccccaatgcccagcccttactacatggaacttacgaagctcctgttaaatcatgcttcagacaacatcccgaaggcagacgaaatccggaccctggtcaaggatatgtgggacactcgtatagccaaactccgagtgtctgctgacagctttgtgagacagcaggaggcacatgccaagctggataacttgaccttgatggagatcaacaccagcgggactttcctcacacaagcgctcaaccacatgtacaaactccgcacgaacctccagcctctggagagtactcagtctcaggacttctagagaaaggcctggtgcaggcggcttgctgggggatgtgagcgctcaggacgtgatgaggtactcgtggttctggagctctagaaacacttctgatgcatgaaaaatgtgtgatggtgcaaggaatggattcaggatgttgttggagaaacaagtttgtgattagtccttaaaacttagctccctgggacattcttcaattccacatctgtttctagaaaccagccctttttccccccacttttgagaaataaaaaagccttaggtaaataagtcattctccctagcagagccacttgggtctcctgcatggaagccatcacacttgggcaggtgttcagtgactggtaggtgtagatacagcaggagtggccatgtggtccacggctttttaccccttcttgatcctgatttcttgggctgaatttagactctctcacagaggtggctcacagagaaggatggcagatggtgcagccaacaatgctgaccggtgcttatcctctaagccctgatccacaataaaaatggaccccaactccatttcgcccctcccggttatatccagaacaaacatgttcggtccggcctccggcccctcgaagaaagctttcctaagaacaatttccttttgggccgccggcgggcccccagaaaaggtaaacgcggacacact

SEQ ID NO: 13343 - DNA, 1156 bp, Homo Sapiens
gggatcgcggctagagagatgtcgctgctgcggtcgctgcgcgtgtttctggtcgcgcggaccgggagctacccggctgggtctcttctgcgtcagtcgccccagccaaggcacacattttatgctgggccccgtctgtctgcctcggcctccagcaaggagctcctcatgaagctgcggcggaaaacaggctactcctttgtaaattgcaagaaagctctggagacttgtggcggggacctcaaacaggcagagatctggctccacaaggaggcccagaaggagggctggagcaaagctgccaagctccaagggaggaagaccaaagaaggcctgattgggctgttgcaggaaggaaacacaactgtattagtagaggtaaactgtgagacagattttgtttctagaaatttaaaatttcaactgttggtccagcaagtagcccttggaaccatgatgcattgtcagaccctaaaggatcaaccctctgcatacagtaaaggtttcttgaattcctctgagctttctggacttccagctgggcctgacagagaaggctcactcaaggatcagttggctttagcaattggaaaactgggagaaaacatgattcttaaacgagctgcatgggtgaaggtgccatctgggttctacgttggctcttatgtccacggagcaatgcagagtccctcacttcacaagctggtgctggggaagtatggggccctggtcatctgtgagacgtctgaacagaaaacaaaccttgaagacgttggccgccgccttgggcagcatgtggtgggcatggcccccctctctgttggctccctggacgatgagcctgggggagaggcagagactaagatgctgtcccagccgtatttgctggatccctccattaccttggggcagtatgtgcagcctcagggggtgtcggtagtagactttgtgcggtttgaatgtggagaaggtgaagaggcagcagaaactgaataggttccagagacttttggcccaggaggaatatttacttttagctctggacatcattacaaaaaggaatatttcccaaacctcttcagaccgagaatgcatgggtaaaattattaaatagttgtataataaaaataattttttccttgtttgcgtcaaaaaa

SEQ ID NO: 13344 - DNA, 535 bp, Homo Sapiens
  misc_feature (82)..(96): n is a, c, g, or t
  misc_feature (294)..(305): n is a, c, g, or t
  misc_feature (435)..(446): n is a, c, g, or t
ggatgtattatttatagaaaatattttctgttttaatcttttctttttaaacaaggactcatacttaaaaaaatgtttagcnnnnnnnnnnnnnnngttgagaacttttaatttattttaaggactgcaaatgccagtgtaattttttaatttgcagtttctgtaaacaacttgtataatagaaaagcagagaaataaatttccctccccttcaagatgcacctcatgtttgttttaaggtatagcatttagtccagatttgagaaagtttggggtgaacaaggtaagaaagannnnnnnnnnnnggcatcaaatctttctgcctgcctctcagcttgcttcagaaaatttaaaaaatcacaatagtaatcaaaacatacataacattgaaacagaaggaaatgctgtggaccacagaactccaagaattgtttnnnnnnnnnnnngtgctaccctgagaaaagtactcttaatactcttgaaatctttagagcaactttaaggcttgtaaatacatagaccaaatatttaaaaa

SEQ ID NO: 13345 - DNA, 1324 bp, Homo Sapiens
  misc_feature (533)..(541): n is a, c, g, or t
  misc_feature (585)..(724): n is a, c, g, or t
  misc_feature (728)..(733): n is a, c, g, or t
  misc_feature (740)..(756): n is a, c, g, or t
  misc_feature (802)..(815): n is a, c, g, or t
  misc_feature (853)..(899): n is a, c, g, or t
  misc_feature (1065)..(1075): n is a, c, g, or t
gggtggaccttgatacgactaagcggttacatatgtggttgtgcaaaagctttctgtttaatgcatagtgttaccgatttacatcttggttttcagtggcactatgtctaggaggcaatatccttttaaacagtgctttggctaagatagatacttgtgaatcaaagatagcacagaaatgaactaagtatatcccatttggaattatattttgatactatttaaaatggtttcacctgttaaagggccaacagaactcttggttttacttttgtaattactgtacagaaaatttcaagagtgtttgagtgcttgtcatcaggtgttttccttaataagtagggatatgatcatttacaggaattatatatgaaaaaagtttttgaaatgtatttttgtgatgtgctatgttgaggggaaaccaaatatttatgattttaaaacattcgtatgaaaacattgtacaatgtaatatgctcaactttctcaattttttgctaatttttctaagatacattaaaaatgttttatannnnnnnnnaagtaaaatggacccagtaagaaaattaaaaataccagaacatnnnnnnnnnnnnnnnnnnnnnnnnnnnnnnnnnnnnnnnnnnnnnnnnnnnnnnnnnnnnnnnnnnnnnnnnnnnnnnnnnnnnnnnnnnnnnnnnnnnnnnnnnnnnnnnnnnnnnnnnnnnnnnnnnnnnnnnnnnnncccnnnnnncgggcgnnnnnnnnnnnnnnnnnaaaaaatttttaaaacacctttgttggggggggcgccccccccagnnnnnnnnnnnnnngggggcataatttgttcctcaaaagaaaatcccgcccnnnnnnnnnnnnnnnnnnnnnnnnnnnnnnnnnnnnnnnnnnnnnnngcggggaaccacggagggtttttttacaaaaccccccccacggggggtctcctggcggggctttttttggggtgcctttctaaacaggggggccccttgcgcgggggtctcaataaaccaattattcccgccgcccccccgggggccctctttttaggggagaatnnnnnnnnnnnaattatctttattagccctttctcgccggcggcggcggggggggaccctcccaacccgggttgtgggaacattttatttccccgggggaaaccacgcggggccgggggaaatatttccccgggaacggggggcaaaaactcccttgcgcccttaaaagggggcaccccggggggggacaaatctcaaccttagaaggcgttccaccctctgcatttaaccggtacgggtctcagaaatctttcgaaggg

SEQ ID NO: 13346 - DNA, 1069 bp, Homo Sapiens
  misc_feature (762)..(762): n is a, c, g, or t
  misc_feature (781)..(781): n is a, c, g, or t
  misc_feature (814)..(814): n is a, c, g, or t
  misc_feature (823)..(823): n is a, c, g, or t
  misc_feature (840)..(840): n is a, c, g, or t
  misc_feature (856)..(856): n is a, c, g, or t
  misc_feature (906)..(906): n is a, c, g, or t
tcccccagagttcttcagacctgtgtctgatactgaatacagtgccatgggaccctgctccaatctaactgcctacaacctgcccgtccccctgctgcagggatgttgctgctacctcgggaggctctctgagactggtgtctggtcttagatgctgcacatagtacctggtgctagggtctaggggctgcccaaagcccagcaggaacagctactactcatcctgcagaggccttggcccagaccagctttccatccaaagcctcacctggtttccatgtccatctcaacagtctggccttcctgtgactgtagcctggcagccacaccctcagtaatcccgcacagtgagtccagcttctctgggagcttggccttcagttagcccagtccatgacagggcagggtaatgaggaggagtaaaggacctatcttctctgtccacataaggaagttgggaccacaaggtcttttatctccttgttactccccaaccccaccataaccgtcctacctcaggcacacaagctttatccgtggacagattaataaggtgaagcttcccccaaccctgcccaggaagggctgcgtgttatccccccctggcaccagaaccgaacagtggtaatcctcgaactgccccgcgggaatggcgcccttggataatgggaaaggaacctacccctcgctattggccgaattcacaatgccacgacgcgtcgcaaaaagataaaggacaggactgtgggcctccccccagtnttcctcggaagggcaaggnaacggcaaagtacaactaatcaatccagaaacncacaacttnctgcacagtacactttnctccccgcaaggaggnctaccacaattccccccattgcttttcaagcaaacgcctcctcctcgggnaagagaagcgggaaactttggccgcccaagcaataaatgcgattttcggccttttggcgtctatcaccccataaagctatgtcattggtcccggaccaccattaacctttctttcctgcgttcgccccctccggggaaccacgcgaagaaagcttttgtgcaa

SEQ ID NO: 13347 - DNA, 755 bp, Homo Sapiens
  misc_feature (270)..(271): n is a, c, g, or t
ttctggacgaatagatggctccatcgcactcgaatttaagagccttatgaggacacgctcttctggaacacgacttgtgtgacgccctgatggaaagtcgtggatttcgaattaatttgccgcaacctaacatgacacctttgctaaagttttcatgagaagatggtaggactgtagtagcaaattgctcctctttaagggacaatctgtgctgcttgcaaatgtgaaaactttgatttctgttcgcaatgctagtcagtgtcactctanncagattagccaagaatgtctatctaaatgcagaaacctattactgaaatccatttaaactaacacaccattctgggaggccctgctggtaaaattatatatggatgcagaagtattgcaagagtccattttccatttttaaatctgcaatatctgattacattgatgaattccgttgtattgtatgtgtgaatataaatatctgaattctcccgggggacttggttttcgtccaaggatgttggcagtggacacttagtttacctcaggaattgcaatcatgtaagactatattcggaaaaaatgctggagtatataattttggatactgatataaaatcatcaagatggaagttaagcagaattgtcacgtgtagtccatagcgcttttatatgcattattctgtaatttgtttgtactgcggcaactttttatactttcaatgtatcatttaataaaaaaaataagcaagtcactttggtgc

SEQ ID NO: 13348 - DNA, 546 bp, Homo Sapiens
  misc_feature (526)..(526): n is a, c, g, or t
ttacaccaccttctgtatctacttggggctcaaacttcacaatttcttttttcctatcagtttcgcctaacccattctcaacttttccattttctttattttagccttccatttctttccgtttctgtttctctgctctcttcttatcattttcttccttcaacacagcaagccgttccttccacaactctgcagacatctgctgtctggtctccatgtggtcttgcactgagtatgtcatgaggatccggtggcacagtgctgtcaagatctgtagcttctcctctgacgtcagctcaaaaaattcagaggtctccagcttttctaggaactcatcttgtacctcattatcctcaaatgcagctgaatctttattggcatctgtgtctgagccctcgctttcctcctgaacatcagatctgcgcaagcagagccgcaccagctctgaaacagaatgcagagtcaaggggatttccgacagcttcattcccaattcaccatagtcttctgctatctcatcttgtangagggtctgtaagaggatga

SEQ ID NO: 13349 - DNA, 709 bp, Homo Sapiens
  misc_feature (124)..(139): n is a, c, g, or t
  misc_feature (150)..(150): n is a, c, g, or t
  misc_feature (153)..(270): n is a, c, g, or t
  misc_feature (276)..(291): n is a, c, g, or t
ggggaggaaacccagccgcggggggtgtggcccgagttttgtttttggagaggtcattggggcggtgggcttttggcttgggggccgccgcggcgaaaaagggagtttttaaaaaggttttttnnnnnnnnnnnnnnnncgtttgaaagngtnnnnnnnnnnnnnnnnnnnnnnnnnnnnnnnnnnnnnnnnnnnnnnnnnnnnnnnnnnnnnnnnnnnnnnnnnnnnnnnnnnnnnnnnnnnnnnnnnnnnnnnnnnnnnnnnnnnnnntgttgnnnnnnnnnnnnnnnngaaagttcaaaaaaaatatttatttataaaaaatacaatgggataagtttatgctgagaaatgcagcaataaatacagttgaagaaaacagagcaactctacattgatacattggcacaaacaggaagagcaaatgcatcacccaggcctaaatgtccacaggccacttttgtacatgctcttttagaaacaccactctgaaaagatcttgttcgctaggtaagagaatgagtacacatataatcacaaatgcacactgatcatgactttatttaaaaattagcaaacaatactgtagaaacattgatatgtaaatttctaaaatgctgcatcttaaatttagttggcaaagaccacatttagcaataagcatgagtttagtcttccatgtagaaaccagatacactaaactgtaaaa

SEQ ID NO: 13350 - DNA, 338 bp, Homo Sapiens
tcaataaagcttgtgatgttggtccccaatcctacatcaagaaaatatctgcttttaaccacatttgtctcagggtctttgagtttcttgatacaaccttaatccaaatcacaggttgttctggcagattcaagaactcagaacagcttaaatgtggcccgggaaggcaaaagactggcagttttataaccagtcaaggagaagcagggagtctctggcagcccagaaggggacaggcaccatgctgacaagagatgggatataaatagaaaggaagaggctctcagtcaacattcttatcttcacaataaagtcttttaacatgataggtatatgtt

SEQ ID NO: 13351 - DNA, 602 bp, Homo Sapiens
  misc_feature (183)..(199): n is a, c, g, or t
agacaaaccctaccttgagaactattgtacatctggcatcaggtgctcaataagtggaagcagttgtattctctgttaatttcattataaccaactttgtttactccctataagcttgaggacagggacaagactcagacttctttctcccttctcatcattaccctgcattgagcctggccnnnnnnnnnnnnnnnnntccatattcactaaaggtttgatggacaaatgaaaatggatggacaatggaaaaatgaaagaagaaatgaaggaattaatggagtcttcaaggtgtcacatagagagcttgactgctggggagaactgacaaagtgttgatgctgccatgcttactcctgtggctgtgtttttggagtcagtctttcccatctgctattctggcttatgaccaggaggtaatcagatgccagcaccttcatctgtccagactgactaacttgatgaatgacagggttaggggcatacctgccttgtttcggaactggaatttctcatttccaaattgacagtatctttaactgttttgttttttaactgtaaaagctaatatgatagatgaataaagtgaaatgacaagaagt

SEQ ID NO: 13352 - DNA, 545 bp, Homo Sapiens
tcatatttagttaactaaaacccaaaaatttggtacgtaaaacataatgcatattcctagagtgccaatggcggtatttttctgtattgtcatatccctaaagtcatattttgtactttattgatccaagggcacacttttcctcccatgtttaacatgtctaacacagggctacatcttaaaactaatgttgtcttgcagttatattggcagctttttccccttagtgggacataatctaatgttgaatcttaaaaatattgatatctcaaattcagtgaaatgggaatatttgggggaaaaatctttaaacaatacaaaaccatagactgtaaaaaataagtcttccttgatgacatcctaatctgctgtcctccccactggtagccattcttaacaattcagtggatatccatttctatgcattgacaaacaggaatatttaaaaaaatgtacttacaagcaaacgtgtcatatttgtaatctttaaaaatgcacataagatcataataaatattattattctgacctgctttctttacctg

SEQ ID NO: 13353 - DNA, 491 bp, Homo Sapiens
attttttggcaaggcccaccaagattttgcccttcttaagttgggacttgaatctcctgggacactccaaaagccccactgagattttgattgcaactcttgttttaaatcagtttggtgaagattaatgtgttgattatgttgagcttccaattcataaatacgatatgtttcttgatttattttggtctttaattactcctagcagagttttagtttgcagtgtacatattttactaagaattttataactgaatgctaatataaatggtatttttaaatttcttgttggttgctaatacatagaaatacaattaatttttgtatattggacttatgtcctgtggctttgctatactcacttattagttctagtagagttcttaggaattttttcataatgggtcctgttatagttgtagagttcacaggattgtcttcacagtggatcatatcttcagcaaataaaaatagttttactttttcctttc

SEQ ID NO: 13354 - DNA, 453 bp, Homo Sapiens
gatggtgcaaagcattgtgctggaggcctccaagccaaggaagggccacagggagccctgaggtgggctggttcctgtccaaccagctccctgggcagctccccaaatgggtaaaactgtgcagctggacagcccctaaccctccttccacccttcccccacccgccctctccagcacacactctcctctttaaccccacaaaagagcctggctctgccaggttaatcattcttacaaatgcagacgctgggggacacgggtgcagccttcacatatctgtggggctgtcatgtggaagagggagctgcgccgtggggggcaggccagggaagctgtgggggcaggtgcagctctgtttggaccacctcagaaagaaccagctatgctggggggatgttaatctccctgagcctaaaagtggacaatcccatgaataaaacatttgccaatgc

SEQ ID NO: 13355 - DNA, 962 bp, Homo Sapiens
agcaaaacctagattactgttttctaatgatgtatgctcaagaaaagggcatatattacattcagcttgaagatgatattattgtcaaacaaaattattttaataccataaaaaattttgcacttcaactttcttctgaggaatggatgattctagagttttcccagctgggcttcattggtaaaatgtttcaagcgccggatcttactctgattgtagaattcatattcatgttttacaaggagaaacccattgattggctcctggaccatattctctgggtgaaagtctgcaacccctaaaaaagatgcaaaacattgtgatagacagaaagcaaatctgcgaattcgcttcagaccttccctgttccaacatgttggtctgcactcatcactatcaggaaaaatccaaaaactcacggataaacattatatgaaaccagtacttcttaaaatccatgtaaacccacctgcggaggtatctacttcattgaaggtctaccaagggcatacgctggagaaaacttacatgggagaggatttcttctgggctatcacaccgatagctggagactacatcttgtttaaatttgataaaccagtcaatgtagaaagttatttgttccatagcggcaaccaagaacatcctggagatattctgctaaacacaactgtggaagttttgccttttaagagtgaaggtttggaaataagcaaagaaaccaaagacaaacgattagaagatggctatttcagaataggaaaatttgagaatggtgttgcagaaggaatggtggatccaagtctcaatcccatttcagcctttcgactttcagttattcagaattctgctgtttgggccattcttaatgagattcatattaaaaaagccaccaactgatcatctgagaaaccaacacattttttcctgtgaatttgttaattaaagatagttaagcatgt

SEQ ID NO: 13356 - DNA, 461 bp, Homo Sapiens
gcgtctattcaactttctgacagaaatctgggacaactactgtgggtggatgagaaaacgataatgaaggaaagtctggcagtggtgtagtgaaaaaagtcttttcaaatcacaattgaaattgttagatgagttaagtcactgaagaagattccgtttaccttaggcatgatttttttatatatatcattcaaagagaacaacgtgggcttctgtgaagtaatggattcttaaattttctaatcagaattcttatctgccaatttaatctaatttacatcagcagcgtaagattgatgctttggcaatatatcgtcaatcaaaagaacccaggactctctatcagaagagctggattctaatcctaccccaccagacatgtattccttgtactgagcaattcgtataaccctatcacaaccctttccccacctgtaaaataaggctattggcttggataa

SEQ ID NO: 13357 - DNA, 553 bp, Homo Sapiens
ttcggcctccgctcgcttctccctgcgcgctttcctgctcccctttccggctacagccctggggtcgagctctggtcgaagcgcattccgcctctcctttggccctgcggcttcctttgcaacccgccgcccacccttgctctccgtggtttacccctgggctctgaggcctggtggtagcggccactgccgcggattggctgttgcggacccggggcggggcaggtgggagaggctcgttctccgcgggtttcgttgtgtttcgcgccatgtcgtttgctgagagcgggtggcggtcggctctgcggcgccgcggtcccggcaccccgggccctgtggctcggccatcgtattcctcctttactcagggggacagctggggtgaaggcgaagtcgacgaggaggagggatgcgaccaagtggcccgcgacctgcgggcggagttctcggctggggcgtggtcagagcccagaaagcgatcggtgctcccgccggacgggaacgggtcgcccgttctgcccgataagcgcaatggtatctttcccgcggccgc

SEQ ID NO: 13358 - DNA, 125 bp, Homo Sapiens
ttacctactggggtcttagtgttgaatccgaagtgaattttttggttttcaactttacttcccttttattcttccttttaaaagatgaaaaaagaaaaaggccaagtgcagtggctcacaccttt

SEQ ID NO: 13359 - DNA, 283 bp, Homo Sapiens
ttgccacgcaattctgaataaagtttattaaataatatgtacagcaaatgtagtaattcaacacatctatttatcaaatcaatccactgcaatgaagaaaaataaatgaacagaaaaatctatgtctgcataggacatgctctcagtgtgtaatttaaatggcaatactttaaattaattggttatatataatgtcagttatttttctttcagaatataaccttttttgtagtaaccttattctagcaataggacttaatacgactgcagataaataggactg

SEQ ID NO: 13360 - DNA, 345 bp, Homo Sapiens
gaagcagccagaacctctggagaaacccagccgccccaaaacttccttcaactggtttgtgaacccgctgaagacctttgtcttcttcatcgtggcgccggtactggcgcaccctggtgctgctgctactggtgctgctcaccgtcttcctcctcctggtcttctacaccatccctggccagatcagccaggtcatcttccgtcccctccacaagtgactctcgctgaccttggacactcacccagggtgccaacccttcaatgcctgctcctggaagtctttcttacccatgtgagctaccccagagtctagtgcttcctctgaataaacctatcacagccaaa

SEQ ID NO: 13361 - DNA, 371 bp, Homo Sapiens
tcctatggttagtgcttctgagaaatcttagatcacctcagtgtcaaacagatacattatcctatgctcactctaggggctttatctttctaacatttctgttgaagcccatgatcctctcaaattaactgttgtgtgctttacaaggtaatgtttgaggttcatttttctacatatggacatccagttattccagcatcatttgttgaaaacgttcctttccccattgaattgtcttggcatctctgtcaaaaatcagttggccacatatgtatgggtctatatctggactcaattctgatctatctatggctgtctttttgccaatacctcactgtcttgattacaatggcttttaaaatctttttgtg

SEQ ID NO: 13362 - DNA, 225 bp, Homo Sapiens
catttcttcaggatttccagagcgtgcacagttttgagcagaaaaacgcactgctggaggaaaaggagagaactggaaaattccagcaagctgtcatagacttgatctgggggaggtggggacccactgagaaagatgacaaggtgaacaaagatcagcaagtgattcggtgcacccagcaaacttagaatagatttacttcaagaaattcataaatgaaaaaaa

SEQ ID NO: 13363 - DNA, 434 bp, Homo Sapiens
ctccacccagatgaagaggcctggctcccatacagcagaccaagcttcctgtcccggggccagggcaccagcacatgttccacggccggcagcaactcttccaggggctccagcagctcataggggctcccggggccctggccggagccggagtcggagtcagagccggagccagcaccaaaggccaggacagaaacgccgagaggaaccaagatgacccttgttggggcattgagaatatcatgagtgccacggggaaggggagtagggatgtcttttcccccccagcagtgatgagtggggctagctgaagcccattggtttccacgatttcaattggctgagaaggcagagagctagctcctccctttctttctttttccacctgagacttgtttataaaaaacaaaacaataaaaagagtctgatcagag

SEQ ID NO: 13364 - DNA, 647 bp, Homo Sapiens
  misc_feature (57)..(81): n is a, c, g, or t
tctacaggagaaggcaaggggtaggagaaaagggctggagggccccttatttgcagnnnnnnnnnnnnnnnnnnnnnnnnncataactccgtaatgaaaatgtattttacggtatgaaggttacagaactgcatctgctactgggtcacggctacaggtctatgagctgatccaccagcagtaaagacctggctaggttgggaagactggactcagagctcccactgctgtttctagagtgcccaccttgtgggtttttggttatcaatacaggaatagggtcaaactcatcttcagccaccttgtccgagccctcagggacatcaaaacctgagatgagattactatcttctgcagctttatggactggagcagagattgctgtgggggcaaactcttccagaaggtcagtagtagggttagagagcagagagcaatcaagcagggaatcttccccggtgagagaatctgtgcgattcgaggtcacagattccgtctgagatgggaggcgctggggaactgggggctccagtcctggtatgagactctcaacagcaacatcagctttttctttcgtaacagagcattaagaagaggaaagggtaagggaaagggagtcagaagtttctttaggaaaatctgtgaag

SEQ ID NO: 13365 - DNA, 877 bp, Homo Sapiens
caggaaatgttttttaatcatttagtgaggtgattcatttgtttcatgggcaaacactatccaggaaaagccttgcttgcctgtttcccaaagagctctaagaaatagaatcaagtgtaaaatggttcagaccattcaggatttcttgtcactcttctcaaccccgatcttcctgttattactgatgtttgaaaccctgtcattagccccggcctggttaaagcccctcagagtcacctctcattcatagcaatagaattcaaccccaagtggttgatggtgtccccagcacagccgagagacctgatctctggattcagtgcttttagctcttcgagtttaccctaagataccttcgggcaatatttttaaccaacccaaaagctcttcaggtcatttctgaagaggacaaggtgaatcttggcttggaacaccatttttgggctcttgctactgaatgaatcagaaaggaattttttctgaagagcattagaaagtaaaggagatgttaaaataagttcttgaagtatgttttatatttatctaaaacactgattttaaaagtttacattcaaatgtgtattcaaaagaagtactgattggtaattattatagttagtgtgtatcatcccttttaaccgtgcctaacaactgtacttaaatctagtattctagtgtaacaaatgtttcccataagattttctagagccaaataatgggagtgaaaaattccttaagtgtgatataagaaaatatattagaaaatcagctttggattatacgatttctaaaatatactaatacagaatcctcagtaatatgttttgaattggattttttctcagaactgttacataataaataataaaacaaccag

SEQ ID NO: 13366 - DNA, 385 bp, Homo Sapiens
gaaaaactaggaagttctttcacagtaatgcctagttgttccaaatttgctatatttggaggtgctctactggtacttcctgcttgactctctgacctgtgggatgcacattcttcctcagcgctttttccttgttgtggtgacgtacattcactatctgagagtgaaagaccacacacacccctctttttaaaattattgtatctcttccttttcactttggtttgaacaaagatagtgtcaccttgttccgtgaaaaagaaaaagcataaacagtgtatatttagggtatatgggtgatagcttatgatgtgtgtcaatcagttctctgaatcttttactgaaactgagacaggaaaataaaactgaaacaaatcataaaaaa

SEQ ID NO: 13367 - DNA, 472 bp, Homo Sapiens
catcctccacaggactcgctcttcccagctccaccctaggggccgactgccaggccagtggctgggctccgcgagaaggcacagcaacccgtctcggccccgcctcctggacctactgacagggcaccgggggcgtggccttgggcccgcgacgtcaccgcgctcaccgccgccgccgccgccggggttttcgctgacgcacgggtcccgccccctccccctcttttccctcacagcccgggcgccgggcggcgagtgcgttagtcggccgggacgcggagctgtgtgcatctcctacgcgggctcgctcgctcccgggagccgcgcagcttccccggcggtggcaggagcggcgaagagcgccatcagcgggcccttacggccccaggcctcgcggcgcgcggtccgctcgccctcttcgtccgcccaacctgcggcctgtggaggcgtgaggcgacgacaggcgagcgcc

SEQ ID NO: 13368 - DNA, 482 bp, Homo Sapiens
gctggagcccattcccagtgcttcccaaggccctcggggacatctaccgccaacccagctgcttctggcaggggctccaagccccagcgtggggaagggccctggagaagccctcatcctcatgggaaccacactgcagtgggtggggaaggttgttgtcagcaccgcccccggctcctccaggtcctgctggctcctcgggggcagggttccctggacctcccagttctgcgccttggggccagccagtactcagagaggaggaccttctcaaccacgtacagaacacgggttttcatggctgcctttggtttggttttctgagaagataggattggattggattttgcagagggtgagaacttctctgtgcctgctcagaggcgccctagggaagggccatgtttgagttttgctttgtatgttgttttgcaagtatctgcctggtactttgatttaaaataaaaacaattttcataaaa

SEQ ID NO: 13369 - DNA, 535 bp, Homo Sapiens
agtgaggaattctaagtgaacattccttatagaaacctttcacatgaatgactataaactgaagctttaaatgagctgtgaagtgtgttaaaatgtgttttgatacagtaatatataaatatgtctatatatatgaggaacttgtgttttttaaatggtggccaggtagaggaactagaaaagagattttgttgcctgttttctgaccatctgtgttattgtcactgagaaactaaaatagtaaatttactaaaactacactgcaccatgttagtaataaacagatctgccttaaagaaaagaaaattttagaaagaaatattgttgctcagtgttgttaatatagctcaagaattgagtttatatttgcagtatgctataaatgatacccccctaccacacccacacacacagtttttgtctaatgaaaatgttgctgtgattatttataattggtagtatttcttccagaagaagctaaaataagactggcacttaccctgaagtgcattaataaaaccacactttaaaatta

SEQ ID NO: 13370 - DNA, 464 bp, Homo Sapiens
tttctgggtgttggtaatgcaagtgttttttattttcttcttaatcctgtacaggcgggtttctggcttgggcgatggagtggacagatggcagagccagtgggatttctccagggctggactttctccatgatctcaaagatctcagccaggacaggcgccaggtgataggggaaggagtcagaacagtggggagggcagctcgttcctgagcaacagtcatgagtgaggttctgtgccaggcactgtgaaggtccctgaggctggacagagaggtcccggatgacagagacacctggctacagcacctggacactcccaagcttcaacccacagtaacccaagctttttacctggtctctgagatagcaccttgagggggcagcatccacttttctggctcactctggcccagcaggggtagaggaccagtgttgacctggcagaatctttcaaaagctggg

SEQ ID NO: 13371 - DNA, 459 bp, Homo Sapiens
gaccagcctgtaccttgctgtggggctacaggatggtgggcaggatctcaagccagccccctccagctcatgacactgtttggcctttcttggggaaaaggcggggtattcccactcaccaaccctaactgtcccatggggaaaccctggagccatcccttcggagccaacaagaccgccccagggctatagcagaaagaactttaaaagctcaggagggtggacgcccacctccgcctgctgggaaaagctcccctccacaactgcagctgatgcataggactaccgcaggcccggactcaccaacttgccacatgttctaggtttcaacaacaaaactgccaggtgggtgggttctgcctttaacctggaccaaaaggaaatgaggcccaaggagcttacccaaactgtggcaaccgtcccaggccacccccatggaaacaataaaggtttttcctt

SEQ ID NO: 13372 - DNA, 372 bp, Homo Sapiens
tttcggggggagaaacccccaaggcgggcggcggtgtcctcatggcgtggtttattacaattccatctcacaaggcgggtgggcgggtggcagcggcacacgaaatccaagcccctgacagacgtctgcctcgggcgcatgcaaacagtgcaacatggtcaagcgcaaacacggggcgaccgaggagacacgggacatgggacacagaatggggaatgaggctggggcgaggggtccctaaagaggggcccggtcccccccaccctcacgggcaggacaggaaaaataagattcgtacttcttgtaaaatgcccatttgctgggtactttctttctccttatcttgaaaaataataaaaaataaacacacgg

SEQ ID NO: 13373 - DNA, 1043 bp, Homo Sapiens
  misc_feature (143)..(143): n is a, c, g, or t
caaacattacctctaacaggtaaggtttcccttcagacatgaacaacaaggcttctacctcctcatggaggggcaacagagggcttgagggagcaatgctaatgggtggtcgttgcttaaatatgccaggagcaacattcctntgggatgagacatctgaatgcaaaacaagtaacgccactgtattgtgaagattcccaaattctcgtgcttgtgctgaactccatcgacgtatctgattgttttgccgactggcccctaggaggaagctgatcatgtgccgcagagctgaatgcctcagaagaagatctccagccctaattccttgcttttgtacaaaagtgttgaacaggaaaaagtactgagcacagtttttacaattttctgggacgtctttgtccaacagagcaagtagtacctccagtaactgatgaaggctttttaacttatcctgataaaacaaggcactgtctagggttttctccagaatggtggccacagcaactcgtacttctctcacattgcactccagtaagaaaatcctgaaagaaagagaaaggtggtgtgaaaaagcaagatacatttccacaacctcaaccttcccatgataggtcccatctaatagccaagaaacaaaagtagagtctcctgacagtgttagcgcttatgggccaagtggagctttccaaggtcacttcacttctgcttattcctgctaactgtaatgccacataccagccaaggctctgttcaaaattcactaagactctatgtggcaactatgagaaagtttaaaagataagaagtactcccataatgttcagctctagaggtacaatcagactcagctgcaattctcttgaagggaatacctagaggatgcaaacagatccagaatatggggagctctacagagcaaacagtctacccctcaaacaaatggcacagcatacaaggggcagggggacaaaggaatgactgatggtcagaagagccttaagagacacagaaagcaaaggccatgtgtggacctcactgacctg

SEQ ID NO: 13374 - DNA, 999 bp, Homo Sapiens
  misc_feature (162)..(162): n is a, c, g, or t
  misc_feature (167)..(167): n is a, c, g, or t
  misc_feature (702)..(789): n is a, c, g, or t
actggcggcgagtcctgtgatgagctggaggaggactggatcagggaatatcacctatcacttcagatcaacaaagacaactgtacaagaggaattttgacactggcctacaggaatacaagagcttacaatcagaacttgatgagatcaataaagaactcntcccngtttggataaagaattggatgacctatagagaagaaagtgaagagtacatggcctgcctgcctgatgaatacaatagacctgaagcaagtgaagggatctgcagattacaaaagtaagaagaatcgatggcaagcagttaaagagcaaattgtcacacatcaagaagatggttggagactatgatagacagaaaacatagaaggctgatgccaagttgtttgagaaattaagtatctgacatctctgcattcttctcagaaggcaaatgactttggaccataaccccggaagccaaacctctgtgagcatcacaaagttttggttgctttaacatcatcagtattgaagcattttataaatcgcttttgataatcaactgggctgaacactccaattaaggattttatgctttaaacattggttcttgtattaagaatgaaatactgtttgaggtttttaagccttaaaggaaggttctggtgtgaactaaactttcacaccccagacgatgtcttcatacctacatgtatttgnnnnnnnnnnnnnnnnnnnnnnnnnnnnnnnnnnnnnnnnnnnnnnnnnnnnnnnnnnnnnnnnnnnnnnnnnnnnnnnnnnnnnnnnttcctgcaatgaagtctctgaagtgaaactgcttgtttcctagcacacacttttggttaagtctgttttatgacttcattaataataaattccctggcctttcatattttagctactatatatgtgatgatctaccagcctccctattttttttctgttatataaatggttaaaagaggtttttcttaaataataaagatcatgtaaaag

SEQ ID NO: 13375 - DNA, 430 bp, Homo Sapiens
  misc_feature (68)..(158): n is a, c, g, or t
cacaagagtgaaactccgtctccagaaaaatataaaaacaaccacaacaacaacgagggccccgcatnnnnnnnnnnnnnnnnnnnnnnnnnnnnnnnnnnnnnnnnnnnnnnnnnnnnnnnnnnnnnnnnnnnnnnnnnnnnnnnnnnnnnnnnnnnacatgcagagagctgatcaaaacagcaaaagcaaagcagtgcccctggcccagttctgaagccaaccttccttaaccacgcagacccatccctggttaggacttgctgtggattctcaggtgactccatctcaggatacagggactgagagggtatatgcaatatctcagacccagaaaccgttgattctgtctaaaagcacagcaataaccacatcccaccctcttgatttaaatgaaagtgtttgggagaataaaagataaaccttttta

SEQ ID NO: 13376 - DNA, 508 bp, Homo Sapiens
ttttaaaatggtagaatttattttaatataatgatatatatgtgtccacatatactattttaaaaataagcatgtaaattataatcattataaaacataagttagtcctaatttaatattatcagagtaaaagagcacatatagaagtcagtctaactttgttgcacttgtcttttaaagttagaatacataaaagatttagcacgttgtattttatcttatttcagttttcatgttatcatcaactataaatacccttaggaatgtaccaccttataacttacattgaaatagccaatatttcttagtagttattaaagtaccattaaatcacctaaaacaaataatctaaaaaaatactagtttaaattaaaaccctgaggaattaaaatttgttttacacaatagttttggttaagtgcaatttcatgtacatactactttgtttaaggatgtacttggtaaggcatagtaaaaataaaatctacgtaagtaacaatctaatact

SEQ ID NO: 13377 - DNA, 504 bp, Homo Sapiens
ctgatcggagacaatgtattaatcagaagtgtaaactgccagttctatatagcatgaaatgaaaagacagctaatttggtccaacaaacatgactgggtctagggcacccaggctgattcagctgatttcctaccagccttggcctcttcccttcaatgtggtttccatgggaatttgcttcagaaaagccaagtatgggctgttcagaggtgcacacctgcattttcttagctcttctagaggggctaagagacttggtacgggccaggaagaatatgtggcagagctcctggaaatgatgcagattaggtggcatttttgtcagctctgtggtttattgttgggactattctttaaaatatccattgttcactacagtgaagatctctgatttaaccgtgtactatccacatgcattacaaacatttcgcagagctgcttagtatataagcgtacaatgtatgtaataaccatctcatatttaattaaatggtatagaagaa

SEQ ID NO: 13378 - DNA, 594 bp, Homo Sapiens
  misc_feature (491)..(531): n is a, c, g, or t
atgtggtcgatgccacgcccctggaagtgttcttgctgtctcagcacctggaagaattcctgcctatcttcaagagagagcagattgatctagaagctctgctgctctgctctgatgaggaccttcagagcatacaaatgcagctgggtcccaggaagaaagttctgaatgctatcaacaggaggaagcaggtgcttcaacagcctgggcagctggtcgacaccagcctgtgatggagagttttggcctggagcattggggtgatgctgtggcccgctggcagcactccaggcggcaccccctctttacccaatgccagaccactgggaatggattctagggcatcggaaatgcctacctgagagagagacccaaactttactctgggaggtaggctatgcccatccaaataaatctccatgagaaacttgaggagacttcataacaagaatctggcatttctcttcagttatcttatatgtacatataannnnnnnnnnnnnnnnnnnnnnnnnnnnnnnnnnnnnnnnnggagatgaaggtctcagtctcttacccactgcactctagcccaggcggtaagagagactccat

SEQ ID NO: 13379 - DNA, 444 bp, Homo Sapiens
cctgtttttatccgccccacatagcctctccttcttcggaacaatgggcgtggggtagaaagctctttcagtgaagggtgttctagcagctcagttaacactttactctccagtcaacacttgggacatataaaaatgccattgtaactactgtagagtcctgtgactcatcgtttgtgtttgtcagtgtgcagttcagcttagcccttccctgttcctgtgtagttacaatctggccctgaagacatccgaggcacttcagtaagtgggatcttttctagagatcctgggtgactttgggtgcacagggtgaccgagcatttctgcccctgtgaatgtggcactaacactgtgcactgtctccaccaagcaaggtttccactgagtttcttctcatgttactgggtttgtaaatgaataaacacattttaactactcttgcaa

SEQ ID NO: 13380 - DNA, 483 bp, Homo Sapiens
  misc_feature (122)..(153): n is a, c, g, or t
tttacatttaaatatttatgtaaaatgtataatttggtgaggtctgacatgaatgaactatgaccagtcaagacacagaagataccacggcactgtggggctctgcaaccaggcctcctcgnnnnnnnnnnnnnnnnnnnnnnnnnnnnnnnnggcacccgtgcatctgcgggctgcacttaggtgaggtggtgtttcctggagttttacgtatgtggaatcacagtgcgcactttctgtctaaccgcttgaattcattcaccacggaggctgggagactcctcctggagcgtccgcagttccttttatcgctgagtggttttccctggtgtgtctccagcacaattgtttatcccttcagctgtcgggtaaatttaccaaaagatactgtttgttgacttatttttaaatattcttatgtttattttagcctcgggcaggtgtgcaggctttgttgattaatttttaaatatgctaatgttt

SEQ ID NO: 13381 - DNA, 337 bp, Homo Sapiens
  misc_feature (153)..(164): n is a, c, g, or t
cacccgggaaagaggtgagaggatgggaaggagcagccaggcgtgggaaacggcgagatcctcgggctgggggtgcccacgtttgctacctcccactgtgaaatcgctggtgctcacaattgtctctcacagtgtatgtgatttttttaaggnnnnnnnnnnnntccctatttaagattctgaaggtgctaccattattttgccacagactttgaagaaacttttggatgtggggcatcatccgcatctttctctctcctccaaatgacaaagtttggggaatttttgaattttcctagcatcgcccttgtgctcatcaggtaatctgctaaggagg

SEQ ID NO: 13382 - DNA, 507 bp, Homo Sapiens
  misc_feature (54)..(67): n is a, c, g, or t
ctttcaaattgtaatcttttctaacagagatattttaatatacttgccttcttnnnnnnnnnnnnnnctactgtcagtattaatactgagccagactggcatctacagatttcagatctatcattttattgattcttaagcttgtattaaaaactaggcaatatcatcatggatacataggagaagacacatttacaatcattcattgggccttttatctgtctatccatccatcatcatttgaaggcctaatatatgccaagtactcacatggtatgcattgagacataaaaaagactgtctataacctcaataagtattaaaaatcccattattacccataaggttcatcttatttcatttttagggaataaaattacatgtctatgaaatttcaattttaagcactattgtttttcatgaccataatttatttttaaaaataaattaaaggttaattatatgcatgtatgtatttctaataattaaaaatgtgttcaatccctg

SEQ ID NO: 13383 - DNA, 385 bp, Homo Sapiens
cagagagactttactatcgtctcttgaaaaatataaaccttccttaggatgctgcccactgggagaagagggaagactcaggggaaaggattcctgctcagttccacaagttgtcgaaatttgcttaattagcaaaaactgaatttaaactccacactgtccacaaactcagcctctatgttctcagtgacccttttgtattcactgctggttcctctaccatctccacttccttcccatcaaagtaagaggaccccaagccttggctttgagcaaggaggtcttatttatttgctccattccccaactccggctctaaaatcacagggggaaaaactccaaaaacagagcaaagaaaatttttaaggtcccttgtctccaaaaa

SEQ ID NO: 13384 - DNA, 507 bp, Homo Sapiens
aggcttgcctggcagtggcagggaggtgtggctgccagggccttagaggttggcatcaggctgcccaccccagtcactgccagagcctcccacctgagtgttcctcccggcactggaagccagtggccgtccagaggaacgtgattgaattgctgtatatccatctggtggagcactgctgtgtgtctgttaaaaaagaaaccataggtttttagggatatgtaatgatatttagaaagggtttaagagacagtaaagcttggcagaataaaccgtgtatacagaatggatgtttgcttgcataaataaatttatataaatatgtctgggggataaaaataagtatatcacaatgctaagacaggcatatggggaatttaagcttttctttatacttgtccatagtttccaatttttaaatttgtaattttttatcagaaaaataaatgtgtaaatatagtggaatctttattaaaacattcacttttatatgctatttcagaaaaa

SEQ ID NO: 13385 - DNA, 555 bp, Homo Sapiens
agcgggcattaaaatgaaactatgcacacagcacacacgatgccactgattatataggacacgaccacatctaacctgagggcgacaccactgctgacacactggacctttgaatgatagatgtatacaccttcacaatatgcacgtacagagaggcaagctccggaaagagcaaaaacaagattttcaaatacagagtgtggccagggccagagagaattaaagagagattggaatgaggactgtcatgattcaaatcaccaagtagaatgaaatcttgcttctgtatttgcctcatgccaaaatgccctgcatatcctcaacagaaaatcccaacccagtgtgttcatacatcacactctttagttctaactggtaaaggaagggataaccaagtagtatttggagcaagttcctgaaacagtgtggtttaacctttcaaaaatgaaccctatgtctggttcaacattcaagttatcatgagtgcggacacacacatactatccacacactaacgggcaaagtgggtttctgtactacaacaatattcgtagc

SEQ ID NO: 13386 - DNA, 509 bp, Homo Sapiens
gactgccggcaagcaagcggggaggtggcgaacagctgggatcctccagtgaaaagtttgctcagcgcgagagatgtcaagaggctgggattgtcgcctatcgggaggtggggagctctctcactcacacttcctgggaaatgaaggagaactaataggcagcccgcatttgcagccagccaacctgggtggtatttccttgaagtgaagcgctcataaatcccttctggggccagagccggtttcacaagctgcaggatttgggtggcctgcctgctctttgggagcgggcttgggaagctgaagaaattgaatcaggacctcaggccctttacagactcccttctacacttggttgctgattaagaacattatgtggcatttaaaatggcacaattatcttccgttggccgttcctagctaaaagtagactcctatcagcccgtgactgacgacaagaaggctcttcgtccctgtttttgaaataaacatgggtataatctgaaaaa

SEQ ID NO: 13387 - DNA, 600 bp, Homo Sapiens
tctcagctccgataagccagataggcagataataacaacacagtgtgtttgggcttaggacggaggttatgggagcctgaactcagcctggttggagaatacttcctggaggaaatagctgaagctgggaaattgcacttggtgggggagttataaagcatgcataaagggccagaagtagtgaaacttgatatcgttcagaaaaccagaaacagattgcatagggcatgtttgagaagctgagccatgaggcgtaaatcctggagatggtggtggagataggaagaaacggacaaagtggacaaaggacaaagctctaggatgatggctgaggggtagaagaaggggcaagggagacagaggtcttggagatgacgcccatatctctggcatgagcaacccagatggcagggggtggggcctggtttgtgggaaggggtgtcccactagcagatgtgtacccagtggaggtgcagctcagattggagctggccatgggtatttgaaaatcatgtgcgcacaggtagccactgaagccatgggagtgaaagagaacacttggaaagtgaactctgggaaacccaatttattagggataag

SEQ ID NO: 13388 - DNA, 810 bp, Homo Sapiens
cttccagtcgctcgagagcggagagcggcaccatggccccgcgggggcggcggcggccgcggcctcacaggtctgagggcgcaagacgttcaaagaacactttagaaagaacacattccatgaaagataaagctggtcaaaagtgcaagcctattgacgtgttcgactttcctgataattctgatgtctcaagcattggcaggctgggtgaaaatgagaaagatgaagaaacttatgagacctttgatcctcctttacatagcacagctatatatgctgatgaagaagaattctccaaacattgtggactgtctctctcttcaactcctccaggaaaagaagcaaaaagaagttcagacacttctggaaatgaagcaagtgaaatcgaatctgtaaaaattagtgcaaaaaagccaggaagaaagctcaggcccattagtgatgactctgaaagcattgaagaaagtgatacaaggagaaaagttaaatcagcagagaaaataagtacacaacgtcatgaggttattcgaaccacagcgtcttcagaactttcagagaaaccagctgagtctgtcacttctaaaaagacaggaccccttagtgcccagccctctgttgaaaaagagaactgggcaatagaaagtcaatcgaaaactcagaaaaaagggaagatgtctcatgacaaaaggaagaaatcaagaagtaaagccataggctcagatacttctgacattgtgcccatttggtgtccagaaggaatgaaaaccagtgacatcacggagttgaatattgttctgcctgaatttgaga

SEQ ID NO: 13389 - DNA, 390 bp, Homo Sapiens
  misc_feature (146)..(154): n is a, c, g, or t
gggccggggctttggcccccaacgtgtttaggagagctttctccctagatcgccctgtgggccggggccctggagggctgctctgtgttaataaaatgtaagggtttgccctcctcacctgttgccggcatgcgggtagtattagnnnnnnnnntccatctgttcccagcaccggaaaagggggtgctcaggtggaggtgtggggtatgcacctgagctcctgcttcgcgcctgctgctttgccccacacgcgaccgctgcccggccgcccaaagggctggatgcctgccggtccccgagcaaacctgggaactcaggaaaattcccaggacttgggagattccaaatcttaagggcaattatttttaataaaaggggcctttggaatcc

SEQ ID NO: 13390 - DNA, 516 bp, Homo Sapiens
cgcccagctgcaccatctgctcagccactatcagctgggccctggccgcgggccgccagccgcgtgggaccctccccctgcagagcgggaggctgtggacacaggggacatcttcgaaagcttctcctcgcacccgcccctcatcctccccctggggagctcgcgcctgcgcctcactggtccagtgacggacgatgcctgccaccgtgaactccgtaggctccgccgcctcctctgggatcttgagcagcaggagctgccagccaattatcgccatgggcctcccgtggccacgtctccttgagaaccaataccaaacgagcgcgcgaaccttgaaatgtcacgggcttctacggacaggagcccgcctgagcgcaaagctttctgggagttgtagttcttatcccgcgtggaatgttgggagattgagttttcgggaagtagcggatgggacggtgggagcatgggcttaggatgtgaatgccagggagcaataaaggtatccgtggtatcggc

SEQ ID NO: 13391 - DNA, 553 bp, Homo Sapiens
  misc_feature (66)..(66): n is a, c, g, or t
  misc_feature (84)..(84): n is a, c, g, or t
aagcagaagcactgtcggcaagtgctgcccagcggggggctcccagccacgccgctgctcttccanccgcacaccaagggctcncagatcctcatggacctcagccacaaggctgtcaagaggcaggccagcttctgcaacgccatcaccttcagcaaccgcccggtcctcatctacgagcaagtcaggctgaagatcaccaagaagcagtgctgctggagcggggccctgcggctgggcttcaccagcaaggacccgtcccgcatccaccctgactcgctgcccaagtacgcctgccccgacctggtgtcccagagtggcttctgggccaaggcgctgcctgaggagtttgccaatgagggcaacatcatcgcattctgggtggacaagaagggccgtgtcttccaccgcatcaacgactcggctgttatgctgttcttcagcggggtccgcacggccgacccgctctgggccctggtggacgtctacggcctcacgcggggcgtccagctgcttgatagcgagctggtgctcccggactgtctgcggccgc

SEQ ID NO: 13392 - DNA, 653 bp, Homo Sapiens
  misc_feature (77)..(77): n is a, c, g, or t
gctgcattcctgccacagctcatcttgctttcagctgtgtctttcgcctataacagagacctcgttttttgttgttnttcttcatacgtccatttttgtgacttttaacaaagtctgcacctcccagtactttctttggtacctctgcttactgcctcttgtgatgccactagtcagaatgccttggaaaagagctgtagttctcctaatgttatggtttatagggcaggccatgtggctggctcctgcctatgttctagagtttcaaggaaagaacacctttctgtttatttggttagctggtttgttctttcttcttatcaattgttccattcctgattcaaattatttcccattacaaagaagaacccctgacagagagaatcaaatatgactagtgtatgttccacaccctctgctactgtgttacattctgattgtcttgtatggaccagaagagagctttgggacattttttctgaacattctaagcattctagtgaaagttcccatgttccaacagaacttaaaagcaatgtttgccttatatataaaagggacacaataattgaggtccaccttctaggaaatcctaggactcgtttatttgggacatggtgggaataaaggtcacatattggaaaatggaaaaa

SEQ ID NO: 13393 - DNA, 632 bp, Homo Sapiens
  misc_feature (445)..(560): n is a, c, g, or t
gagcgcccctgtccggctggctgcgcgccggttttaaatagcatctttcggacttgtcttcgcggccccagtccccgacctcggcgctgcctgggctcctgcagcctctccctaagtcttctccaaacgaccacctcacggattccttatggatcgcagctccaagaggaggcaggtgaagcctttggcagcttctctgctggaagctcttgattatgatagttcagatgacagtgattttaaagttggagatgcctcagattctgaagggagtggtaatggaagtgaagatgcttcaaaggacagtggagaaggttcctgtagtgattctgaagaaaatattttagaagaagaactgaatgaagatattaaagtaaaagaagaacaacttaaaaattctgcagaggaagaagtactatcatcagaaaaacaattaatcaaaatnnnnnnnnnnnnnnnnnnnnnnnnnnnnnnnnnnnnnnnnnnnnnnnnnnnnnnnnnnnnnnnnnnnnnnnnnnnnnnnnnnnnnnnnnnnnnnnnnnnnnnnnnnnnnnnnnnnncaacagtatctgagaatgtggctgcttctgctgctgccaccacaccagccacaagtcctcctgctgttaaca

SEQ ID NO: 13394 - DNA, 619 bp, Homo Sapiens
  misc_feature (21)..(21): n is a, c, g, or t
  misc_feature (61)..(61): n is a, c, g, or t
  misc_feature (90)..(90): n is a, c, g, or t
  misc_feature (105)..(105): n is a, c, g, or t
cacatctggtgtagactttcntggtgaggagcttctatctgaggaccctgcagacaacgangacgcgcaccgtgacgcagttccacttcntgagttggtatgacngagagtccccttcctcctcaaggtccctcctggacttccgcagaaaagtaaacaagtgctacaggggccgttcttgtccaataattgttcattgcagtgacggtgcaggccggagcggcacctacgtcctgatcgacatggttctcaacaagatggccaaaggtgctaaagagattgatatctgcagcgaccctggagcacttgagggaccagagacccggcatggtccagacgaaggagcagtttgagttcgcgctgacagccgtggctgaggaggtgaacgccatcctcaaggcccttccccagtgagcggcagcctcaggggcctcaggggagcccccaccccacggatgttgtcaggaatcatgatctgactttaattgtgtgtcttctattataactgcatagtaatagggcccttagctctcccgtagtcagcgcagtttagcagttaaaagtgtatttttgtttaatcaaccaataataaagaaagatttatggaaaaatccaaaaa

SEQ ID NO: 13395 - DNA, 398 bp, Homo Sapiens
atccccagcaaactgcagcagccctacagaagaggtgcctgactgttcaaaggaaaacagaaagcaacaacaacatcaaccaaaaagtccccacgaaaacctcatctaaaggtcagcagcctcaaagatcaaaatgagacaaactcatgaagatgagaaaggaatgaaaaacccctcacaactcaaaaggccagagtggcttgtttactccaaatgatcacaacacctctacagcaagggcacagtgctgggaggaggttgagatggatgaattgacagaagtaggcttcagaaggtgggtagtagcaaacttcactgagctaaaggagcacgttctaacccaacacattggaacgaatcccagaacttaaagattggttctctaaaataagacagac

SEQ ID NO: 13396 - DNA, 350 bp, Homo Sapiens
aaattaccaattcagttatttagctttttattccccaaatctttggtaccctaggcagatgtgtcatatttatcctgggctttatgtacctctggtttgagggactcttgaacttcattttaagaaacatggcccaatgagtacacagtcaagtcttcatgtccctgaacactgcattataaaatcagcactccttgttctttgtatatttgtgttatcaaataactatgtgattataatctggcttctcatataccataagtgcagaagagaatcaaaagattgagtacctgattccctaaactgtcaaatttcccgttgtatattaataaaatttgtatcgtttcgca

SEQ ID NO: 13397 - DNA, 437 bp, Homo Sapiens
gcggccgcggcgcgtgcctcgctctacggtgcctctggccccttccagcgcgccgcgctgcctgtggcgcccgtgggactctacacggcccatgtgggctacagcatgtaccacctgacatagagggtcccaggtcgcccacctgtggcccagccgattcctccagccctggtgctgtacccccgacgtgctcccctgctcggcaccgccagccgccttccctttaaccctcacactgctccagtttcacctctttgctccctgagttcactctccgaagtctgatccctgccaaaaagtggctggaagagtcccttagtactcttctagcattttaagatctacactctcgagttaaagatggggaaactgagggcagagaggttaacagatttatctaaggtccccagcagaattgacagttgaacagagctaga

SEQ ID NO: 13398 - DNA, 554 bp, Homo Sapiens
tatccgaccacttgggaatttgcctggggcaagattggctcgagtttttcctggctgagcggcgacttagcttttgatttaggccaactgattgagcgacaaggtgctggggcaaccaatggaaaagacaagacatctggtgaaaatgatggacagaagaaagttcaagaagaatttgacattgacatggatgcaccagagacagaacgtgcagcggtggccattcagtctcagttcagaaaattccagaagaagaaggctgggtctcagtcctagtgggagaaccccctcctagtccacctgaaaacaccaaattcaaccatcatctgtcaagaaattaaaagaacaacaccctagagagaagtcatccacacacaatccacacacgcatagcaaacctccaatgcatgtacagaaacctgtgatatttatacccttgtaggaaggtatagacaatggaattgtgagtagcttaatctctatgtttctctccattttcattcctcctgcaactattttccttgatgttgtaataaaatgaagttacgatgaaa

SEQ ID NO: 13399 - DNA, 392 bp, Homo Sapiens
tcttccttcccagctccttaataaaagcaaagtgattgagtaggtaatgttcaaagtgtctgcctgtgtacatgtacttgtattgattatgtagttcagtaagatgtgcccaagtcatttcagaaagaaagacccttcagttttgatgcattttgctgaacacttgggtagtgagtgggatcctatccagttgaggaatgcttgcaatgctcattgaagggatttgctttgggactttgtcatcttccagaaaggaaacatattgtatatttggcccagtgtgattgattgctttatctttggtaacttttacttgaatgggatttgctgaattaatgactattgaatttaaaactaattatgagttgacaaataaataaaaggtagtgttt

SEQ ID NO: 13400 - DNA, 545 bp, Homo Sapiens
aacctactcctcacatgggtaagagttgcagtgggcagggaccctcctccctgcccccatcctttgcttcctcaagctccctgccaacctctggatacatcaatgggaaggaaaccagggaagcatagacctatagtacaacaggggtgtagtgaccactggacctgatgaagcgaatctgcctgaaatttaatacgcctttttatttcccttctgtgttaaatcaaatgatctgttctgcactgagccaagcaagttacttttaaaactggtggcaccactcatttgggacttggagactgcttttatccagaacctgttaagagaacaggggatttaaatacaaaggaatatgaaggtggtgtgccttaaagacagtctaaaattaggttttagtttgttacattattttgaaatattaaacatgaaaatgttaaatcaggatgtgtgagttttaagatgttgaacactgtcctacatcagtgaggagggaggcaataaagtaatttcagagtaaaacagattgaggatgaaaccaaaaaaaa

SEQ ID NO: 13401 - DNA, 805 bp, Homo Sapiens
ggaagtaagagtcaacgacatcccctgcgccagttaacttccccgttttttgtggtctggcatacatctcacaggaccgtttgctgtcgtatataccgccattaaggattggccccgagcaagatcgcacgaggcagttcagctcatgccacatcctatatcatgattcaaaatgtgaggagactcccttttcatttcacaattcaatctataaagggctctgtcttcacagatcactgtccctgcattgaccagtccctttgaagaggggatggggcctgtgatcttgtccagcctgggctatctatctgcactgtcattgctaactcctgtcagaatcacatggatgagtagtggctgaatcccaaaaggaaagggtttagagcaagtgaaacaacagatgttcactatagaaagcaagaatgaaaaccatgaagtggttgaagattagccttacagtaattttattctgatcacttaatacagtagagtcaaacaggaatccaagtttccaactttattatttttggcactgaagaattacaaagaactctagcgtctttatacctccgtggttcactggagttaaagcaatcggggcgttgtacagctcacttgagtttttaaaggttctactaaaaagtgagaattccacagcaatatgggtcattgttgcagaatatcacaaaggtctgttgtgtatactccttttcaccaggaaagggacaataatagtttttttcaatgtatatatatataagtgatctaactttttattaataaaagtaaacaactctaaaatgta

SEQ ID NO: 13402 - DNA, 289 bp, Homo Sapiens
ccccagcgctgctggtagccaggggaggggtctgcacagcgagaagtactgtgatgactttgagccgttgacatgtatgtcttcagatgcctttctgcctcggtcgattttagggtatggatattaggagccataacttgtaatcttgttctctgaacgtagagataagctgctataaagccagtagatgttaaactgaagagaaattattcccacctgctatgagtcaggcttaaggaatctcttcaatagtgtctctttagtaaaataccaaacatgtctttgtaaa

SEQ ID NO: 13403 - DNA, 457 bp, Homo Sapiens
gtgacccctgaccccaaactgtgacccgaaccccagactgtgccccgaccagactgtgacccttgacatcaaaccgtgacaccccctcctcctcttccaccctcggtcgcttttccctactcggacctaggacacgtccccaacggaagccccgccttcccttgcaccgcgatgaacccaacctccctgaagccaaaacttcccaccctgccgcacactccggaccaccccacttgccaccaagcacatcctctccaaatccaacccttatttgcgacccttcagtgatgacccagcagacctccaaaaagcctcctctgcccagatctccagccgggtctggggctgggttgcggaggggagggtctgggagtccacacttctccaccaacttcccttcccactctcttattccacattgcagtgtttggaataaaccatgtttttatgcctcctc

SEQ ID NO: 13404 - DNA, 856 bp, Homo Sapiens
ttacaaatgtgagttttatttgcattctaacccaagcacagatcccacatacagacttctcgtccgcactatggtacagtaacaagtgcaaaatatgctttatttcaggtacaaaaacatggcagtaggacaactttgagctcaacgcccacctccccgaggacctctcacacccacctgacccatccaagggccacaccaccccgagcagatactcccaccacctttagaaaagagtcacccaatctggagaaaggtgtggaggttacatctttagaaagaaatcattttaaagtacagtgaacattgagagaacacagtagaccgtgcttccagcccagcacggggaggctgcagagaggcaccccaaacagtccccttctcttctgtggttaaccaatgcaagccccgcaaagcttttcccagcagagcacacccagccagcaatgaggcctcaggacagagccagcactgtgacaaaagaacttgtcccacctatctgagagcatgagatctgcaagtgggatccggactggacaccaggaagctcgacctggctcgggccatcagtagctgtgggaccctggcccccatctaacctcccagttgacttcctgaaaactgggctagtgggggcctccccattgctttagggaggatcgagtgagaagctgaccaaatgcgcatgaacacaaagcctagcctgttagccccagctgctatcactactgttactcacgaagagaggagctgcagtggctgctgtctgcccctgggagtgaagacaccaggtgtgcacagaggctggacaatgccacagggggcctggaatggccacagccggacctcggaacca

SEQ ID NO: 13405 - DNA, 532 bp, Homo Sapiens
cctcgggcaggaagcagaacgacccgcgaccacttccggcgccgagggcaatggggggcgcgtcggggtcgcggcttccggcgggcgcgcgccggcctcactggtttccggggccgcgcaggggccacgcctccgcttccggcctcgctgtctagcagggcgctggctggtcccttcgtccggcgggaacttcgcggctaaccgactctctggatgccggccgcgctgtggtttcctcacataagaagccaaggagtcggaaagcccgttgcctgaggcagcagtctgggaatttcggtccggcgggccgtccccacccacacggacggggcgtggcttctgccagatgtgggcggggccccgagggccgtggcgggcgggacccgggcctcggccgggctggcttggtccccgcaggtgccccccgctagccacgagcagccccgggagggtggattcggaggcgcggggactggtgagggcccactgcagggctgagcgtcgcagcgtgctgtggttttagatgaatgct

SEQ ID NO: 13406 - DNA, 749 bp, Homo Sapiens
  misc_feature (445)..(453): n is a, c, g, or t
  misc_feature (605)..(624): n is a, c, g, or t
atcagctttgatattgacgctctggatcctgcctatgcgccagggacagggacacctaaaattgctggtctcactcctagtcaggctctggagatcatcaggggttgtcaaggcctgaacgtgatgggctgtgatcttgtcgaagtttcaccaccgtatgatctttctgggaacacagccctgctggcggctaacctgctgtttgagatgctatgtgctctccccaaagtgacaaccgtctgagtcttgtgctcttcaagacaaaacagattgcgtcgctgacaagttctcaagaagaacttatgagtaagcagtctgagaactaaagagtttatgccaagaaaactttctgctgaaagtgtcattgctggctgtaagtcgggataatcagtataattctcacccaaacagcaacatttctaaggaacttgggttaattgggggnnnnnnnnnggaagtccttgtcccgctttgattttttttcctttgatgaaagatggaggataaaggggaagtgaggagaatttctttcaagattatttaaacattagaaacatgacatttaaaaaaactatgaaataatactgtataagcattccatctcnnnnnnnnnnnnnnnnnnnntacagcttctcctatgaggtgcttagggctgcatcttggttttaggacccctgtgaacgtaagtaaaaagtataaagtaacacggagagcctgggtgacagagtgagactccgtctccaaaaaaa

SEQ ID NO: 13407 - DNA, 560 bp, Homo Sapiens
  misc_feature (16)..(16): n is a, c, g, or t
gtttgaactccatctncagggcggagcccctggccacgtgtgacccggctccggtggtttcgggagaacatgctggcggccctgcgactttgcctgctcagtgcgctccccgcgccgcccggcttagcctcctctcctcggcttctgtctctcgacgctcgtccgccagtccggccgggaatctcccgctgcggggctccaaaccccgcccccggagacgacacctgggccgggcagggcgcggcaacctcctcttccacccccgccaaaggcccagcccgtccggccagtccctgggcgccaagccgacctggcccgacggccccggagcccccaggggcgcactgcacctcgcgagcactgtgggagcgcgttctccctgcccgcgcgggtcgcgagcgcctacctggacttgggacggaccgagaagccctgccccgccagccgccccaacctggcaagcctggcttcccgggcgctgaaaaccccgtggctcagggatcgccgcgtagcacgctctggctctactcgggccctgggaccttgcccagtttcaatcc

SEQ ID NO: 13408 - DNA, 530 bp, Homo Sapiens
cccgccctcccccccgaccccgaccttgcaaagggcactcccgggcagggtgtggtttggaaggcggggctggcggggacatgggtgttcctgcatttcctagggcagttcctgctggtgggtggaagggggcctggtttaggcggggtcccaggagggggtgaggggtgacacccttggggagggggcctgcaaagggcactgcctgtggccacgtggggtctgtgggaattggtcctggggactttgatgggggtttcgggccccagttgccgccctgctccctcttccagggctcctggcttgggccccccgacccccctgctcagctcgggaaaatccccgtgcggctccagccccgggtcacgctcaggaacgatgaaaggggcgccctggccacgcttcaggaaagcctgtgtctgcgcgcggggcaaggggctccacgacaaaaggacaagatttgacttaaattaagtttttcccttgaggaaattttcattttctttaaaagaatataattttcttctaag

SEQ ID NO: 13409 - DNA, 685 bp, Homo Sapiens
  misc_feature (288)..(288): n is a, c, g, or t
  misc_feature (537)..(576): n is a, c, g, or t
ctgggtcgactcaaccatgtagccatagcagtgccagatttggaaaaggctgcagcattttataagaatattctgggggcccaggtaagtgaagcggtccctcttcctgaacatggagtatctgttgtttttgtcaacctgggaaataccaagatggaactgcttcatccattgggacgtgacagtccaattgcaggttttctgcagaaaaacaaggctggaggaatgcatcacatctgcatcgaggtggataatattaatgcagctgtgatggatttgaaaaaaaangaagatccgcagtctaagtgaagaggtcaaaataggagcacatggaaaaccagtgatttttctccatcctaaagactgtggtggagtccttgtggaactggagcaagcttgatttatatttgcaagcaactaaattaattgacctgaaaaagcctatcaaatactatcaaaatgtactatgacattgagtccttcactgcttccatcatgtaaaagttaaaagttaaagactgaattacagaaagattnnnnnnnnnnnnnnnnnnnnnnnnnnnnnnnnnnnnnnnnttagattaacaaacatatttgttaatttgaatttgaagaaaatcttgattactaattacttagggaacattattaaaatcatatagaaataaattattcctcttgctac

SEQ ID NO: 13410 - DNA, 524 bp, Homo Sapiens
atggctcaggcgtcatgtctccccaggggcgctgctccgtggcgcgctctgttgaggcgccggccggctggcgcagtcctgtgggcggcgtggcgcttgcaagcgcaggaagagtcctggggggaccgcggcgggcgggagaccgttggcgccggcgcttcctcttaatcccggcttgttcccgacgcttgttcccgacggtgctcgctcctgggcccgtcctggcccgggctttctggccgatcgcgcaccccgtagtacccgcgcggcctagttctcgggggcttgggcacccgggtgctgtatcggcgggtttcttcccatctcctggacatttactttatatgctgcggcggaggtcgtacctccttggcctggaggaacccagtggggactgacgcagctccgggtgagctttggcggctgcgtcgagtgacaaggtaggcatctcagcgcggacatttgcaatggcccgacggcgcaaatgacacggaaagtccccttgttttgagtatgaggtgttt

SEQ ID NO: 13411 - DNA, 323 bp, Homo Sapiens
ataatcagtgccatgctttagctacctcttgactcactcgtttgtggcaggaaatgttcccaaattaatcagaagaattcagtgactaagaggatgtaatagtatatagcgcaggcactggaatcagctctgctgtgtgatcttggacaagctgcttctgttccgtttctcttatctggggcaatacctgtctgaatagagtgactgttgggacgaaataggttagtaaatatgtactgtaaggcattagaaccttgcctggcacatagtaagtgctcaataaacgctaggtcttgttaccttggcttcccgtttaggattgg

SEQ ID NO: 13412 - DNA, 455 bp, Homo Sapiens
agagcagtagatctcagatttctgagcaatccagtgccaagaggtgactgcccgcccccactcagctgtaagactggagttgtatactctgagaataaaagggagccctttataatggggactctggccctttcttggtggaatatcttagagaacaggaaggttgggtgaacatcagtgtgcagaccagttccttaggccccagtctctatccacatttggtttccaagccccagcagtcaggagtagcccccaggaaggaaactgatgaattttctccagtaaatttctccagaggttctccagtaaaatggcggaggtggaccctcctgtgtatgccctccccatcctccaacgccacccagtcagctccatagagaaccattctcaagtgggagtgataggcctggttcagcagacatttgaggaaacactctcatttgaggaaccaagac

SEQ ID NO: 13413 - DNA, 556 bp, Homo Sapiens
ctacatctagatcatgaataaagctttgtttactaaaacaggtggtgggctggatttggtgtagagctatgatttatcagcccctgtttctacatcagcagttggcaaactggcctcctgttttattggagaacacatgcccatttgtttacatattgcctgtggttgctttggcacttagagtggttgcaacagaaactctatgtcccagaaggcctgaaatatttaatatatggcctttaagaaaaagtttgcagaatcttcatctatgtaaatagcatttaaaagtacaacattcttgatagacatacagggccgagaagacatacagggtcaagaagctctgtcagacaggcctgaaatccacgtggggcaagtcatttaacctttctgccacagttttttcaactgtaaagtagagattgatagtatctgttttttaggattcctgtgggattattaagagataaggtatattcaagatctggcaatagaatataatgtatttttttcaatcaacgttagaaataaatgtaacagacttttagtttcctaa

SEQ ID NO: 13414 - DNA, 296 bp, Homo Sapiens
agcatgggcactactcttcatgtgcggtgacaccagcccccagatgccttgaattaagtgtcctcacctttatgcatgactgcaaagccagctggagcattttctatggagcctccgtatgttttaggcccatgaccttcgtgaggtgacgggcactcactcccatgagccctggctgtgtgctgttgtgtgcctatcggcagatccatccttcctgcctccaaggaggatacacagagaatggcttcctgttgttttgtttattttcttaacgtgtacagatggaaacttcattt

SEQ ID NO: 13415 - DNA, 454 bp, Homo Sapiens
tttactacagtcagagtttcctttaaattggggtgggggtgctaagcactgaatatctttcttgattactttaccatgtggacatatgggataaatactgtatttcagatttacataaaagtagattagtaatgcacagctttcagaataaaaacaatgataaaaaagaccaagcactatcaactttggacagtaatttcctaggtgttaaacaagttttctgaatacaatctggatgcaaaacggcctgatttgatgaattcataattttcttctgtatactttcattttattaaatattttattacttggttaaacacaagaattatctatgtaaacttcatgggcttttttgttgaaagttagatgttcagtaactaatttcccagttatggcccagaattaaacatttatgatcatatttcagaagtcaaaatacaaaactggattatca

SEQ ID NO: 13416 - DNA, 472 bp, Homo Sapiens
gagaatgttgcagggtgcaatttctccccatctctagagaagccatgggaaggtcaacccataggaccctccccagggccaggctggagctgaataaagagccctctggctcgtcttagtgtcagcagttattcatcagagaacttgaattagaactcacatttctcattactggataatgtgagagagcaagcatgggttccagctaatcaaacatgccatgtgccaagtgagcttgagtcctggagagaattaactctaagcctcttaggctaccatcctttacccactggatgaccccgaggggcatctggggcagcagtgacagagacctctgggcaagatatgcccagaagaggtgtgatcctgcgcccagcttctcatgagcgatcaccaaaactgatcacaaaatatgcaccacataagagaagagtaagataaacactgttaaacaagatcatgtaagaagact

SEQ ID NO: 13417 - DNA, 799 bp, Homo Sapiens
  misc_feature (70)..(70): n is a, c, g, or t
ttgagggccttttaacactccccgagctgattgtttgcaagtgtgtttgttccagagtgtggaagtatanagacatgggcatcacgtaaattggttttgtttgctattctgtgtgtcagaaccaacgagtgtaatggagagggcaggtcatctcttattgtttctaaaacaacttaaaaggtgtagattgggaagaggtgagtgatccagcttcctccttttggattgaggctatgtacttggtgggggcaagggagggaatatattataatactattcagttgcgataatgggaaaaacagagtatatagggtatctacccagcctagaaagcacaggaacaatacgtcatatatttggaacagttattgtctgtgccatgaccttcatgataccagtgagaagccaggctagagaaataaaatcctgaattacattttagtaattgttttcaagacaacaaaaaataaaacatttcattattcttgtatattgacatatttttcttttcttgaacaacatgcaggtgagtagcatattaatggctggctgtaaattaattttgattcctctgtcaagtagacctaaaactcactgtaagatatttcagttttttccttaaagtgatgatttcaaacctcctgaatatttgcgcgagacttttttcttaggaaagaaaaaaggctcaccttggctactgttgtcagcttacagtcatcacataccccctgaaatatttgacacttggaaatgaagttcttcctgaaaatatcactgcaataaaatacgtatacgtcaa

SEQ ID NO: 13418 - DNA, 244 bp, Homo Sapiens
  misc_feature (85)..(106): n is a, c, g, or t
tttaaactacattatcttgaaatacaaatgtggattctcatcactgaaaaatctttgaagttgtgtttcttccttttagttgtannnnnnnnnnnnnnnnnnnnnngactgtactggtaaccattttctaaatcaatccatatataaccatttccacaccttgattcatgaagcaaattgtgatcagctgctctcctgaaatcgagcatgactttatacatacagaaacttgtacattaccctc

SEQ ID NO: 13419 - DNA, 606 bp, Homo Sapiens
acctagtaaggggaccaatgattcattaaagtaaattgatggttttgctactaattcctatcccatacatttgacacaaaagaagtgttggtaatggataaataacatatcccgggcagatgagctcaacctagtaggtaagagtttggtttggtcacagttgcctatgagtgtgggtttcaaaagaaacataaagccttaacttagaatttcattatgttttagaatcatcactgccttaatattcaagcatctatttaagtcctaataaaggagaaatgcatgtttatggcttttttgtaaatataaatgcagtgatctatggcttaaaaaatttgtttctgtgacaatgtttgtaaatctagccaatagagtcatttacagaagaaaaatgagcatgtaataatacaagaactgtttccccctcaaaacctgaacctgaaaaatttgtaaaaactgaaatttaatgattaaagagaagccagaattgtacccttttttgtgaattcttgaacgtactcataaatatgacttattgtattgccttaagttttcactcattgtcttttgaaagccatatgataaaatgattttatttaataataa

SEQ ID NO: 13420 - DNA, 1031 bp, Homo Sapiens
cagagcgttcacggtgagcatgaaaggcagccgcgtggagcgcgcggaagaggcacttgcccacatgggcagctccgtgttcagtggaatcacacttacaaaatttggagggattgtggtgttggcttttgccaaatctcaaattttccagatattctacttcaggatgtatttggccatggtcttactgggagccactcacggattaatatttctccctgtcttactcagttacatagggccatcagtaaataaagccaaaagttgtgccactgaagagcgatacaaaggaacagagcgcgaacggcttctaaatttctagccctctcgcagggcatcctgactgaactgtgtctaagggtcggtcggtttaccactggacgggtgctgcattcggcaaggccaagttgaacaccggatggtgccaaccatcggttgtttggcagcagctttgaacgtagcgcctgtgaacatcaggaatgcacagttgacttgggaagcagtattactagatctggaggcaaccacaggacactaaacttctcccagcctcttcaggaaagaaacctcattcttgggcaagcaggaggtgacactagatggctgtgaatgtgatccgctcactgacactctgtaaaggccaatcaatgcactgtctgtctctccttttaggagtaagccatcccacaagttctataccatatttttagtgacagttgaggttgtagatacactttataacattttatagtttaaagagctttattaatgcaataaattaactttgtacacatttttatataaaaaaacagcaagtgatttcagaatgttgtaggcctcattagagcttggtctccaaaaatctgtttgaaaaaagcaacatgttcttcacagtgttcccctagaaaggaagagatttaattgccagttagatgtggcatgaaatgagggacaaagaaagcatctcgtaggagcctctacagggtttcaacttatttttctttaataaaatacatagttttcctaaaaaa

SEQ ID NO: 13421 - DNA, 1216 bp, Homo Sapiens
ggatcgaggcagggggtgaatcggcacgagggagagagagagacggtggatgttgcagctgatcatgcagttgggttcggtgctgctcacacgctgccccttttggggctgcttcagccagctcatgcgtgtacgctgagagggctgaggcacgccggaagcccgacatcccagtgccttacctgtatttcgacatgggggcagccgtgctgtgcgctagtttcatgtcctttggcgtgaagcggcgctggttcgcgctgggggccgcactccaattggccattagcacctacgccgcctacatcgggggctacgtccactacggggactggctgaaggtccgtatgtactcgcgcacagttgccatcatcggcggctttcttgtgttggccagcggtgctggggagctgtaccgccggaaacctcgcagccgctccctgcagtccaccggccaggtgttcctgggtatctacctcatctgtgtggcctactcactgcagcacagcaaggaggaccggctggcgtatctgaaccatctcccaggaggggagctgatgatccagctgttcttcgtgctgtatggcatcctggccctggcctttctgtcaggctactacgtgaccctcgctgcccagatcctggctgtactgctgccccctgtcatgctgctcattgatggcaatgttgcttactggcacaacacgcggcgtgttgagttctggaaccagatgaagctccttggagagagtgtgggcatcttcggaactgctgtcatcctggccactgatggctgagttttatggcaagaggctgagatgggcacagggagccactgagggtcaccctgccttcctccttgctggcccagctgctgtttatttatgcttttggtctgttgtttgatctttgcttttttaaaatgtttttgcagttaagaggcagctcatttgtccaaatttctgggctcagcgctgggagggcaggagccctggcactaatgctgtacaggtttttttcctgttaggagagctgaggcagctgccactgagtctcctgtccctgagaagggagtatggcaggctgggatgcggtactgagagtgggagagtgggagacagaggcaggagatgggattggaagtgagcaaatgtgaaaatcctcttgaactggagatgcagttgaggtatgagggttgtggaactgtgaaggaatgggg

SEQ ID NO: 13422 - DNA, 1073 bp, Homo Sapiens
  misc_feature (516)..(533): n is a, c, g, or t
  misc_feature (949)..(949): n is a, c, g, or t
  misc_feature (983)..(983): n is a, c, g, or t
gctgacagcttctcctgctgttccttcctctcttggactgagtgggtacgggcagccactccgcccattggcagctgacaacgcagaaacgctctacggagggcttctgataaagggctcagccttgccgtgtggtgcttctcatcactgcacacaagttccatgctttgccaccaccaccaagcacatctgtgatcctgaagggcggccgttagtcattactgctgagtcctgggtcaccagcagacacactgggcatggacccctcaaagcaggcacacccaaaacacaagtctgtggctagaacctgatgtggtgtttaaaagagaagaaacactgaagatgtcctgaggagaaaagctggacatatactgggcttcacacttatcttatggcttggcagaatctttgtagtgtgtgggatctctgaaggccctatttaagtttttcttcgttactttgctgcttcatgtgtactttcctaccccaagaggaagttttctgaaataagatttnnnnnnnnnnnnnnnnnnccacttaatatttcagactgttacaggaaacaccctttagtctgtcagttgaattcagagcactgaaaggtgttaaattggggtatgtggtttgattgataaaaagttacctctcagtattttgtgtcactgagaagctttacaatggatgcttttgaaacaagtatcagcaaaaggatttgttttcactctgggaggagagggtggagaaagcacttgctttcatcctctggcatcggaaactcccctatgcacttgaagatggtttaaaagattaaaaaaacgattaagagaaaaggttggaagctttatactaaatgggctccttcatggtgacgccccgtcaaccacaatcaagaactgaggcctggggctggttgtacaatgcccacgcctgcctggctgctttcacctgngagtgctttcgatgtgggcacctgggcttactanggctgcttctgagtgtttctttcacgtgttgtgtccatagcttttagtcttacttaataagatccacccacaccctaagccacgacatgt

SEQ ID NO: 13423 - DNA, 285 bp, Homo Sapiens
gaacccggggggtccgcctgtccttgtagtcccctatcccatcctggcctcgggcgagactgccaaggagggcaagacgtacaggtgtaaggatatgcccactgactctttttcaccaagtcagagatgcagatccactccaagtcgcactacagaggccaagcccaacaagtgcccgcactgctccaagtcctttgccaacgcctcctacctggcccagcacctgcgcatccacctgggcgtcaagccctaccactgctcctactgtgataagtccttccggca

SEQ ID NO: 13424 - DNA, 548 bp, Homo Sapiens
gctttaaaattcacataggtggagtttcccatctgaagatttctttacaaggactttgctaagttcatctcagggttatctgagcattgaccaagtttatcctaagggaataccactttgctccctgtgcatagtttaggaactgtagtcctaggaggaaacagctttaaatattggtagtgagttgtctaagatcaggactgttttgatatctgaccttgttatatgcggagagtaaatgcaaaaatgctaagagtaatgcatcatgtattgaatattaagtgtcactgaagcaatgtttgtgttgactagaaacgtaagatgacttgtgtagcacctctttataagcacacagctcatcttaatattttccatttttattagaggaagtaggacagagttgtgtttttctttataaacaaatgataaactagcttttttaaaaagtgactgttagaacttttttagctctgagtagtggtccctttttaaactcctggaaacatttttgttaccaaataaatcatgttttatggaactcagccatc

SEQ ID NO: 13425 - DNA, 670 bp, Homo Sapiens
ggggacctctgtagaacaacaagggtcttattttgtgaattatatatttcaagaactaaacagagatccacctttctggatctgatttatatcactgaaatgtacagttcttttggaatagtttcacctgagaaaacatagttggctattatctatcttaacctgttcaggcttttaaaaaaaactgtttttgcatagggtagtactaagatcttaaaaagtggtaactgtcttgaagaaaaaacgtttattgtttgtttgcaattgaaataacagggttaccttaacaatgactgtctatgatgtgtcagttcttatctgaattccaaaataaacctgtgcttaaaaaagaaataattgaccaagtaagtttgcataaaatgtgaatactaaatgtgtccccagttgctggcattcatatgtacaggatttgttctagcaagctatgcttcagtatgtgggtgatatttttctgtcacaaagatttctttatgcatgcagagcctgggaaagtcatgggattaacttgagggtcactattgagcctattaattaattaattattgttttaataaaacaaacattggtattggaagataaatatgtttatgtggtatctgacaatgtgtattaggtgtcatatacaatggtaatatgcctgtctttaaag

SEQ ID NO: 13426 - DNA, 538 bp, Homo Sapiens
ttggggggtgggaaatttagctgactagggacaaacatgtaaacctattttcctatgaaaaaaattttaaatgtcccacttgaataacgtaattcttcatagtttttttaatctatggataaatggaaacctaattatttgtaatgaattatttagacagttctaagccctgtcttctgggagttatcaattttaaagagaacttttgtgcaattcaaatgaagtttttataagtaattgaaaatgacaacacaataacactttctgtataaaagtatatattttatgtgatttattcctactaaatgaaagtgcactactgcctcatgtaaagactcttgcacgcagagcctttaagtgactaaggaacaacatagatagtgagcatagtccccacctccacccctcacaatttatttgaatacttcaattgtgcctctcaattttttgtaatgctaaaaaatcagtatctagatggtttttaaatgtattctctggaaattgttttatgtaaaataaatgttactataattccatt

SEQ ID NO: 13427 - DNA, 543 bp, Homo Sapiens
  misc_feature (199)..(234): n is a, c, g, or t
agccagaatggtggcggacttgggatacagcgtgaaggtggggaagtgcacagcagaaaacagaattgaagttgggaactctagagtctgggcaaaatgtttggttttttctcttaaaaaaaataacaccccattaccaaaagaaaaggtaaggtggcaaccttatttttaatagtttgaaatgatgataatcctaatnnnnnnnnnnnnnnnnnnnnnnnnnnnnnnnnnnnngtgatttctaaagatttgtttacttttgtgttttgttttactgtactaagaacttgtcctttctccttgaatcaaagtaggacatgcatcatcctcctaattttaaatgttggctctgattttaaagtggtgcatttgattccagccttggtaatggagagtttgcaaacacacagcggcccacagcttcacgtggtggtgtgcagtgtgaggcagctccttggctttcctggttttcacaacaagctagagattttcaaagctacacttttgagtaaaaacccttattaaaagaaaaacatgattaat

SEQ ID NO: 13428 - DNA, 506 bp, Homo Sapiens
gatgtgctccagaccatgaaactgctagcaatcatgcaattcttcagctcttccagggagaccagatatggttacgtctgcacaggggagcaatttatggaagtagctggaaatattctacgttttcaggctatcttctttatcaagattgaaagtcagtacagtattgacaataaaaggatggtgttctaattagtgggattgaaggaaaagtagtctttgccctcatgactgattggtttaggaaaatgtttttgttcctagagggaggaggtccttacttttttgttttccttcctgaggtgaaaaatcaagctgaatgacaattagcactaatctggcactttataaattgtgatgtagcctcgctagtcaagctgtgaatgtatattgtttgcacttaatccttaactgtattaacgttcagcttactaaactgactgcctcaagtccaggcaagttacaatgccttgttgtgcctcaataaaaaagttacatgcaccttc

SEQ ID NO: 13429 - DNA, 454 bp, Homo Sapiens
gtccctgtgaaggcattccataaatccgagcctgagtggttctccccgggaaggatactttggggagctggggggatgcgaaacaccctagatactggataatggggtgcggaaatcgatgatttaagaacaaaaccgaaaaactggcgttttgccgtgccgctcggaggggacattaaaaaatttcttagtgtttgcccgcaaaggtattgtgcgttgccttcgaggctgagatatgggagaatagacaagtcctttgttctgaggttcatcttccgagccccgagcctcctcccagcctcggacggctgcgcgggctgcatctgtgacagcctggcggcggcggggctgtgctatgacatctttacagtccttcttgcagagacatgtgtgccagggatgccgaattgccgggagagcaggcaagaccggcttcggggcgcgcggcggccgc

SEQ ID NO: 13430 - DNA, 543 bp, Homo Sapiens
atgtcatttctttacttaggatttgatgttctaatcattaatacacttaagttttccagagaactaaatagtaatagtttcatagaagagaactatttattcacttaaatatcatttctcaagtgagtgagttcccctctacttttagccttccacccaaactggaagcctctaggtgctatcaattatttatatccatcgtttacatccatgaaattggctgaataattactcctctgcctggcgtagacatgcgctttgggaaaaaaacgagtttataatcctataatgaagaatactggcacaggcaatgctcactcgaaaacttcaagtaatttctagttggttttggaatgcttgataaagttcctttacagctttattttcctgatttgttttggtttagatcaaagttcaaattaattttaacttagctaatgaactcatcaccaggacagttggagggggtaggccgaggttaaatggtccacgtttcaaaaatgttaatggctaatccataattaaagaaggtttaactgttaa

SEQ ID NO: 13431 - DNA, 518 bp, Homo Sapiens
gcggccgccacagcatgaccagagccccgaagcacctgtggcggcaaccccggcgccccatccgcatccaacagcgcttctattcggatccggacaagtccgcgggcctgccgacagagggacctgagcccgcggccggagctcaggaagtcgcggctctcctggcccgtttcctcctgcaggcgctttgacctggaaaatgggctctcgtgtgggaggagggccctggaccctcagtccagccctggcctgggccggattatgcaggctccagtcccgcacagccagcgggcgaagtccttcctgtaccgctcagatagcgactatgaactctcgcccaaggccatgtctcggaactcctctgtggccagcgacctacatggagaggacatgattgtgacgccctttgcccaggtcctggccagtctgcggaccgttcggagcaacgtggcggcccttgcccgccagcaatgcctaggagcagcacaggacacggggcagaagctggcattggagac

SEQ ID NO: 13432 - DNA, 549 bp, Homo Sapiens
cagcccacccatcttcatgttctgggtactcacctttactccatgtccaatatcatctagaattgtatagtcaataggttttctaatataaccgaactggtcgttcaaggttggctggagcaataatcttatgtgtccttgaagtgtttttattggtagtcaaaataccaatttctcttcttgcaactctctctttatgaatatcaactgtttgtgaaatatgattgattgaagattccatccttcgtagctgggatgcctggatatccagcatctgcaggacattgttggccaaggtgtttatcagataggcaacacttgctaaggattgggtggtgtaggctttggtttcttctagggctctctgcttatctgctgactgtatgtagttgttctcgcagtaatcggccacccgttccagatttgtgtagctgtcgaagagagcccggcggccccccgggatttcctcttccagcagcatctgccagccgccatcttcacatcctcctcctcctcctcttcatacaggtcgcagagggacggcggtcc

SEQ ID NO: 13433 - DNA, 516 bp, Homo Sapiens
gaattcggcacgagggtgcgggcaatggccacgtggccaaggccccgcaggaacgcgccgaggtctccctcaccctccaggtgtccttcgcacccaacagtgcgtctgaggaacgagctgcagtttgagcgttcccctgagatgtgcgtagcctccgtgtaaatgtccactcccatggcttaattgcctatcagacgcattttcccagacgaaagcaatgttgggttggggaagacagtgcagccacccagcctttaccagcagcgtacggcagacgaaggcagtcgaggtgtggaggtgatcacgaagatacatgtgtttgactgtttaatttgaaagtttacattttttatgctttgtgttggtgtgtaatttttgtactcttggtggctagtttttgtcaaatcttttttggaatattgcttaaatgttttgattttatgatagtgaagcttgtattcagtgttttgccaattaatattatatgcttgtaataaaagcaaaagaaaagcttaa

SEQ ID NO: 13434 - DNA, 289 bp, Homo Sapiens
  misc_feature (134)..(154): n is a, c, g, or t
aaaagccagatgtggtggtttgcgcctgtaatcccaggtactcagaggctgagatgaaaggatcgcttgaggccaggagttcaaggttggaatgagctgttccagcctgggcgacagaatgagaccatgtcttnnnnnnnnnnnnnnnnnnnnngtgagttttggggaagaataatcaacagatgattgttgtgtgctctgctaaggggcttttgaccgcctggcattgggaagccactgaaagctgttcaatagttgaatgaggcattaaagatatttgagaagccca

SEQ ID NO: 13435 - DNA, 847 bp, Homo Sapiens
tcacagaaaactccagttcattgttgggagaagttgaagatgaactcaatacctggagtcatacatggcagtcaacgcatggacaccggagactgttgagacgccgactggagtcacacacggcagtcaacgcgtggacaccggagactgttgagacgccgactggagtcacacacggcagtcaacgcgtggacaccggagactgttgagacgccgactggagtcacacacggcagtcaacgcgtggacaccggagactgttgagacgccgactggagtcacacacggcagtcaacgcgtggacaccggagactgctgagaccccgactggagtcacacacggcagtcaacgcgtggacaccggagactgctgagaccccgactggagtcacacacggcagtcaacgcgtggacaccggagactgttgagacgccgactggagtcacacacggcagtcaacgcgtggacaccggagactgttaagacaccgattcttccccacatgtattcaagacattcagaaaaggtattccaaaatgcgttcaagggaattgctattgaaattccagaaggcatgtttttttggtagaaattgagacactgattgtaaaacatatatggaaacaccaaggacataaacagccacaagaatctttaaaaagaagagttggaaaatgcacatcacctcgattcagggtttattataaacccaactgtagccaagacagtgtgcgccgggcaccatggctcacacctacaacctgtaatcccagtagtttgggaggctgagacggagcatacttgagcccagatcagacctcctagcaacaggtacgagctcgatcc

SEQ ID NO: 13436 - DNA, 480 bp, Homo Sapiens
  misc_feature (43)..(43): n is a, c, g, or t
gacttgaacataaaaatattgaagggacatagttctgcccacnaggtgcccgcgataggcttctctggttttgtctttgctgttcctggcagcgctatattgggcaggcttctgtggtctccacatgcctgtgtgcagagtcccccaggccctgggttctggggcccatactgaggagtggggatggccaagccttggctgttgagtaggcactgcccagttgtgctgtatgggatgctgtttctcacttaagaaatctttccctacctggggggtacaaaggcattatcctgtattcccaggttgtaactttctgcctttgacattcaaccttgagtccacctgtaagtgtaactgcggcagaagggaggggtctgctgtcatccttgatagcctgtgatgagcagagcccctctgccgaccgcgatgcacatgtaatatgagcaagaaataaatttttgatgtgcgaagccactgaaa

SEQ ID NO: 13437 - DNA, 530 bp, Homo Sapiens
  misc_feature (344)..(353): n is a, c, g, or t
acaggagaactaatcttctatcagttgccctttcttctttggagtttttatgtaacttacccttgtgagacaagttttctacttgagaaactcctagtacaatgtcttatactagaagcctggataaatactattaactactgtttcttatattcacttcagaaaatcagtggctccacattgtttgagccattagcgataacaaatttggatctacttactcaagtcttatgaattctgtgcctttcatcacattcctagcccactctcatcattactgcagaagggtgttgtgatgaccagttttatactgtgttttgatatgtctagcaataacttaaagnnnnnnnnnncctgggaaatcttcaacatgttattggaacatatatgtatgtattaatgtatatacatggcttaacttatacgttatggcagctctgtatacagtttgatctcatgtactgaaaaaaaattcttaattttattggagtttataccactgtgaaactgcaatatgactgtaagagagt

SEQ ID NO: 13438 - DNA, 501 bp, Homo Sapiens
aaaagggactttgcagataaggatgctgggatgaggcagaacatcctagatgatccaggtgggccttaaatgtaatcacaggtagtatccttttaagagagagacaaaagatttgactacaggagaaggcaatgtgatgatggaagcagaaactggagttatgtgctctgaggatggaggaaggagccacgagccttcccacacctagaagctgaaaagagcaaggaaatgaactgatcctccctgctctgagagcctctgtaatgaatgcagccctgtggacccattttagactttaagcatccagaactttcgaatagatttctgtttttttaagagccactaagtttgtggcaatctgttaaaccagctgttacctaagcccttgatcctatgtagtgcgcttcccaaaatgtacaccaccacctttagtagaattgggaagttttagcacatacccatggagggaatcaggaataaaggcagactggtctcccaaaa

SEQ ID NO: 13439 - DNA, 444 bp, Homo Sapiens
ataaggtggcggcggcgaagcagcggcaggtcgggagcaagatggcgctgcggccaggagctggttctggtggcggcggggccgcgggagctggcgcggggtccgccgggggaggcggcttcatgtttcctgttgcaggtgggataagaccccctcaagcaggcctgatgccgatgcagcaacaaggatttcctatggtctctgtcatgcagcctaatatgcaaggcattatgggaatgaattacagctctcagatgtcccaaggacctattgctatgcaggcaggaataccaatgggaccaatgccagcagcgggaatgccttacctaggacaagcacccttcctgggcatgcgtcctccaggcccacagtacactccagacatgcagaagcagtttgccgaagagcagcagaaacgatttgaacagcagcaaaaactcttag

SEQ ID NO: 13440 - DNA, 267 bp, Homo Sapiens
tcagaaaaaggccttgtcccttccaggaataagaagggactttattatagatgcagtaataaaaacagctgccattaagtgagcacttactaagtgtcaggctttttgctaggcactgatatccattatctcctgtctacacaaagcattcttgttcccattccaaagacgagcaatatgaggctcagaaagattaacatgcccaaggtcacacaggtaaatgatggggtcagaatctgaactctaggtctgtcttgggagggaggg

SEQ ID NO: 13441 - DNA, 596 bp, Homo Sapiens
  misc_feature (340)..(532): n is a, c, g, or t
ggtaagaaattgttccagcacaagcagctctaggatctgctcctttgtccgcctctctggtctcagccactggtgacaaagttctcggagtctgatgagagcttctctagggcttgctgcctcctggtagcggaagcgtcggaagttctggtgggaggtttccagcaccgggtcatccctctgtaagacagactctggccgacaggtgaaatcatcttccagtttcaccatcagaattccctcttcttcccaaagatcctggtcctctggttccacggctgtagccatttcttggctttggggtggtctcacaccatctagagctcacactgtcattagnnnnnnnnnnnnnnnnnnnnnnnnnnnnnnnnnnnnnnnnnnnnnnnnnnnnnnnnnnnnnnnnnnnnnnnnnnnnnnnnnnnnnnnnnnnnnnnnnnnnnnnnnnnnnnnnnnnnnnnnnnnnnnnnnnnnnnnnnnnnnnnnnnnnnnnnnnnnnnnnnnnnnnnnnnnnnnnnnnnnnnnnnnnnnnnnnaacacccttttatagggaggatctcaggatggtcctgaggagggagcagagaggggcggagcag

SEQ ID NO: 13442 - DNA, 914 bp, Homo Sapiens
  misc_feature (35)..(35): n is a, c, g, or t
  misc_feature (68)..(68): n is a, c, g, or t
  misc_feature (617)..(654): n is a, c, g, or t
cattcctgaaacttctgactgcctctgctcggcanaatttcacctaccactgtcatcagtcagcagcntggtatgatgtgtcatcaggaagttatgacaaagcacttcgcttcctgggatcaaatgatgaggagatgtcctatgacaataatccttttatcaaaacactgtatgatggttgtgcgtccagaaaaggctatgaaaagactgtcattgaaatcaatacaccaaaaattgatcaagtacctattgttgatgtcatgatcaatgactttggtgatcagaatcagaagttcggatttgaagttggtcctgtttgttttcttggctaagattaagacaaagaacatatcaaatcaacagaaaatataccttggtgccaccaacccattttgtgccacatgcaagttttgaataaggatggtatagaaaacaacgctgcatatacaggtaccatttaggaaataccgatgcctttgtgggggcagaatcacatggcaaaagctttgaaaatcataaagatataagttggtgtggctaagatggaaacagggctgattcttgattcccaattctcaactctccttttcctatttgaatttctttggtgctgtagnnnnnnnnnnnnnnnnnnnnnnnnnnnnnnnnnnnnnnggtgctcattctcatccatccaggatgtactaaaacagtgtgtttaataaattgtaattattttgtgtacagttctatactgttatctgtgtccatttccaaaacttgcacgtgtccctgaattccatctgactctaattttatgagaattgcagaactctgatggcaataaatatatgtattatgaaaaaataaagttgtaatttctgatgactctaagtccctttctttggttaataataaaatgcctttgtatataa

SEQ ID NO: 13443 - DNA, 396 bp, Homo Sapiens
cactattacagtacagttcagcaatcttgtttgtattttcttccaatacagtttaaaaccttgattattgacatactgaaattggcatacagttggttttcatgcagtattactgatatagacatggagcagatccctcagagaatcagttataaatagtaaattgtatggaaacattcatagcaaaagaatatgtcgtaaagtgctgaagtcatggtaagtctgcaaaactgccacatagctcaaagttctcaagcagtgacagagatttgctacatccaccttgttttagattatgcctgtttttgacagacactttgtcatttcctctgagaatttttaaagtgtccaatagaaacattttaagacccttaactattaaaggcgccgctgagt

SEQ ID NO: 13444 - DNA, 705 bp, Homo Sapiens
  misc_feature (566)..(593): n is a, c, g, or t
gttcccattcccgaaacttccatgctggctgtctggacacaacctctgtctgccaggatcccaggcacccaggtcccaagttctgagaagccatgcagaggagcatgcccctcctgcagctccagggccccatcagttgtgtcattatctgagacttcctcggcaactccaagtgcctttttgacagtgacaacagacagtccctcgcttttggttgttgttggttttcttaacccctttaatggaactgcctggattttatacagttattaaaggatgtctcttttgctttaaactgcatgctgccaaggtgccatttggggtcagcatcctcgtttcaacacagtgtgctctctagttatcatgtgtaacgtgggttctgtttagcgaagatagactagaggacacgttagagatgcccttccctgctccatccctgtggcaccattatggttttttggctgtttgtatatacggttacgtattaactctggaatcctatgggctcatcttgctcacccaatgtgggagtctggtttgagcaagcgagctgaatgtgactattnnnnnnnnnnnnnnnnnnnnnnnnnnnntcttatgtactatccaaaagtgccagaatgactcttctgtgcattcttcttaaagagctgcttgttatccaaaatgaaaattcaaaataactctgaaaaaaagggcgccgct

SEQ ID NO: 13445 - DNA, 479 bp, Homo Sapiens
  misc_feature (250)..(353): n is a, c, g, or t
ctagaggatcctgagcggcgcctttttgctagaataaggagaatcttctgtaccttctgactccgtgatcgattactccgaagtccttctccaagctctataacaaactgtgacaaacctatgtaattaataggattcaattatcaccagaggaggaaaaacaaacaaaacccagaggaaaccaaaattctttccttgttttattttttgagacagagtctcccactatcacccaggctggagtgatgannnnnnnnnnnnnnnnnnnnnnnnnnnnnnnnnnnnnnnnnnnnnnnnnnnnnnnnnnnnnnnnnnnnnnnnnnnnnnnnnnnnnnnnnnnnnnnnnnnnnnnntaaatatctccgtaagagataaacgtctcactatagttagcccccacgatgatactaacactcctagagctacaagcgatgtatcccaactacaactcccaaagtacggaattacacatataaacc

SEQ ID NO: 13446 - DNA, 642 bp, Homo Sapiens
  misc_feature (594)..(602): n is a, c, g, or t
cgagtgcgcggccaccgggagcgcggccttcgcgcagcgcctgtgcctcggccgcaaccgcagctgcgccgcggagctgccgctggtgccgtgcaaccaggccaaggcgtcggacgtgcaggacctcctgaaggatctgaaggctcagtcgcaggtgttgggctggatcttgatagcagttgttatcatcattcttctgatttttacatctgtcacccgatgcctatctccagttagttttctgcagctgaaattctggaaaatctatttggaacaggagcagcagatccttaaaagtaaagccacagagcatgcaactgaattggcaaaagagaatattaaatgtttctttgagggctcgcatccaaaagaatataacactccaagcatgaaagagtggcagcaaatttcatcactgtatactttcaatccgaagggccagtactacagcatgttgcacaaatatgtcaacagaaaagagaagactcacagtatcaggtctactaaaggagatacggtgattcctgttcttggctttgtagattcatctggtataaacagcactcctgagttatgaccttttgaatgagtagnnnnnnnnnttgttttgaattattgctttattaaaaaataaccattggt

SEQ ID NO: 13447 - DNA, 289 bp, Homo Sapiens
tacggaattacacatgtgagccactgtgcctggctggaaccaaaattcttcaggagaaaaagtctagcacttagttagctcccagcatcagactgagggtgagcggatctatggacttaggggttctgactttaatctcttcttagtttcctgggctagatgaagaatagctaaaatatagtcctggttctgacaggtggctcttccacgtccatgacaaaccggcaaatcaaacagcctttttttcactgagcacatatcctcccgcagtgaaaaaaaggcgcacata

SEQ ID NO: 13448 - DNA, 229 bp, Homo Sapiens
ggaaatgaaacagcactctcaattattgggacagaaaagttatttcatagggaatacttcaaacactgatatctacaacaggcagtaagattcgtcacaacaattggtatactgtcaatataccatacaagttccatctggtcttgattaaaaattattttagttttctcaggaaaatgatacagagggagaattgcctagattaagagagaaaaaaaaggcggccgct

SEQ ID NO: 13449 - DNA, 775 bp, Homo Sapiens
  misc_feature (46)..(46): n is a, c, g, or t
  misc_feature (60)..(60): n is a, c, g, or t
  misc_feature (62)..(62): n is a, c, g, or t
  misc_feature (70)..(70): n is a, c, g, or t
  misc_feature (152)..(152): n is a, c, g, or t
  misc_feature (157)..(157): n is a, c, g, or t
gtgtctggagtagattgcaggatgctcacaagcgaagcagttgagnccataagatgcagnanaccctgtngtgtcattgttcagagtttgtcatcactccacgagtcattctaaacgtcataacaaggcaacaaaatcaccggtaaccaganccagnacaccaagaaaaagaaagaaaagaggcaaggaactgctccacccgccaatgaaacttctccctccttataaagctctgactgatgacagtgatgaaaatgaagaagaagatgcctttaccgaccaaaaaatcagacaaagatatgcagatctgcctggagaactgcacattattgaacttgaaaaagataagaatggacttggactcagccttgctggtaataaagaccgatcacgcatgagcatatttgtggtgggaattaacccggaaggacctgctgccgcagatggacgaatgcatattggagatgaactcttagagactctgactcagaatagaatttacagtcatccataattttacttgcctaataataactactgccacagctggccaggtgcaacaggaagaccatcgccatcaactctttcttccaaaccttggttgcttctccccacttaaaacctgtttctgcaaagaagtcacttccaggattacttttcttttcttgttcttttataatatagcaccatgaatgggacccacattgggtcgtaacactgactagcataatcattacataaataaagtcaaagatgaccttatgtaaccaatatt

SEQ ID NO: 13450 - DNA, 391 bp, Homo Sapiens
tgcgggagccttagccctaaacatggcttaaaaatttggctctgagaatcctcacagcagtacgcctctccgctccttgcctagtcagtcacaggctgagactgtccaacctacatccacaggctcatgtcaacagtcctttctgcccaacccaatctcgtaacaggactcactgccacatacaatgatggagctggtctcatcagtgctaaactcacaccctgtgtagaggtgttacaacttacgtaataaacactcagataacaacactggatgcagacaccaatatctcaaataatctcactgatggttgggtcatgaccacacgtaggccacaggtgttcataaggcattcctttactcctgggctgaaaagcaaaaatccaaagtt

SEQ ID NO: 13451 - DNA, 479 bp, Homo Sapiens
gcggccgccatggtggagcagggtccgagccacgtcctgcagggcacatctggggcatttcctgttttgtggtaggaaatgtccctgacctttcagaaccgaacccaatcctgaggctgactcctctacggaaaatgaggacaggacgggggtgagggaatgagagtgggaggtccctgcacctcctcgcccggctcctcaggaagaaaaccgctggcccttcccgagtgtgccggccgagggcgagagccgtgcacatggggagagggcgtcactgactggctgagcttttaaatgtcatcatcataacattatttatttaaatgtagttattttggtatatttaggcaattttaaaacatttattatttacataaagaccaaatatgatgaatctgttccgtgaattgtgtcggccctcagcatggggctggggcagcgtcactgcggtgacccacttgaaaggtatgaaatgactg

SEQ ID NO: 13452 - DNA, 283 bp, Homo Sapiens
tctagaggatcccagcggctgccttttttggcccaaagggtattataaggcttgcttagtcaaagaagagagactaaacaagggtaaaaattttaacagtacagaattggccatcatatcatggccttgattctaactgttggtgtcctaagatgcaaaagaagtcagtggcttttaactgtttacaaatagaatgtgatggtaaaatgtacagttgggtggtgttggaattatgaaatttcttcagatataataaaccatgacttttgggcggctcaacatt

SEQ ID NO: 13453 - DNA, 548 bp, Homo Sapiens
  misc_feature (325)..(325): n is a, c, g, or t
ttatggatccagaaatatatcccaagtattatcttacatggttagatatttgcaacaagtgcgattcccaccaatataaatgatttggttcttagtctaggcactaagacccaggggagcaggaaaattagggctgaaagtaatcagcctgtaatcaaaagagacagtaatgaaattaggaagaactgcattttgcaggcatttagcaagcctctaattgtatgctgtctacattctgtcttgcagagccatttgaatcactataattagcctgctttgagaaggcagcattctgagagccagagtttccaagttcaaaggaaanatcttcctaaggaatatatgctggagtgaaaatccaaacacttctacccttaggggttgggaggtagcgtggatagaaggttctctgagagctttttgacacctcaggccaagaggacaagcagagaacaagctgctgggaaagtcaaatttataccaaactttgattccttatttcctaaccagaccctaacatggtcctagaaacacttttctttggcaaa

SEQ ID NO: 13454 - DNA, 570 bp, Homo Sapiens
ttgggtcctcctggggggccggaggctgtcagctgcagagggggagccagcaggcgcccccagcctgacccgagcctcgagtgagggtcccaggagaggaggcgaatgggcacagagctgggggcccacccactgctgcgggtgatgcctgccgctccctcctctgagcccccaggtccccccggggggtaataagactcagtatgatgagattggcattcccgtggcccctgctcagctacaaagacatgctggacatcttcacgcgtttcggccgcacggtgagggcggcgctgtatgcgcctaaggagccggtgctggactacaacatggtcatcatcttcatcatgcctgtgggcaccgtcgccatcggcggctactgggccgggagtcgggacgtgaagaaaaggtacatgaagcacaagcgcgacgatgggcccgagaagcaggaggagcgaggcggagacgtgacgccggtgatgaccctgcgtgtttgtggtgatgtgctgctccatgctggtgctgctctactatttctacacctcctcgtgccggatcctctacgttcag

SEQ ID NO: 13455 - DNA, 373 bp, Homo Sapiens
ttatgtatttaattttgctgtactagcgacacccacaaccctccacaaccatgtcctgatagttctttaatacaaccttttcattctcgtcaaggtacagcatcgagatagcactgagttctgtcgggacacagcatgccttaggaatcttagagttaacaaagttgaccaacgtctgaacaatggcatgattagtggagttcagatgatcagcatagaggaaaagggcattctccgtggcagtaaaaggcgtgataccccgggggagccacaatccagtcattccaccccacgtcactgaagtccacgtacaaagggtgtctcttacagcaaaattaaatacataaatatatatataccctacatattttag

SEQ ID NO: 13456 - DNA, 533 bp, Homo Sapiens
  misc_feature (185)..(193): n is a, c, g, or t
aaaacatatacagtattttgtaaagcataatgaaagatatttaatttctccatcaagtccaacatgggcaatcaacagtaaggcttttaaattctacagtgagggcactgaagttcaagtgatatcactgctttcttaaaatagttttgtatagtcttgcaagagcacaaaaacttaagtcattnnnnnnnnngcaaaacttcagtttgtctcattttgagatattttctttactccttccatgagctgatcttgatagtgatggctgttccacttgaaagtgaaagtcccttcctcttactcatatgaggagaactctgttctatcacgactgacaggcattttcttataaatccaaaaaggcagcaccttttaaaaaaaatatatctacctaagctttcccccaactgtacttgcattacatagtaataattaatctaatctacctgtaggcaaacccgcaataaaaaaaaccctcagtgtgttgtgccaaagcaaggacagaaaaacagcaatcttaaccctgaagcctg

SEQ ID NO: 13457 - DNA, 261 bp, Homo Sapiens
cattgctgcctttccaccccatctgcctcatttaccataaaagcaaattccaatcagcagttatttccaattcctcagcaaggccctcagactgacagtgtctccttgtacctatttaatatcagagtacttactgttgccagaatcgaaaccctaccagagcagtggtagagatgcattttaggaatttcccctctctggattattcccaaatgtatcatccctaaaatgttcttccttgaccccatattccccttgtct

SEQ ID NO: 13458 - DNA, 480 bp, Homo Sapiens
gaaccagcatctcttgcagcacactcaagacctgctgagagctgcggccggggcggcgggtgcggaggcccctcggggccgcgtgctcttcgaggagatcaaggtgcccagtgccatggctgtgctgatcacctgcgtctagttctctctggctcgagggggggccggccgctggcagggagctgtggtcagtgggggtcagccaggagcccagggagtcactctgggccctgcccccaactctgacactgcagttagggaatttttgtcgtcagcagccaagcgcagctgtcaggccagaaggagcagccgtgcaggaggcatttcaggcatcgttgaggggagtgttttggggccgcagagctctcaatgctgcctatcgggcggggggggcctcccgcccgactgtccagcttcaccctccagtctgaaagtgaagagcacagtatttatttaaaaaataaatgtgaattaaaatgg

SEQ ID NO: 13459 - DNA, 593 bp, Homo Sapiens
cccccatcaggtgcctgccaccccttcccagtcatccctttactcttacagtagcaaataagacccctgtctaatggggggagacaaatgtgtagacccttagccaccttggccagggctgactccttaaatttctggatgatgatgattgttatttaataaccagaggctcatataattggcctctttggatagagcctcatggcctccttactctcaccaaagcaatttttccctcaggggggctcccatcttcttacacagagaggcagctgaggcaggacagtggggctaactgtagaccaggcgagggcacgggctgctggggtggccctgcttccccagtgtacatattgtatctgtgtaacattttgtatattccaggggtagggccgccccctgtatcatacctagcagaggttggagctggcacatggggaggaggttctaataattatttggggctgggaaacttatttattgatagcataggacagaggaaggaggcggggatggggtcgtggcgccctggtgatgcgactcctgtttattttgctttttatttcggaataaatggatttagccataaaaaa

SEQ ID NO: 13460 - DNA, 520 bp, Homo Sapiens
agcaaggaattattttccagaatgacacccgcagcagaatgttggagtggaaatgatggctggctatgaagaggaggtcaacgtgtgtggtctcctcagtctctgtcagaggggtggggaggtgggaaacaggaatcctctgcaaagcccaatctgcagagtcgagacccctggtgctctctgccccgctgcctggcactggtcctttgcagccagccaccaacggcccccttgcccttgcagaggcagaagcctgcgtctgcacctgcacctctgaccgtttcagcaccctgggttgttaccacgtcctacaactctgacatttcttgttctcaagcgtttctcttcactgtgagttgtctttggtcctcccacttggtacttgtatcttgatgctttataatcctgactctcgacgtgttcatttatacaaaatcaggaataactttgtttttatactgattgcagcaatgttggctacatgtattattaaagaggatttttggaacaacttaaaaaa

SEQ ID NO: 13461 - DNA, 595 bp, Homo Sapiens
  misc_feature (458)..(466): n is a, c, g, or t
ttcgtggcacacagcaagtttgtcatcctcagtgcacacaaactggtgttcattggagacacgctgacacggcaggtgactgcccaggacattcgcaacaaagtcatgaactccagcaaccagctctgcgagcagctcaagaccatagtcatggcaaccaagatggccgccctccattaccccagcaccacggccctgcaggaaatggtgcaccaagtgacagacctttctagaaatgcccagctgttcaagcgctctttgctggagatggcaacgttctgagaagaaaaaaaagaggaaggggactgcgttaacggttactaaggaaaactggaaatactgtctggtttttgtaaatgttatctatttttgtagatattttatataaaaatgaaatattttaacattttatgggtcagtcaactttcagaaattcagggagctggagagggaaatcnnnnnnnnnccccctgagtggttcttatgtatacatagaagtatctgagacataaactgtacagaaaacttgtccacgtgcttttgtatgcccatgtattcatgtttgtttgtagatgtttgtctgatgcatttcatt

SEQ ID NO: 13462 - DNA, 578 bp, Homo Sapiens
gacctgcctaatgaactattgaactgtggagaagatagttctggataactctgtctacagcgagcacaggaatctacagaatctgttgatccctgactgcaatcaaggcagaccgcacacgggtcatggagtacatcagccgcctggacaactatgacgcactggacatcgcgagcatcgctgtcagcagcgcgctgtatgaggaggccttcaccgttttccacaagtttgatatgaatgcctcagcaatccaggtcctgatcgagcacattggaaacctggaccgggcatatgagtttgcggagagatgcaatgagcctgctgtgtggagtcagctggcccaagcccagctccagaaagatttggtgaaggaagctatcaactcctatatcagaggggacgacccttcctcttacctggaagttgttcagtcagccagcaggagcaacaactgggaggatctagttaaatttctgcagatggccaggaaaaagggccgtgagtcctatatagagactgaacttatttttgccttggctaaaaccagcctgggtgacagagcgagactccgtctcaag

SEQ ID NO: 13463 - DNA, 745 bp, Homo Sapiens
  misc_feature (16)..(16): n is a, c, g, or t
  misc_feature (100)..(100): n is a, c, g, or t
  misc_feature (161)..(161): n is a, c, g, or t
aaagcaatccaggttntgcgcattcatcttcttgagctggaaaaggttacgaactctgcaaagatttctgcagtcgatacattgcttgtctgaaaacaanaatgaacagtgaaactctgttgagtggagagcctggaagcccgtactcaccagtgcagtcncagcagattcaaagtgccatcacaggcaccatcagccctcagggaattgtggtgccggcgtccgcgctgcagcagggaaacgtagccatggcgacggtggcaggtcgcacagtgtatcagcctgtcacggtcatcactcccaaagcccaagtggtcacacagacattgtagcctggcacaattaggatccagaactaccagctctcagttacagttaaaccaagatctcagcatcttgcatcaagatgatggttcatctaagaacaagaggggcgtcctgccaaagcatgccacgaacgtgatgcggtcctggctcttccagcacatcgggcatccctacccaacagaggatgagaaaaaacagattgctgctcagacaaatttgacactactccaagtcaacaactggttcatcaatgccagaagacgaattcttcagccaatgttggattcaaaatgttcagagaccccccaaacaaagaaaaaaagtgctcagaaccggccagttcagaggttttggcctgattctattgcatcaggagtcgcccagccaccgccgagcgagctcaccatgtcggaaggta

SEQ ID NO: 13464 - DNA, 831 bp, Homo Sapiens
ctcctcagcttctgtaggggtccctaggactgcattctggccaagactgcccacatgggaacagacacaggtccccctaaggaagttaggatgctgtcaggaagggaaatggttattgcaaaaccctcctaaatgtcaatcagctatatgtagaatcaggatccagttaacttcctacaagattgtaacaacaggctggatctaacaagatatactacaaacatatgtagaatcctacattaagagtctatataccagtggtacatgaagagatgggaagactttactactagatcaattgggtaacaaagtaatgtggctgctagaaacattaatgcagtgtgaggccgtatgaatggagtagaatcctggaaaggagaggtgaaggttcagctttactcccaacaaggttcatttccaagagtcctactttcagaggggcgttgttgagctggtaagaagcaaacagagaagagattccacatggtgagaacccagaatcctgtcctgcaaggaacagctgaaaaactcggagtgtttgtcctggagaaagaagactctagagaaatgagagatgcctttacaattctgaagtggctccaacaaggaaaacagagctggtcaggtcatgtgtgaaacgggcaaggcctgcaccctctcccagagtcaagcagctgaatgcaggccccaccatttaccagccattagggatggaatattcttcaaactgcaacacgtcagacacaactggggcctgatgtattgcttttctgtgagagctagaggtaggaagccattgggagggagatgtcagctcagccctaggaagaa

SEQ ID NO: 13465 - DNA, 518 bp, Homo Sapiens
cgcctgcctgtgtccagggtggaagcagcactgccttactgggtccctctgtccctgagaccccgaaagcagcacccctgctggatgcatgctgctggcacaactgctggcggatctgcggtgatgagtgcctgttgtccaagttccagcagctccaggccccctaccaggaccagctaccggctcctgcagcgcgtctgctgcccctcggcctcctgaccctcctccaggccatcccgagggtcatcatggccattcgccagtgttttggggtttgaagttggaatcttcagctactgtcaagaacagccacaaaaatgtgtcacgatcaagatctttgagagtccaccaatcaggaggcgtctgtgacagtcgctgtcttctcagaacagaatccacacccaggattcaacccaaatgatttctcatcaggtgattcttggttgtagcaaagttcatgtgaatgtgggtgagtttctgttatgaatgtggtcaataaatgttatttgtgaaactct

SEQ ID NO: 13466 - DNA, 501 bp, Homo Sapiens
agggagggtgtgctgtctagctctagttcctgaaacagacgctccgaatttgagttagttatcccttggccgtcttagtactcctcgggtttaatcttatttccacagagtttcttctgccgggatctccaccgaggttaccgaacaaaaacagcacagagcccagactggaggcagacccgggcgctgtctctgctaggcttatttacgtttagggcttttctttcctttttttaaagtgatgggggaaggctcattgtggtggcatggaacagttccgtttgcttcaaaacaacaggacggaaccacgcgaaaactagaaccagaggagggggcatgcgtttcttcaagtcagccaaacagcatctggtctttgaaagcgcaatttcatcaagaaactcctgttggatccctcctaactgtggaccaaaataagccaacaggaacgggtgtttacttaatggctagtttctgtttgaaatgggaggagggatccctagc

SEQ ID NO: 13467 - DNA, 809 bp, Homo Sapiens
  misc_feature (110)..(110): n is a, c, g, or t
  misc_feature (187)..(187): n is a, c, g, or t
  misc_feature (206)..(206): n is a, c, g, or t
  misc_feature (227)..(227): n is a, c, g, or t
atctctgatgctgaatcagcatgtcaagagggatggagacgacatggtggattctgttacaaaatcgacacagtccttcgaagctttgacccagcttccagcggttatanctgtcctcatgcactggtaacagtacaaccaggtatgaacaggctttattacccagtttgatcagtagtgtggtagnaatgaaggacagttatttntggatagctcttcaggaccanaatgatacgggagaatacacttggaagccagtagggcagaaacccgagccggtgcagtacacacactggaacacacaccagccgcgctacagtggtggctgtgttgccatgcgaggaaggcatccacttggtcgctgggaagtgaagcactgtcggcactttaaggcaatgtccttgtgcaagcagccagttgaaaatcaggaaaaagcagagtatgaagagagatggccctttcacccctgctatttggactgggagtcagagcctggtctggccagttgcttcaaggtatttcatagtgaaaaagttctgatgaaaagaacatggagagaagctgaagcattttgcgaagaatttggagctcatcttgcaagctttgcccatattgaggaagagaattttgtgaatgagctcttacattcaaaatttaattggtaaatacttgttaattatgaaaaattacagtcaaatattctatctcccagtaatggcttctgagggtgagtatcccaagtagttgtttaaaattcccatatttgtattatgcccaaagccaagaaaaataaaagagaatatagtttt

SEQ ID NO: 13468 - DNA, 719 bp, Homo Sapiens
  misc_feature (664)..(677): n is a, c, g, or t
  misc_feature (687)..(687): n is a, c, g, or t
ccacgcgtccgcggacgcgtgggtcgacccacgcgtccggagaagcctgctctgcatttggctgctctgaacatgccattttctggggacattcgagctgattttcagtgcttcaagcaggccagagctgcaggactgttgtccacctaccgagcattcttatcttcccatttgcaagatctgtccaccattgtgaggaaagcagagagatacagccttcccatagtgaacctcaagggccaagtactttttaataattgggactcaattttttctggccacggaggtcagttcaatatgcatattccaatatactcctttgatggtcgagacataatgacagatccttcttggccccagaaagtcatttggcatggctccagccccccagggcgtcccccttgtggataactactgtgaagcatggcgaaccgcggacacagcggtcacgggacttgcctccccgctgagcacggggaagattctggaccagaaagcatacagctgtgctaatcggctaattgtcctatgtatcgaaaacagtttcatgacagacgctaggaagtaatggccttctgatgattcttaaagagttttcaattttttcttatgtgaagagttgacactgaaatctaaaatgtttaattgttgtaaatattacagnnnnnnnnnnnnnnactacatatnctttacaacagcaaccaaagaaaacatacctc

SEQ ID NO: 13469 - DNA, 808 bp, Homo Sapiens
cctaatgcctcccgaatgccatggccgggctcggccaccccgccgccttcggccgggccacccacgccgtggtgcgggcgctacccgagtcgctcggccagcacgcgctgagaagcgccaagggcgaggaggtggacgtcgcccgcgcggaacggcagcaccagctctacgtgggcgtgctgggcagcaagctggggctgcaggtggtggagctgccggccgacgagagccttccggactgcgtcttcgtggaggacgtggccgtggtgtgcgaggagacggccctcatcacccgacccggggcgccgagccggaggaaggaggttgacatgatgaaagaagcattagaaaaacttcagctcaatatagtagagatgaaagatgaaaatgcaactttagatggcggagatgttttattcacaggcagagaattttttgtgggcctttccaaaaggacaaatcaacgaggtgctgaaatcttggctgatacttttaaggactatgcagtctccacagtgccagtggcagatgggttgcatttgaagagttttctgcagcatggctgggcctaacctgatcgcaaatgggtctagtgaatctgcacagaaggcccttaagatcatgcaacagattgagtgaccagccgtacgacaaaactcactgtggcctgatgaccttagcagcaaacgtgtatatattctaaattattccccaacaaagggcccggtcttgcttggacggaacccggaagagtatccagaaagtgcaaaggttatgaacaaacttgaggacctaatggtgatccccg

SEQ ID NO: 13470 - DNA, 552 bp, Homo Sapiens
  misc_feature (63)..(63): n is a, c, g, or t
ctcttcccttctctagaaataactcctccttgtacttagtaaggcaaacattcacttcaagantaggaaatgtaaatgctctctgctcagcggccgcagctaattattacttcacacagtaagatcagtgtttgctaagtgttatcagccaatgtacagcaccccccaacaccgtcaaacgttgttccagttattttactttaaaagaggatttaaataatgcgacgtgctttccactgagccactaagtaggtgtggacgcacaaccttcaacactaattgccctttactaagccgaccagggctagacactaagccagaaaagccttttccagagtttcctcttccgcacaaaagctttccttctgtcactccacccaaccacccagctcctcccttaagtgtttgaaagataattctaaaagtctcctcccccgaaccgctgcgtttcttaaggccacaccattttaaaaatactgtattgcttttgccaggctgttgggacctcttccatctcatttctatctaagagtggttggtacacacgaggac

SEQ ID NO: 13471 - DNA, 634 bp, Homo Sapiens
gaacagttcaatcctgggctgcgaaatttaataaacctggggaaaaattatgagaaagctgtaaacgctatgatcctggcaggaaaagcatactacgatggagtggccaagatcggtgagattgcaactgggtcccccgtgtcaactgaactgggacatgtcctcatagagatttcaagtacccacaagaaactcaacgagagtcttgatgaaaattttaaaaaattccacaaagagattatccatgagctggagaagaagatagaacttgacgtgaaatatatgaacgcaactctaaaaagataccaaacagaacacaagaataaattagagtctttggagaaatcccaagctgagttgaagaagatcagaaggaaaagccaaggaagccgaaacgcactcaaatatgaacacaaagaaattgagtatgtggagaccgttacttctcgtcagagtgaaatccagaaattcattgcagatggttgcaaagaggctctgcttgaagagaagaggcgcttctgctttctggttgataagcactgtggctttgcaaaccacatacattattatcacttacagtctgcagaactactgaattccaagctgcctcggtggcaggagacctgtgttgatg

SEQ ID NO: 13472 - DNA, 518 bp, Homo Sapiens
atcatttgctattttctattctcccttgttattttaatctaagcattttcccccgtttctcatattttaaccatatgttcggtagataactaaacagtatgatctggttggcattttcttcctgatgatgggagcgtcattcttttgtcttcatggttacttgtgtgatataacatacatctgttaaagaaaatcacttctttctaggggagggaggtagaaaagtatctttcaaacctgggtttttgagtttgtgtcttgtcttaactttgtgttggctctaacttaaacatgctgatatgtgttttcaagaattttgtttaaggaagtattgtatggaagtccacaaaatgaaggaagttcatctaggttttaatatgtaagcaagataacacacaagtgtaccaagtgattattaactttgttgttttacaaatttgtatgaacttggagtatctgttggccattactatacatgtgcaaataaatgaggcttagacttgtgtgactgcttaaaa

SEQ ID NO: 13473 - DNA, 656 bp, Homo Sapiens
aaagtattgagatcttattgcttggaggggagatgttacggaatggtggtcggggttcgaagtggtgatcgagcagattgaagtagcatgtatcaggatgattgggagaatgaggagaagagcatgttccggatcccttggaaaaacgctggcaagcaagattataatcaggaagtggatgcctccatttttaaggcctgggcagtttttaaagggaagtttaaagaaggggacaaagctgaaccagccacttggaagacgaggttacgctgtgctttgaataagagcccagattttgaggaagtgacggaccggtcccaactggacatttccgagccatacaaagtttaccgaattgttcctgaggaagagcaaaaatgcaaactaggcgtggcaactgctggctgcgtgaatgaagttacagggatggagtgcggtcgctctgaaatcgacgagctgatcaaggagccttctgtggacgattacatggggatgatcaaaaggagcccttccccgccggaggcctgtcggagtcagctccttccagactggtgggcgcagcagcccagcacaggcgtgccgctggtgacggggtacaccacctacgacgcgcaccattcagcattctcccagatggtgatcagcttctactatgg

SEQ ID NO: 13474 - DNA, 283 bp, Homo Sapiens
agccaagagcactgggattggaacccaactccatcactaactggaaatgagaccctgggcaagtctgttcctctccctgagcctcagaagcctcgtttatgattgaaggcaatagcccccccactctgcctgcccacagggcagctgtcaggtcacatgggctcatcccagctgtgggcctcccagcatagaaagtgtgctgcccaacacatacacaaatgccacgcatgctgcctgatgtcatgccaaggggactggtgttatccagtcgtctccagccacc

SEQ ID NO: 13475 - DNA, 296 bp, Homo Sapiens
caggaccaagaagctacaggcaggcacagtttagctcctgcagagacccagcttttcacaagttggagccttccagagatagagggactgtggtaggtggtgacccacccatcactggaggtggaagcagaggccgtttgccagggatgctggagaggggattcaagcatctggctgggcaacgtgatgctcagggccgtctccactcagggcttaggggagtctgtgagtagaagagctttaggtgatttgtttggtgggggaaggcaagtacacagcttggcgcttctccgagt

SEQ ID NO: 13476 - DNA, 258 bp, Homo Sapiens
tgagaggacaactcagaaagcctgtgtttaatagggacctgtcatggtctgcaaggctctcggcacatgggtgccccatgcccagctacttctcatccaccttttccaaggactggggcttctcctggggcaagtcttccagcattaggctcagcacatgcacgatctcatagtacagctcttgaagcttgtggacagttgtgtcctggtagtccagagtggaaaagtagatatcgatgaagggtaagctagtgccaa

SEQ ID NO: 13477 - DNA, 327 bp, Homo Sapiens
cgacaatgcatctgtgagttacagctacctgcctccactgtaagacaacccaaaaccctgtctccagcatacaaaaacttcagaacatccaagccacatctcccaggggctccttcaaaacctccctgtggaccttgcttcatatgccaaaagcctggccactgggcctcagaatgcctgcagcccgggattcctcctaagctgtgccctgtctgtgcgggcccccactggaagtcggactgtccaactcacatagctgccactcctaaagctcccagagctcaaacccaacgttccttggcgcttctccgagtgggaatcctctag

SEQ ID NO: 13478 - DNA, 360 bp, Homo Sapiens
tttcccctatttgtcccttgtcactttgttgcaagctagaaatctgtgggttatacatagggcagctctttgtgaaagtggtttattccactggagaaaggggattgaaaatcagttagaaccaatgtatttcttgccccacggaacactattcctataagatagctgaaagaagctgctgtgaggagctcagctccaaacacaggatcagcaccttgtataggaattcccatgaattatgacttctcattctgttttatcagagtgcatatatgtcctacttcaggaaaagtaaaacagtcatttacgaaagaaagtcaatctgtatcctaagcattttaataaaaagttaaaacaaaa

SEQ ID NO: 13479 - DNA, 544 bp, Homo Sapiens
ttttattgaaaaaaaattatattttggaagaactcactacataaggtgacagaattccaaaatcaaattacatgaaaatatacatcgcaatttctttgtacaataggtgagaaaaatctgcagtatagaagaatagaggcagagaaatatgaaggactaaggagaagggtatgagagtaaataggatttgtaatagcaaacccagaagttaagtagaaagcctgtagctgtgcatgcttcatttatccaaccttaataccaggcaactgaagagggaaaagtcagatttgctattgtttggggaaattttcagtaagttgaattaagaaccatctatttttagttctcaggggtaatgactgggatcaagagctcacaacggccaataaatgttattgctatatccaatccaagaggtgggtgcaactagaatacaaaaaggacaaagcacctagtgatgactccttcgaagtcatcattaaaaatcaagtaattgctcattaagtatttcagtatttgaactaaatcatttgagaacattctg

SEQ ID NO: 13480 - DNA, 551 bp, Homo Sapiens
cttcagaactggacagagaagtgtgacaatctctggtgggatgcattcacgactgagttctttgaggatgatgccatgttgaccatcactttctgcctggaggatggaccaaagagatacaccattggccggaccctgatcccacgctacttccgcagcatctttgaggggggtgctacggagctagactatgctcttaagcaccccaaggaggcattccacagcaactttgctgtccctcgactgtgaccagggcagcatggcgacccagcatggcaagcccatgttcacccaggtgtgtgtggagggccggttgtacctggagttcatgtttgacgacatgatgcggataaagacgtggcacttcagcatccggcagcaccgagagctcatcccccgcagcatccttgccatgcatgcccaagacccccagatgttggatcagctctccaaaaacatcactcggtgtgggctgtccaattccactctcaactacctccgactctgtgtgatactcgagcccatgcaataaagagacttttcggtttgag

SEQ ID NO: 13481 - DNA, 352 bp, Homo Sapiens
aggaaatccactcggagaagcgccaagcatgtttcctatagaaatgggtcaggacaggtggaatcgttggtagccgtgtctgacctaacactatactaagaccagcctccagccccagcccctcaccaacgctaagcatgaaaccaattttccgtctacctaggagcatgtgtttgatatcactgcacacccagggcacagagcttcggcattacaattcttggagcgtgtctgtctcctcgtgggtcctgtccagacctccagtcactcacagagaccctcacatgaccagcacccagggtccgactcccccagccaagcccagcgctgaccacaacctgcagccagcggc

SEQ ID NO: 13482 - DNA, 474 bp, Homo Sapiens
ggaggatggagccgctgaaggtggaaaagttcgcaaccgccaacaggggaaacgggctgcgcgccgtgaccccgctgcgccccggagagctactcttccgctcggatcccttggcgtacacggtgtgcaaggggagtcgtggcgtcgtctgcgaccgctgccttctcgggaaggaaaagctgatgcgatgctctcagtgccgcgtcgccaaatactgtagtgctaagtgtcagaaaaaagcttggccagaccacaagcgggaatgcaaatgccttaaaagctgcaaacccagatatcctccagactccgttcgacttcttggcagagttgtcttcaaactcatggatggagcaccttcagaatcagacaatacttgcaaaagtcctcagcacttattcccaacacttttgaaccttacaataaaccatgtttatcataagaaggtgcaacctgtcaatgggtcccgcctgcgta

SEQ ID NO: 13483 - DNA, 824 bp, Homo Sapiens
  misc_feature (690)..(690): n is a, c, g, or t
  misc_feature (702)..(702): n is a, c, g, or t
  misc_feature (704)..(704): n is a, c, g, or t
  misc_feature (716)..(716): n is a, c, g, or t
  misc_feature (722)..(722): n is a, c, g, or t
  misc_feature (799)..(799): n is a, c, g, or t
gcggccgcgagtcccctctcgaggagtcccaagttgcgtccccgcagctggcgtggccatgaagtcaccagtgcaccaccaccgggccacacccaggcttccctgaaggccccttaaaaatgtacaaaaaagtgaagtgttctctatataaataagaaaggccaaccaggctccccgccggtcaagcccaggcagctggggaggcccggcttgtttcagaccaagattcccggaagcaccagcagcccagccgcgccccctcctcccgcctgccgcgcttggtccgtgcatgctcctcctcgcacccggctcaggtgtgaggaaagcccggcgcttctgaggcagctgtgtggacagtctccacgtaggcggcactggcctggcgtccagccaggagtgtccagctcgagccctcctggcatctgcacaggcggccccgcccatccccgctaggagatcttgcagttactccgcgagcagttctggggggggctctggggtggacggatggacttggacctcttgaggctgttgcccttgctgccgccgcccccggccccgctggccagggagtaggaacggccgtgcatcatgaccgcgttcatgccgttggccatcgagaaaggacttgagggggctcttgatggtgacgggcaatggaagcttgtcgataggtgcaccggggtgcangagacgatggcncnggcagcagagtncctganggctgacaactcggttggcccctcagacttctccatgcgtgccgatgagccgatgcggataagctctgaaggactcnatgcacgtagtgccaagggctgact

SEQ ID NO: 13484 - DNA, 369 bp, Homo Sapiens
acttctagagggagaagactgtgcggcacaggaaacagcaaacagtggggtgatctgcagcccagagaccttcaaatgcgaacactataaactccaggcttgattccaacaggcgtgggatcagatttggtgatggaaaaagcgctgtttccttgcctgctttctccaagacagattttcggaacacatttccctaccctaaagcgacatcccagtagtgtttggaattttctgttcatagatattggaagagagaatttgctttatctgttgtctagagctcatcagtaacagtattcagttagcagacagaagtgtagtatgctgtatgaatattttatattaaaatatgaaggtttgagagcaggc

SEQ ID NO: 13485 - DNA, 593 bp, Homo Sapiens
aatacttctggaagcttaacaaaactaaccctgctgtccttttattgttttttaattaatatttatgttttaattgatagcaaaatagtttatgggtttggaaacttgcatgaaaatattttagccccctcagatgttcctgcagtgctgaaattcactctacggaagtaaccgcaaaactctagagggggagttgagcaggcgccagggctgtcatcaacatggatatgacatttcacaacggtgactagttgaatcccttgtaacgtagtagttgtctgctctttgtccatgtgttaatgaggactgcaaagtcccgtctgttgtgattcctaggacttttcctcaagaggaaatctggatttccacctaccgcttacctgaaatgcaggatcacctacttactgtattctacagtattatatgacatagtataatgacacaatatcaaaagtaaacatgtaatgacaatacatactaacattcttgtaggagtggttagagaagctgatgcctcatttctacattctgtcattagctattatcatctaacgtttcagtgtatccttacagaaataaagcagcatatgaaa

SEQ ID NO: 13486 - DNA, 739 bp, Homo Sapiens
aaataaataaggttttctgtgatgtgacgccagtttacataagagaatatcactccgatggtcggtttctgactgtcacgctaagggcaactgtaaactggaataataatgcactcgcaaccaggtaaacttagatacactagtttgtttaaaattatagatttactgtacatgacttgtaatatactataatttgtatttgtaaagagatggtctatattttgtaattactgtattgtatttgaactgcagcaatatccatgggtcctaataattgtagttccccactaaaatctagaaattattagtatttttactcgggctatccagaagtagaagaaatagagccaattctcatttattcagcgaaaatcctctggggttaaaattttaagtttgaaagaacttgacactacagaaatttttctaaaatattttgagtcactataaacctatcatctttccacaagatataccagatgactatttgcagtcttttctttgggcaagagttccatgattttgatactgtacctttggatccaccatgggttgcaactgtctttggttttgtttgtttgacttgaaccaccctctggtaagtaagtgaattacagagcaggtccagctggctgctctgccccttgggtatccatagttacggttttctctgtggcccacccagggtgttttttgcatcgctggtgcagaaatgcacaggtggatgagatatagctgc

SEQ ID NO: 13487 - DNA, 514 bp, Homo Sapiens
caaggaatcagaaattacctagaagcaccatgttttttctatgaccttttcggtccttcaggtcattttaaggtccactgcagggggttagtgagaaagggtatactttgtggtatgttttgctttcctaatagggacatgaaggaaacccagcaatttgctgttatgtgaatggcctgtagagcagagtcaagagcggtgtgctttgcccgactgctcccatcaggaataggagagtagacagagatcttccacatcccaggcttctgctgctgctttaaaagctctgtccttggagcctcccgctccctgaagtgtctcgccccctgcacagcactggcctttcggaagcatcccagtagggttttctgaggctcgctggtgactcatgccctaattgcaatcctctgcttttatcttgactttgaaggatctaacactgctctctcttccaaaggggaaaaaaagattcatttgttttgagcaataaactaatacaaaatgatggccaaaa

SEQ ID NO: 13488 - DNA, 546 bp, Homo Sapiens
gacggcaagcggttcctgtctgcgcttgcgccggcgcctctgccgacccggcctgcacgcacgcgcatgcccgtagcgcgcggagccgcggtggccggcagcactgcgcgtgcgcggtgaggagcccgctaaggagcggcgctggcggacgtcgggctggctgcccgtgacgtcgtgcggagagctttaaagtgcgggccgggccgggcgtccgagggtctggtcgggagtcgggccgcgtctccgcagcagccctccgcggcatgaggcgctgccggcgcccctgccccgcgggacgtggagaaggtggaggaggaagaagccccgttgtcgccaccgttgcatgacccgccgctcctgaggccctaccccacgcccggaccctcgacgccccccgccgggtcccccactcacgcatgggggttcggcgctaaggacccccctccctccgggggccccggggcgcgtccccttagagccatgcccggctgccccgcccgccccggaggaccctagagcagcgtcgtgggggccataggcggccgc

SEQ ID NO: 13489 - DNA, 601 bp, Homo Sapiens
tttacactgtccttggtctgttaaactgtttaatgaatgcataaaaaggcagaaaaatatataaagccaaaagctcataataaaattaaatcatgatacaaccaccacaggcaattaccatcaaatacattcccatgatttacaaatgtatcgcttatacagaggaagttgcaaaatcactgccagtacagacacatccagtctaattaactatcgtctattcatacaacagcaacaactgcagctcctgagaccacagaaggacacagtgagcagctggtgactgagccagggtagcctccgatcaataactgatcagagtaatgagacttcgagaggaatgcctataagaaatctcaaaaggtatttgtttgggtgcagaaacaaatgcaccctccacatttggattttctctagaagaatctgtggccaaatctcttatccaatggaggtactgagtggctggatcagttaccatgcaagctcacgatgaatgagattgaatttggttctgtgtgcacactgggctctggggagggaggacacccctgtgtgttgctgctgccttccgtgctgtctactgtatccttcatgtgtctcc

SEQ ID NO: 13490 - DNA, 838 bp, Homo Sapiens
  misc_feature (18)..(18): n is a, c, g, or t
aagagagcatctggaganctaatgacagttgccagatggatgaggaagtttatcgcaaaccatcctgactacaagcaagacagtgtcataactgatgaaatgaataatagccttattttgaagtgtaaccaaattgcaaatgaattatgtgaatgcccagagttacttggatcagcatttaggaaagtaaaatatagtggaagtaaaactgactcatccaactagacattctacagaaagaaaaatgcattattgacgaactggctacagtaccatgcctctcagccagcccgtgtgtataatatgaagaccaaatgatagaactgtactgttttctgggccagtgagccagaaattgattaaggctttctttggtaggtaaatctagagtttatacagtgtacatgtacatagtaaagtatttttgattaacaatgtattttaataacatatctaaagtcatcatgaactggcttgtacatttttaaattcttactctggagcaacctactgtctaagcagttttgtaaatgtactggtaattgtacaatacttgcattccagagttaaaatgtttactgtaaatttttgttcttttaaagactacctgggacctgatttattgaaatttttctctttaaaaacattttctctcgttaattttcctttgtcatttcctttgttgtctacattaaatcaaatgaatccattgaaagtgcttcaagggtaatcttgggtttctagccccttatctatgatgtttcttttgcaattggaataatcacttggtcaccttgcccccagctttcccctctgaataaatacccaatgaactctg

SEQ ID NO: 13491 - DNA, 401 bp, Homo Sapiens
aaggggcgctcggtgctggatgccaccggacagcggtgccgggtggtcaagcgcagctttgccttcccgagcttcctggaggaggatgtggtcgatggggcagacacgtttgacttctcctcctacctctgccctgtgagcccatccataaggctctcagatgggacattgtgggaaaggctttggccatggtctgggggcagagaacaaggggggagacacaagtagacctcaggtagaacgacactgggcggagccaccccagggcctgctcccagggagtgctcgaggcgcatcaggcccgttttttaccagtttatatcacggtcttcatttttaaaagtaacgctaactttgtagggacgatgtctcatggattaaataatattctttatggcagt

SEQ ID NO: 13492 - DNA, 923 bp, Homo Sapiens
  misc_feature (495)..(495): n is a, c, g, or t
ctctgattccctcttctgcctgcaccagaccagccccagccctttattcctctccattttcactccttccagcctctgtccctgaactgccactggcaacccatgggacctcaggaccagagactgcttgactcatctggggagggtaagttcacgggggacaaaaaaatgattcctaaagaagaggcttcctagaccagcacaggctcgagaaagacatcccctaggcctggacttctgagcagctttagccaggctccggacggcagccagaggaggcctttccccattgctcctttccccattgctcaatggattccatgtttctttttcttggggggagcagggagggagaaaggtagaaaaatggcagccacctttccaagaaaaatataaagggtccaagctgtatagtatttgtcagtatttttttctgtaaaattcaaacacacacaaaagaaaaatttatttaaataaaatactttgaaaatgaanagtcttgatgtagtcagatggttactttcttaacattaggtattacccccactcagacatcactcagaaatgatcaatgcagggactctttctgtgacacaaatgtcccagccctccctggtcaccgccttcgccatggtagagtcgtaggtctgaggatgaggaatgtggctgtctcacccttgcttgcaaaacagatggccttggagaccagactccctcaaaggtgccagctacaggaaaaatacactgatgttccttggcaacactttacagaactttccatcaatgaggtccatcaatggcttcttaaaggaaaaggggggaaatagcaaaaacctaaggaagaatggacctttgagttaaatccagtgtttgttgggaaaggagggatcaaaaacctctatagtagccactagggcaaaaac

SEQ ID NO: 13493 - DNA, 566 bp, Homo Sapiens
taaagaaaatacagggaagacactaagcaaacactggtccaatgggggctctcctcacttcccgagatggtcaaatggcacacttgtctgtgaggctgggatccgggagacctcttgccgcccagtgaggtctgaggaggagacgttggcgggcgcacccctgtgcagcctcatactcaccttcctctcccggtcgacccgcgagatcgctctgggagaagtattgccagccggctggatgcgggaggctggcgtggaagccacgggctcggcggcactgcggacccggttggcaagtggcccccgtgggtgggccagggggcagggctcgggtcgcggaccccgtagctgccccatcctctcctcgcgttcgtgttctcgccgctcccggtccacatcctcgggattccgggctgcaccctgcaagggatgcacggaaaaagacaccagtcagccccagaggccaagggtgctcgtgggcccaagcaggccctggaaggggcacaggaaagggggaaggggaagggccagggtgggactatcttcaaggaaaaacccttcttggc

SEQ ID NO: 13494 - DNA, 564 bp, Homo Sapiens
gagcaaacttattgcagcgaacaccttccgtgctgtggcgagcctgcatccaactcaaggctttaaatcttccacaggccccggggaacagctcggaacgctctgtggcatacaggagacacagagtcccaggtgcggctgctgtggaaggacccgcgaaacgtgggttggaaggacaagaagtcctatcgttggttcctgcagcaccggccccaagtgggctacatcagggtgcgattctatgagggccctgagctggtggccgacagcaacgtggtcttggacacaaccatgcggggtggccgcctgggggtcttctgcttctcccaggagaacatcatctgggccaaccctgcgttaccgctgcaatgacaccatcccagaggactatgagacccatcagctgcggcaagcctagggaccagggtgaggacccgccggatgacagccaccctcaccgcggctggatgggggctctgcacccagccccaaggggtggccgtcctgagggggaagtgagaagggctcagagaggacaaaataaaatgtccgtgcagggaaaaa

SEQ ID NO: 13495 - DNA, 482 bp, Homo Sapiens
ggcacgggactttacctacgtacaaccccgacttcataatggtgctttcaaacagcgagatgagtaaaaacatcagcttccacgttgccttctgcgcaaagggtttcaccaaggatggagaaagggagacagcttgcagatggcgcgttctcacggtgggctcttccccttggtttgtaacgaagtgaaggaggagaacttgggagccaggttctccctgccaaaaagggggctagatgaggtggtcgggcccgtggacagctgagagtgggattcatccagactcatgcaataaccctttgattgttttctaaaaggagactccctcggcaagatggcagagggtacggagtcttcaggcccagtttctcactttagccaattcgagggctccttgtggtgggatcagaactaatccagagtgtgggaaagtgacagtcaaaaccccacctggagcaaataaaaaaacatacaaaacgtaa

SEQ ID NO: 13496 - DNA, 896 bp, Homo Sapiens
cttaatttaaaaaaagttttattaaatcatttagacttgaaagaagtcacaagttaacacacttaagtgtgttctgtacaccaccaacccaaatggattgatttcagaatttttataaataaaacataaacatatttacagtgaaaaataaaaacatgttagcaagtgagatgattaaactgttacctataatcagtttgggggaagtaccaacctacaggattacatataagacacttaagatttcattaggcttaaaaagtccatagttgaagaagttagttgtaatatatatgatccatttcttactacggcttttttcctcccaaaactagacctttcaaccaatttacataaaaagcttcattttccctttattggaggtaaaagtacaaaaagctgtaaacccaccctagaaccatctaaggaataaagctattgaatgctacaaataggactataaaactacggacataaaccgttatacagtttgtgctacttgtcctccaaaatagtgcagattcctaatttacccgccagggacaaaaagtggagtcagctttttctagaaatcagtttcaaaatcgtcatagtctctagaaagcatattgtctagaacaatacagttaccacacaggggtgactttccttcttctgcattataaaagtatatccgttttagttctcactatatatatatattagggattgctgctacctccttaggcaaatggtgagggctattgagcttggcccagcaggccagtcttctggagactaccgagagagcaaagatagcccttgcctttaagtataggcatatctcaggagttgggacacaattaggttatgccgcgcaagatccggcttagatagtgatataagaaaagtagtca

SEQ ID NO: 13497 - DNA, 692 bp, Homo Sapiens
  misc_feature (39)..(39): n is a, c, g, or t
  misc_feature (135)..(135): n is a, c, g, or t
  misc_feature (541)..(568): n is a, c, g, or t
ttcttcattctgtctctgagaagacagcgaataccgaangatctactcctgtactcttaagcgtcgagcaattgaagattttgagtctatgaatacatacgtgcagacatctccatcatctgtgtttactagtanatcattttgttccttgcagaccccagatggggttcactgtgtggtgggcttcaccctcacccataggagattcaattataaggacaatacagatctaatagagttcaagactctgagtgaggaagaaatagaaaaagtgctgaaaaatatatttaatatttccttgcagagaaagcttgtgcccaaacatggtgatagattttttactatttagaataaggagtaaaacaatcttgtctatttgtcatccagctcaccagttatcaactgacgacctatcatgtatcttctgtacccttaccttattttgaagaaaatcctagacatcaaatcatttcacctataaaaatgtcatcatatataattaaacagctttttaaagaaacataaccacaaaccttttcannnnnnnnnnnnnnnnnnnnnnnnnnnngtattttaaagatggcctgtggttatcttggaaattggtgatttatgctagaaagcttttaatgttggtttattgttgaattcctagaaaagttttattggtagatgagtaaataaaatattgt

SEQ ID NO: 13498 - DNA, 194 bp, Homo Sapiens
gcggccgcctcttaagcgccgcagagccccagagggtagggcgggagaaggggagggggcttgaggagggagggacctgtacgccgagccctgtgcagcaggaagcggcgacacctgggatgccgacgcctctggcgcttgctctgtgttttaaaaaatctaatttaaacccctcttctttccctcccgcccct

SEQ ID NO: 13499 - DNA, 298 bp, Homo Sapiens
atatggctactacagctgggtgcagtggctcaataaacttttattgtttttacattacttttgcttggcttgctggtcttctttccttttacaatttgaaaataatttataaaaaccaactagataatctaagtgaccatatggcttagaaatttggataacagggctttaaatccttttcctctaagttaagggctgttgaactatagtctgtgggccaaatctgaccctctgcctacttcccagccatgcacatttgttcacatgtgtctgtggctgctttcctgctatactggcc

SEQ ID NO: 13500 - DNA, 533 bp, Homo Sapiens
cagtgcggtctggctaggcttagaagtattcatgtgatttttacctgacaagggaaggaagagctgctccacgtgcagagcaaggtttcagaatgagaggagaagagcaggcactgcagagggtgagggaaagggcagcagtggactgggaagccctcaggtggaggtcagcattgcttccctcagatcatgggtgaatttgaggaactcagttaatatctttgtatgttcctccctccataaggtgagaacaagcacatgctctgcccatgtcagaaattgtctagactagtgtttttcaaagtgcaaaagcctcaacccattactgagttgagaagccaacttaatggtttaacaggattgaccagcattttttccgaaaaaatcaaaaacatctgagtgtactgcatatagaaataggtggttttgcctcatgaatattctgtttctgtgtgttcctatattttactttgtattgtgaaggttttttgagagacagtccagcctgggtgacagaaaatctttgtctcaaa

SEQ ID NO: 13501 - DNA, 431 bp, Homo Sapiens
acactcggagaagagccaagcttctctgcactaaggcttatgacatgtgaatgttgccaagtcaaatataaatatagtctcaatgacatcacaatttacaaatgcatattccaagattaaaactgaatagggggaaaaaccccaaatgttttagaatacaggttaatcaaatgagttaagtgaaataagaaacatttaatttagtaggctatcctgttaaataagaagtttgtgtaggaaatataatcaaacagaactaaaaatcacgtctagtaaacgacacaaataatttctcaaatctttaagtctgacttaagttcaaagtctagctggtggggattaacaatctatatactctttatactaatcttagaactgtaaattctagaatgacaaactaatttattcattagttttcttttgacaacagt

SEQ ID NO: 13502 - DNA, 413 bp, Homo Sapiens
gccaagaggaagacattctttctgcaaggaaatttcttttaaattctgaactgctactacacacaagtgaaagtcaaccctatgtaaactggtgtcctctctctagccctctcccttactggcccacttctctctccgtagagagcctgaaaaactgccccaatgccacggtaaaggcgaggaagtcttggctggcgttgctgactcacagtcgccatccatctggacacaaagagagacctgtgggagtcgtagagggtactgttagccccggtccatgcagggggttcagccgagcccaagactcaaagctgctttcctttcaggatttgtagtaacgtaaggtgataatggccaaaagtggttctctctcattaaaccaaccagtaaaagcgtatcctatttttttgcaa

SEQ ID NO: 13503 - DNA, 459 bp, Homo Sapiens
gatccccgttatgagcagaagaagaatattctgctgaagcagcaggtgccattcgccaagcccctgccaactttagccaaacccacagctgagcctggtcaagacaaccccgagtggctcatcagtgaggactgggcgctgctgcaggctgtaaagcagttacgggagctgcctttgaacctcacaatcgtgtcacctgctcacacacctaattgggatcttgtcagtgacgttgttaactcctgtagccgaatctaccgctcttccaaacagtgccggaatcgctacgagaatgtcatcattccacgagaggaggggaagagtaaaaacaaccgtcctctccgtacgagccagatctatgcccaggatgagaatgccacacacacccagctgtacacgagccactttgacttaatgaaaatgactgctggcaagaggagtcccccaatcaaacctctg

SEQ ID NO: 13504 - DNA, 1032 bp, Homo Sapiens
atccacgtgccattgtgacatggaagctggaggaggcgggtggacaattattcagcgacgtgaggatggcagcgttgattttcagaggacttggaaagaatataaagtgggatttggtaacccttcaggagaatattggctgggaaatgagtttgtttcgcaactgactaatcagcaacgctatgtgcttaaaatacaccttaaagactgggaagggaatgaggcttactcattgtatgaacatttctacctctcaagtgaagaactcaattataggattcaccttaaaggacttacagggacagccggcaaaataagcagcatcagccaaccaggaaatgatttttagcacaaagaatggagacaacgacaaatagtatttgcaaatgttcacaaatgctaacaggaggctggtggtttgatgcatgtggtccttccaacttgaacggaatgtactatccacagaggcagaacacaaataagttcaacggcattaaatggtactactgggaaaggctcaggctattcgctcaaggccacaaccatgatgatccgaccagcagatttctaaacatcccagtccacctgaggaactgtctcgaactattttcaaagacttaagcccagtgcactgaaagtcacggctgcgcactgtgtcctcttccaccacagagggcgtgtgctcggtgctgacgggacccacatgctccagattagagcctgtaaactttatcacttaaacttgcatcacttaacggaccaaagcaagaccctaaacatccataattgtgattagacagaacacctatgcaaagatgaacccgaggctgagaatcagactgacagtttacagacgctgctgtcacaaccaagaatgttatgtccaagtttatcagtaaataactggaaaacagaacacttatgttatacaatacagatcatcttggaactgcattcttctgagcactgtttatacactgtgtaaatacccatatgtcctgaattcaccatcactatcacaattaaaaggaa

SEQ ID NO: 13505 - DNA, 326 bp, Homo Sapiens
tcgagtcggtacatctacaggcaggacgaggagacggagacggggacggggacaggggaagggagggcaggggccgctacttgagcagccttcgcatggtgcccaacgaagggctcctgtactcccgcccgaagtggttccagtggttcaggtagttaaacagctggtagagcagcagccgctggtcgaagcccggagccttggggatcttccggtggtaggcggtgaagaaggatctggggaaccccccaaacatcaaggcgattgccagttcaaactcggaatggccatagaaggaagccgggtcgtaaataatgggccccacg

SEQ ID NO: 13506 - DNA, 301 bp, Homo Sapiens
gcgtctagaggatctccatctcaggcaggacgatctcaggccaggacagggaggatcctgtctggccttcagtttccatccccaggatccacttggtctgtgagatgctagaactccctttcaacagaattcacttgtggcctattagagctggaggcacccttagccacttcattcccctgatgggccctgactcttccccataatcactgaccagccttgacactcccctagcaaaccatcccagcactgcaccccaggcagccactcctagcctcgcccctggactgagatgggcacc

SEQ ID NO: 13507 - DNA, 306 bp, Homo Sapiens
gaggcgatctagaggatcccatctcaggcaggacgacccacactgtcaagactttccatacataattggaacaagcagtcaaatgtcaaccacttgtggagaacaccaaggacttccttggttttggatggcgtttttgtttttgaaggtaaaataaaataagacacaaataaaattgtacataaatgccaatgtctacactccataaaggtgatgcagtcacagcacaaagacacggcctgaccacaaagtgaaatgcaggttgcacttctcgcctcgtcccgggcctgagactgggatcctctc

SEQ ID NO: 13508 - DNA, 265 bp, Homo Sapiens
aacctgttgtgtgcgtgtgggggttaggattagtaaggtgaactgttcaggaattctctgcactagctgtgcagaagagcagataactagcgctgctctggcattaatcccaggaaccactagcagtagtgggcgccgccaatctaacatgagcacaggtgcttcatgacaaacattactagcatgttcaactgcaccatgttctggcactgtattttgaatgacattaatttattaaataaattgtatatattcaataaaaaaa

SEQ ID NO: 13509 - DNA, 273 bp, Homo Sapiens
ctggtgatctagaggatcccatctcaggccaggacgagctagcccgaactgacttcagcagctaccccaaaccaatcaagggtttgtttacgggagtgccaaaccagccctcggctgctatgagttggcaagatggccgagtctacttcttcaagggcaaagtctactggcgcctcaaccagcagcttcgagtagagaaaggctatcccagaaatatttcccacaactggatgcactgtcgtcctgcctgagatgggatcctctagaccacct

SEQ ID NO: 13510 - DNA, 349 bp, Homo Sapiens
gtggatcacagtggcgttggggtccccaaaatgagtcaattctggaccaaagtctagtatccttgagaagcctgggtacattttctctgttgcatagttaccctgctaagtgactgtagatccctttggggaaagctaagaggaaagtttacagtgtatctttttggcagtataataggatatttccccaaggaaaattggcctgggaagtggatggctctatttgatgaacaaggccaggcctctattcaccagtcctgcactggtgaatagacctttggcaagactccattggaagaaaaaaagcatgcttaaaaatcagtaagctttggccacgtgcagtggctca

SEQ ID NO: 13511 - DNA, 508 bp, Homo Sapiens
ttcttgatgggcagggctgtcctggggttgagctgtcgggcagtggccctgctgtttggctgtaacagtgcggccctggctgtgcatggaaacctggaggggccgggcatcgtgctcaagtacatcatggctggttgccccttgtttctgggtaatttttgggatgtgactgaccgcgacattgaccgctacacggaagctttgctgcaaggctggcttggagcaggcccaggggccccccttttttactatgtaaaccaggcccgccaagctccccgactcaagtattttattggggctgcacctatagcctatggcttgcctgtctttttgcggtaaccccatggagctgttttattgatgctagaagcctcataactgttttacctccaaggttagatttaatccttaggataactcttttaaagtgattttccccagtgttttaaatgaaacatttccttttgatttaacctcagtataataaagatacatcatttaaaccctg

SEQ ID NO: 13512 - DNA, 265 bp, Homo Sapiens
  misc_feature (13)..(13): n is a, c, g, or t
atctcaggcaggnacgaggcgggactgagtgtcctggggtgagttagcagggcacaggtgtttgagatgggggacccttaattttaaactgaataggattctttggggtgtggaattaatcctttctagatgtggaagagacctagaatgggaagaagctttagtattgcctggaaagcttcccccagagtttagttgctgggaccccaccctaagaacttgcttcagcctgtcgtcctgcctgagatgggatcctctagatcgc

SEQ ID NO: 13513 - DNA, 470 bp, Homo Sapiens
cctctgtgaggcttcagtggcctcagaaaccagagggtccagatagggggcctgcttgggccctctgctgccaactgctcaaacctgctttagctccagccacttgtggcaaacaacctcgtttccttacaaattccagcatgtgactttggtgccgttacttgtgaaaaatctattctgttgtctttgatgtgtccaagaaaattcgtgtagtttacgtaaaaatatctgactcacaagaaagccaactgtatgtcttgtgatgggacagttcataatgtagttgctagaccactttacaaattgttcttgtcaccagatgtgttcagacattgctgtgcaattgttggggagggtagggggaaaggcgagaggagatacttattggtctttttgtttaataccttccccaagaggggacagtctggccaacttgctccagtaatgcaataaagacattgcaataaagt

SEQ ID NO: 13514 - DNA, 330 bp, Homo Sapiens
tctcaggcaggacgagggaaagctcaccttggccacacggaaagctcctcccacagagtcagacataggccgaagtccctccgggggacctgggacgcagggcggagagccactaccccactcccggagtccttcttctctaggggctcttggagatgttgggggctcagggctcccagaaacccctgctgagttcatgctgcttagatttaacccatcactgtcaggcctgcagtcctgatccaatagggagcttccaggcctgagcccgggcctccctccccagcggtggccgccctcaccgtctcggtcgtcgtcctggcctgagat

SEQ ID NO: 13515 - DNA, 540 bp, Homo Sapiens
gtatctttaagttggattcaaatggccatttttctccaatttggtaaattggatatctttttttacaaatacgaccattaacctcagttaaatttttgtttgttttcctgtttgatgctgtctatttgcattgagtgtaagtcatttgaactaatggtataactcctaaagctttctctgctccagttatttttattaaatatttttcacttggcttatttttaaaactgggaacataaagtgcctgtatcttgtaaaacttcatttgtttcttttggttcagagaagttcatttatgttcaaagacgtttattcatgttcaacaggaaagacaaagtgtacgtgaatgctcgctgtctgatagggttccagctccatatatatagaaagatcgggggtgggatgggatggagtgagccccatccagttagttggactagttttaaataaaggttttccggtttgtgtttttttgaaccatactgtttagtaaaataaatacaatgaatgttgagtaaaaacacaacaacaaaaaataat

SEQ ID NO: 13516 - DNA, 485 bp, Homo Sapiens
cccagaaaatgtctgtgtaataatagacatgaaacattttcctcttttccacagagggcttaactgagaaccgtattgatttttattttagttacctcccctctagttttatgtgaaattagtagaatcagggaggacgggacttatgctgtggtaggcaacagaaaaaaacttctattgattttaatttaatatgaatactttaaagatcaacataccgattgaaatacaaatgttaatatgtgagaacctaggaagtattttaaatatttatgaaaatattttgttttaaaatgaactatgaatattgtacagttaatttcctcactgaggactgtgaacattcttatattatttcatgtatattgaagaacattgttatgcaatgctttgtgtaaagttattgtgaagattttattgtctttatttttaccaaagatttcccatagtttgagcattcaaagcaataaaatataaaaatgaaa

SEQ ID NO: 13517 - DNA, 457 bp, Homo Sapiens
gcgaccagctcttgctgaaaggtggctgggagaggtcctggtcacagtcggagtcagagtcccacgaggggagtggagggctcaggcactggtgcaccttgtggcctcttaggctcgaggccttgggacaggcccccgagcacaaagtgaggctgtctatggagttctgcagcacgtgcacagcagaccatatatcactcagttccttctggaggtcactgagtggttcaggaactcgaaagccttggtctgggcctgtaactggctcttgagtgactcaagttcacatcgcaggagcttctgggagtcgggaatcatcacaatggtcttggctttgactttggaagagctggtctccaagggcttctggtcatgctctcccatcagggaccacgaagccagtcctcagctgtgacggctgaagtttgattccgcgggacaccatcgtaattaaaag

SEQ ID NO: 13518 - DNA, 1035 bp, Homo Sapiens
ccaagaattcggcacgaggcataagaatcatacctgtaaaattaatgagattaaggagctgctgaagaaagctgcttcaaggactagaccttatctatttaaaggagatcacaaatttcctacaaacaaagagaacttaccagtggtgattctctatgccgaaatgggtactagaacatttagtgcatttcacaaagtattgtctgaaaaagctcaaaatgaggaaattctgtatgttcttcgccattatattcagaaaccaagctcacggaaaatgtacttatctgggtatggtgtggagctagcaattaagagtacagaatacaaagcactggatgatacccaagttaaaactgtgactaatactactgtagaggatggatatcgtttctggaaaacaggatactgggcatcacatcttttaagacggaaataccatatcagtgctttatatggagtgaatctcaagaagttcagcagaattgaagcaggtgacaggctcaggagccagtatcaagctctcagtcaagatccaaacagtctttcaaacctagaatcaggatctccccccataatatgagttaccaagtcgccattaagtctcttcctcaagactggctgtggtgtgaaacctgctgtgatgatgaatccaaacaaagagccaaaacaattgatctgtgcaataatcccaaaacaaaagaatccaaactaaaagctgctgccagaattgtcccagaatgggtggagtatgatgctgagataagacaactattagatcatcttgaaaacaagaagcaagatacaattttgacacatgatgaactctagcactggtgtatatgagaaggaaggcgaaagcatgacaggaaacctgccgcctgctggggaagtctggagcccctgctgagacgatttggaagtctcgttaagatcagtgacatattctttaattttaaaaaattgtaattatttaaaacagttatttaatgtattgaatgagtttaagttatataataaatgaccattgagtattta

SEQ ID NO: 13519 - DNA, 787 bp, Homo Sapiens
gatgcttttccgttcccggcccgtcccatccgccatatttcttcagcctttcttctcgatcacccgtgtattctttgaccagtaaatgaccacacctcaatgatggtaaaacagcatcatcagtaagctatcttatatgcctcatcctgtgagtttgagcttcaggaaacatgagtaaaagtatatgtaatgtatatagtcgtatatgtattctagcaagaaaaacatatttattttgacaaaggggaacactgactttctgaaggattcagaaagaaccttagtgaaaggttctcagtctctgagagtggaccctaattaacataaagaccattcatcagcgaataactactgagccactctagtgtgccagcacaggccagacatactagtgagccaggcacatctggccttgggaaactcatcctacaggggaaggccagtttttttcccttcaattcctcaagtctgggtggtgacaaggtaggggctaggtactggactaccacaggtttttaggaactaaggtgtttctcataaacacaaaatgttgggtgaaactgggaacaactactcagaagctaatttatttgcttaaatggaaagtgtgggagccactaccctctcttttgatctgccaaggatttcctctcagagctgttgcacagacagagattgtacttggtaagataccaaacaagacagatatggatctaaatttctaatgtgttctatgggtttcaattctgaaaaaagaaaatgaataaagattttaataaatattgat

SEQ ID NO: 13520 - DNA, 475 bp, Homo Sapiens
tcagcagaggctcacgtggccccagctggtgcgcccgctgtctcggtaaggggcgggttggtgtgttttccccttgtgtaccagagcacattccttaggggacggctttgggggtcccacgagacatggactaggagtttaagcaggacagtgtgcgtgcacgagctccgagcccagcacagacatgcctggaacccccgacgcctgctgctccctcctagggaacccatttccggggaacgccgtgactgtcgggcagcctggagcttcctgcagcctcctacgcatgggtccacgccacgtggcctgggctgccatcctgccgtcctcccactggcatcctggcaagggggcgttgcttttcctgggcggccttttatgtcttggagacacctgatgtaaagtttctgtaaatctatttcatatctgacccaccaaacagatttctctttaataaaaatcctttttgtaaaaa

SEQ ID NO: 13521 - DNA, 470 bp, Homo Sapiens
ctgtttaagactgtaacatggaaaaaatgtttatacgttaagtacaaaagggacataaaattgtatatacagaataacgactatgtaaacacaccaaaaatctatgcacagaaatgtctagggggaacatttaacaccaaaagattaacagtggtagcatttgggtggcaaacttgattctttctaaaattcccatattttccttaataagcagtaattataattacaacgggaaataatttctttaagtacccagtgcagtgtcactgtcaaataaacatcagtggctttggccccaattcttaaggtggcaaacgccgctgccccactccccacccatccccaatagggcttgagcacctgtagccctgctgagcacgtctgtgcagccccagccctcagcatctcttccactcgcttccagctatatcttttccctttccttcttaattcaggaggcagctttgcaa

SEQ ID NO: 13522 - DNA, 480 bp, Homo Sapiens
agtctctgcagccagatagtacatggtgtctccacaaaactaggcattctggagattgcccagaaagggatgtgaggggaccgttaagatctgtcttgcttatctcatgcactcacattccttcagcctcctggagttcctgataaaaggaagccagggtgttgacattttttagctattgatttcccaatagcttgtggatcagttgtacacccacacttccttctctgcctaattccgtttttctggaaaaagtagtatgcccatgtatgtgtgtttttcttaacacaggtccatgaaagtttggcttcctggtttgatgtctgttgcgtggcctggaaaccagggagcagcaactattgagatggtttctgtgttcagtgaaaaattctatttcattgagacaattttttctttatccacagtaattttttgacactgtcatcatgaaactacccttaggaaaataagattacctgc

SEQ ID NO: 13523 - DNA, 444 bp, Homo Sapiens
  misc_feature (75)..(75): n is a, c, g, or t
ggaccccaaagccattctgggaagggctccagaagaaggtccagcctaggcctccttgcaagagtggctaggccncccaccaccaccccccaggccgccttgagaagcacagtttaactcactgcgggctcctgagcctgcttctgcctgctttccacctccccagtccctttctctggccctgtccatgtgactttggcccttggttttctttccagattggaggtttccaagaggccccccaccgtggaagtaaccaagggcgcttccttgtgggcagctgcaggccccatgcctctcctccctctctggcagggccccatcctgggcagaggggcctggggctgggcccagagtccagccgtccagctgctcctttcccagtttgatttcaataaatctgtccactccccttttgtgggggtgaacgttttaacagccaaa

SEQ ID NO: 13524 - DNA, 1158 bp, Homo Sapiens
ccggaattctccggacgcaggaaccagctgctactcctgacacctggaatatgcccggctacggaagattgcagatgagaacggggcgtatctcatggcggacatggctcacatcagcgggctggtggcggctggcgtggtgccctccccatttgaacactgccatgtggtgaccaccaccactcacaagaccctgcgaggctgccgagctggcatgatcttctacaggaaaggagtgaaaagtgtggatcccaagactggcaaagagattctgtacaacctggagtctcttatcaattctgctgtgttccctggcctgcagggaggtccccacaaccacgccattgctggggttgctgtggcactgaagcaagctatgactctggaatttaaagtttaatcaacaccaggttggtggccaactgcagggctctgtctgaggccctgacggagctgggctacaaaatagtcacaggtggttctgacaaccatttgatccttgtggatctccgttccaaaggcacagatggtggaagggctgagaaggtgctagaagcctgttctattgcctgcaacaagaacacctgtccaggtgacagaagcgctctgcggcccagtggactgcggctggggaccccagcactgacgtcccgtggacttttggaaaaagacttccaaaaagtagcccactttattcacagagggatagagctgaccctgcagatccagagcgacactggtgtcagagccaccctgaaagagttcaaggagagactggcaggggataagtaccaggcggccgtgcaggctctccgggaggaggttgagagcttcgcctctctcttccctctgcctggcctgcctgacttctaaaggagcgggcccactctggacccacctggcgccacagaggaagctgcctgccggaggacccccacctgagagatggatgagctgctccaaaggggaactgttgacactcgggccctttgagggggtttcttttggacttttttcatgttttcttcacaaatcaaaatttgtttaagtctcattgttagtaattctgggacaggttattaaaggatttaaatttgaacctggctttctcacagctggacataattctaggaaaataaaatactatgtcgccaaaaa

SEQ ID NO: 13525 - DNA, 830 bp, Homo Sapiens
ggctggtacggtccgaagcctttggatggcgagcggactcgactcggcaccgctgtgcaccatggctcgggccctgtgccgcctcccgcggcgcggcctctggctgcttctggcccatcacctcttcatgaccactgcctgccaggaggctaactacggtgccctcctccgggagctctgcctcacccagttccaggtagacatggaggccgtcggggagacgctgtggtgtgactggggcaggaccatcaggagctacagggagctggccgactgcacctggcacatggcggagaagctgggctgcttctggcccaatgcagaggtggacaggttcttcctggcagtgcatggccgctacttcaggagctgccccatctcaggcagggccgtgcgggacccgcccggcagcatcctctaccccttcatcgtggtccccatcacggtgaccctgctggtgacggcactggtggtctggcagagcaagcgcactgagggcattgtgtaggcggggcccaggctgcccgcgggtgcacccaggctgcagggtgaggccaggcaggcctgggtaggggcagcttctggagccttgggacagagcaggcccacaatgccccccttcttccagccaagaagagctcacaggagtccagagtagccgaggctctggtattaacctggaagcccccctggctggaggccaccgccaccctaggaagggggcagggacgtgaccttgacttacctctggaaagggtcccagcctagactgcttaccccatagccacatttgtggatgagtggtttgtgattaaaagggatgttcttga

SEQ ID NO: 13526 - DNA, 516 bp, Homo Sapiens
agcagaaattggagtgaatttgattcttgaaagaaagaccccacccaggggagccacctttataaggctttttccttgaggtattccccaatccatcaggtgctagcaaatagaactcaagcagaaagctgtgtcatattggtttgaggaatcaggggatattttgagactgtgtgtcgggaaattgaagatggcaatcatagaaaggagagaaccatgctggggatcaccccgaagtacatataaacacccctcacatgctagactaactgctgaactgcccatgcacaggggaagtgccacagattccagcagagatttcagtagctgcctgctgtgggagagagagaatttggaggtggagtcttgtcaagttagaggcgattcgataaacaccttggactttgctttgaaatcccagaagggctaccccttaggggcaaatactactccccagggctatggcattttccctaggactaagggcaaaacaaaaataaagcataaaattgtgcc

SEQ ID NO: 13527 - DNA, 460 bp, Homo Sapiens
gcggccgcggggagggcggcggtggctgcagcggctggagcggggtagagaccgccgggtctcggcccgcaccaggagcggaacaagtctgggatctgccgatatgggggatatgaagacccctgattttgatgacctccttgctgcctttgacatccctgacattgatgcgaatgaagccatccattctgggccagaagaaaatgaggggcctggaggcccagggaagccagaaccaggtgtaggaagtgaatctgaagacacagcagcagcctctgctggggatggccctggagttccagcccaggcctctgaccatggcctgccaccgccagacatttctgtagtcagtgtcattgtcaagaacactgtgtgtcccgagcagtctgaggccctggctggaggctcagcaggagacggggcccaggctgctggggtaactaaagaagggcctgtgggg

SEQ ID NO: 13528 - DNA, 548 bp, Homo Sapiens
  misc_feature (281)..(281): n is a, c, g, or t
ttcctgacatctggcttgcgattggctgggagggggtcagctgactttgtcattttgtctgtcctggattggagccgtccctataaccatctagttccgagtacaaactggagacagaaataaatattaaagaaatcatagaccgaccaggtaaaggcaaagggatgaattcctacttcactaacccttccttatcctgccacctcgccgggggccaggacgtcctccccaacgtcgccctcaattccaccgcccatgatccagtgaggcatttctcgacnctatgaagcggccgttgcccagaaccgggatctactcgactcccttttattcgccacaggagaatgtcgtgttcagttccagccgggggccgtatgactatggatctaattccttttaccaggagaaagacatgctctcaaactgcagacaaaacaccttaggacataacacacagacctcaatcgctcaggattttagttctgagcagggcaggactgcgccccaggaccagaaagccagtatccagatttacccctggatgcagc

SEQ ID NO: 13529 - DNA, 670 bp, Homo Sapiens
tgcggccgccgcttcagccgcaagtcgcacctgggccgccaccaggcggtgcacactggcagccgcccccacgcctgcgccgtctgcgcccgcagcttcagctccaaaaccaacctagtccgccaccaggcgatccacacaggctcccgccccttctcctgcccgcagtgcggaaagagcttcagccgcaagacccacctggtgcggcaccagctcattcacggcgaagccgcccacgcggccccggacgccgcccttgcggccccagcctggtccgctccccccgaggtggcgccgccccgctcttcttctgagcctagttctcacgaggaccctttcttgcccacagtttcgagaggcccgtgccatgagaccgcctggggtgagcaaggcgacctgggctgctgcccgaaggtttggccgccgcgggacacctgtttccttcccgcagtgtctggtccgcacagcatacccagctcggacctcctaggacagagactcagcgaacccttgctgggaatcgctgagctgaagttcttggaaggctcccacccaggtgccccgttggaaagcagatatttcccggacccagcgcggcctcaaccagggcaggaaagagtggttatttatgtacttaaagtttcattaaagttaaaatcggtaaaaaaaa

SEQ ID NO: 13530 - DNA, 243 bp, Homo Sapiens
ctttaaaatacatacgaagtgttaaagagaaaatggccaaaacctcaaaactaccatggttgaaaacaatattaaaaggacacaatctaaaatcatgctacaaaaatagtgttatcttgtttaactaaatgtacatctttttttccaattccatgattgacaagagtgcttatgcgacgcatggaaggcaccagagggcaagtgattatttgccttaaaatatacaaagaattgcctactttg

SEQ ID NO: 13531 - DNA, 547 bp, Homo Sapiens
gcctaggggctagacgggcctctccgcctccccctcctgaccccttcgcctggtgaggcagcagcttccctgcctgttcctgagtccacggtgggagccctgcctgcaatcccccgtgcatccacaggtgtgggctggacggcgcatggggcaggggtttctggtggtgtggcttctccacagtctcatgcctggtcttctccatctctcttcatccacgggcctgcccgggcccggggtgatggatcagcaggtgtccaatgtcccgctgttcattcaatgcaccaaaaaatccttgagtcattcagcacacacccttgcctggacagaaacatttttcagcctttttcaaacgtgcctcactcttctctgcaacttctgctgcctcctgtcacatgttcatgaccacgttgactcagcccatgtcaggggtattgggagttccagtccatgctctgaaaacacagatgaaataaattgccattattattattctcgagccagtgtctcccactcctgagtaatcaacagcccgccgtcccaaagc

SEQ ID NO: 13532 - DNA, 536 bp, Homo Sapiens
gcggccgccgcacaggcccagccccgctgccgcgttccgcttgccggtcgacgaggcccagccgatgagggcccagcagtctgggagcccgaccgcagccccgccccacgcggtgcctaacgcaaagccctccgtgcgggaagccccgccgctccgcgccctctggcgaccgcggcgcgaaccgcagcctaacggcgggggtgggagcccgaaggatgagaggcggggcgggtcttacatacacctgtgggctgaaggctccctgcaggagtcagattcccagttattcattgacgcaaccctcatttcattaattgtgcattcgttcattcacttacttgtcaagcatttactgagagctatcaatggcccgacgtttttctagggctgtggatatggcagggagcaaaacaaagtccctgctcccatgcttcttacattctaggggtaaaaattcagaccttgaacaggctaggcctccgctcacaacacgtccatgcctcgttatctcgccccgcataaaagacagtctcatg

SEQ ID NO: 13533 - DNA, 512 bp, Homo Sapiens
  misc_feature (182)..(209): n is a, c, g, or t
gcggccgcgccgcctccagctgcccgcgctccagcgccgccttcagctcctccactgtggggggcgggccatccagcccctgcctggacccggctgcgtcctcgggctccgctgagctgggctgacccttcttcttcttccctttggtgaagacgcagaacacattggccaggcctttggannnnnnnnnnnnnnnnnnnnnnnnnnnngccgcctcttcctcctccctatatggggctgccccagcctccaggggtggcaccaggtcctcagaggaggcctccgacatggaagcctcgtgactctgcctctgatgtggactgcaacttttgggggcctctaggcaagtcgagggtgcctggcacaggctgatggctctagaggccttggaagaaggtcatcatcttcagcatcaccctggttcaggcctgcaggctcctggctcgccttccccgtcagggctgatgtccacacacctcccgggagctcgctgggcccggctccttcagtcc

SEQ ID NO: 13534 - DNA, 500 bp, Homo Sapiens
tactctggtgacttcctgcgtcaagcgttctcaagctgtgagaatgtgcgcagctccaggcaggttttctctcggagagttaagtcttcccttgaaggcagggaagcaggatggatacacatatatcacacacataaaacaccaggtgcgggagcagcccagactcaaggctgactaaactgcaggctgaataccgtggaggtccacatgcagcttcactggagggcaggccgaaggcgctcccgcccatgggcttgaggatgctgcaccccgtgggcttccaggcctgcccagatgatgccttcaggcctctgtccctggcggccatcctcaggccgattttgaccagcaatgatagactcttcttaaccctttcaaaataaatttttcagtgggacagaaaggagagttaaaaaacatttttttaaaggtggtaacatctgacccacaaagggaatgggtctgttttatgcaaaataaaagtttttcaaataaaaaaa

SEQ ID NO: 13535 - DNA, 585 bp, Homo Sapiens
gctgttctagaggatcccatctcaggccaggacgatgtccaacggcacggagacccgtggcactgggctgaccgcagtggccgtccaggagggcaactcagatgtggtggaagtcaggctggccaacaggaccggaggtctggaggtgctgctgaaccaggaggtgctgagcttcaccgagcagagctggatggacctgaaaggaatgttcctgtcggtggctgccggggacagggtctccatcatgctggcatcaggggccggcctggaggtcagcgtgcagggcccgttcctgagtgtgtccgtcctgctgcctgagaagttcctcacccacacccacggcctcctcgggacactcaacaacgaccccaccgacgacttcaccctgcacagcgggcgcgtcctgcccccaggcaccagtccccaggagctgttcctgtttggggccaactggaccgtgcacaatgcgtcctccctgctcacctacgattcctggttcctggtccacaactcccaaggtgttttccaagcaagaaccactttagagaccctctttcccagtgagacaaccctcaacctcagcct

SEQ ID NO: 13536 - DNA, 244 bp, Homo Sapiens
cccagtctcagggctggtacgaggaagaagagtgcacagaccagaggtctgctttataggggtctgtctatatctggaggtaatgctgtcattccttgaatcggaccactcagcatggtctgtctcggaacatctcacattcactggcaggctgaggacaagcttgttgagggagagaccttcctttttagtccatgtaaacttattcatagcatccatgaaagaaaggatttgcccatggcag

SEQ ID NO: 13537 - DNA, 487 bp, Homo Sapiens
tctctgcgggtccatctccccaccggggtccgtcctcgcaggccctgcccggcctctctgcagaccctcaagcgtcgtctgcatgagtgagcaggcgtgggtggactctggccgcggccacacttggtgctcaccagctgcttcggccttcaggtgacctccctccccacggcatcctgctctccgggtggaagagcagctttctgtctcccagaaggcatcgcttttccctcttgagcagatcggagcccctgggaggtttggaagcttgcctccaagcctaggacacggaccggtggccggggcggcctctggcccctgacgctggctgagacaggcccgtggggcggggttttggggcgtgaacaaggctggcagtaagtggacaagctgctcccctggctaaggccctgccctgccctcagccagaggtgcctggccatgcctgcacactcctccccattttaataaatggtcgcaacttcta

SEQ ID NO: 13538 - DNA, 920 bp, Homo Sapiens
  misc_feature (79)..(79): n is a, c, g, or t
  misc_feature (103)..(103): n is a, c, g, or t
  misc_feature (518)..(518): n is a, c, g, or t
gcccctggcctattgcacgtggctactgacagtgggattcccacgccaggatacccatcaagtactacgaccatgcacnctgaccacagttgtgcaacacatncattggacaaccccaccccagagaaacacaggatcagctgatccgggcagccgtgaagtttctggacaccgacaccatctgctacagggtggaggagcccgagacacttagtggaacttcaaaggaatgagtgggatccaatcatcgaatgggctgagaaaagatacggcgtggagatcagctcctccaccagcataatgggacccagcatccctgccaaaactcgggaggtgctcgtcagccacctggcatcttacaacacatgggctttacaagggattgagtttgtagctgcccagctcaagtccatggtgctaaccttgggcctgattgacctgcgcctgacagtggagcaggccgtgctgctgtcacgcctggaggaggagtaccagatccagaagtggggcaacattgnagtgggcccatgactatgagctgcaggagctgcgggcccgcaccgccgccggcaccctcttcatccatctctgctccgagagcaccacagtcaagcacaagctcctgaaggagtgaggcctgggcagagcacactcagcaggatagaggcagtgcagccacagctcccccggccttcagtggctccccagcctgtggggctggcttccttggcttttggggactcggcctcagcgtcaccctgagattccccccgagacacagtgcgctagtaccgctgtccggaggtcagcctgatttcaactccaggtgcccctggcctggccagcagtgaatgtaggagatgaattgtgcaagtgactttctctcgactctgattttattaaatatttctccaccctgg

SEQ ID NO: 13539 - DNA, 154 bp, Homo Sapiens
ggtaaactctgtggtaaaatataaaataatgttaaaaccctaaaagtaactattgaatattctgtaatcttagacatgtatttttcaagctaaccctttgaagaaatgtgttcaaggtaggaaaatataaaattttttggttatttgtaaattt

SEQ ID NO: 13540 - DNA, 474 bp, Homo Sapiens
cctagaggatccagttcaggcaggtacgagcacaggcccttcttcacctactggcttaccttcgtgcactcgctcgtcaccatcctagccgtgtgcatctatggcatcgcgcccgtgggcttctcgcagcatgagacggtggactcggtgctgcggaaccgcggggtctacgagaacgtcaagtacgtgcagcaggagaacttctggatcgggcccagctcggaggccctcatccacctgggcgccaagttttcgcccggcatgcgccaggacccgcaggtgcacagcttcattcgctcggcgcgcgagcgcgagaagcactccgcctgctgcgtgcgcaacgacaggtcgggctgcgtgcagacctcggaggaggagtgctcggtgcgtttccccgcccgggactcccgccttcgtctgcccggtgttcgctcttcagacctcagatagactcggcagagtgatccttcgccc

SEQ ID NO: 13541 - DNA, 185 bp, Homo Sapiens
atctacaggccagggacgacgacaggaaatggtgacagatagggaatcgaggatgaagggaagggagagccagtgacgactggcagtggagtggggagcaccgccacctctcctcctccacgtgcccctcctgtgcactgacaagctagtggcttttcgtcgtcctgccttatatggtaccgacc

SEQ ID NO: 13542 - DNA, 647 bp, Homo Sapiens
gcggtgggagagaaagggattactgggagaattgaaagaaggccgaaagaaaattaatattttgggaacaaacaagactttcccatagagaataaattcggttaccataaaggtaacaatttaaaatcagggaagccattacggaaggcattatttaaaaaaaactattgcccagaatgggcagcatcaggtgctgagcatgaatcgaaatgcagtgtggaagcattttgaattaatgattggtgactcccggactagtggaaaagagctagtgaagcagtttctcttcgattctatactgaaggcggatcttcgggtgttcttcccatcagataaaatagttcactacagacagatgtttttatctactgaactacaaagagtagaagagctttatgattcattattacaagctattgccttctatgaattagcagtgtttgactctcagccttagaattctgaggttaacgtgctaaagtataattattagctctaacgtaacaccaactgttgtgaacatccatgttattggaaaagaacacattttcagtgtattttagatgtttaaattctgacttttggctattaaatggtttacacaataagccaagaccaaatcaataaacattttatgagattcaaaa

SEQ ID NO: 13543 - DNA, 704 bp, Homo Sapiens
gcaatcagcaagcaggaaaccgcgaagcaggcgctgcccagcagcctgagcttgcctcgggccatacttgtccatgacgatacccaggggcagggtgatggcactgagcagaaaggagcccacagtgaaggccaaaatttagcatctcgtcctgggcctggcagctgagccagccgttcatccagctcacctcctcgtgccccggctctgctgtgccgcccactgtgccattggtgacattctctggctcggtacacaggtaggagtaaaagccctctgacttgagcatgatgagcagcgagccccagcccaggaggactgccgagaagaggaggttctccagcacggccgtgcaggccatccaccagcggcgccgatgggcagtggccagggtgggcgccatggtgcggcgcggcgcggctccggctccggctcccggctctgcaccaccgctgccctccgctacgacagagccagccccggccaggcagggagacgtctcccgcaagctcactccgaggtaaactgaggcatggaggcaagaaggggctaacgcatgctcagggccgtggaactagtcctggcctgcagcaggactgacatcgcctggggccagcatggaacgcagcgtgaggtgggcaggggccgatccgaggctgcctctcccagggacctacaggtgccctcccgcccgcgcccgagac

SEQ ID NO: 13544 - DNA, 490 bp, Homo Sapiens
gccccgagcttggggtggacgcaggtcccaggacatgctgctcccttgtgtgagtgaccatcggccccgagcctggggctggacgcaggtcccaggacgtgctgctcccttgtgtgagtgaccacggccccaagcccggggctggaggcaggtcccaggacgcgccgctccctcatgctgcccgggcccttcctccaagaccctacagagcctgaggggcacctgtgttccgcctgtgctagctttgccatgtcatctggaataatacttgaaattttgatttttggaaaaaaaagttttttatcttttgttgaaatcacctgttatccttgtttgtaaactgataacttttttgcttcttctcaggaatacagttttcaactgttgtcttgctcttgatagaaactgagaagcagcaatctgtatttgtggaggaaagtcctctcttttgcatattctaataaatgagccgcgtttgctcctccaaaaa

SEQ ID NO: 13545 - DNA, 572 bp, Homo Sapiens
tacctctgttctctgagttttcatttccaggcatccgccctgcctggatctcctcacctgccaggaacttcctctccacaagccggccatcccagcaaaagttctaacaccaaaggtctggcaactagcctgccatcttgtgcctggagccgcctgcgtgccacctactcccgaagatgggaaccttgtggccagttgggcagatgcggggcaaccctgtaccaagaccccattttaccacctgctttctcagaccactctggaacccactgtctcagatagtgtcctccaggaagcagaccatgagagggagttggcagggccaaagatttactggggctaactaacactcaggaaagggataggaaggaaacagggctggagagcaggttgagcccgacctgacagtctcgagcagcccaacagggaggtgtggagcaagggttgcccactagaggggcctgcatggggtacgggtgatggggtccacatggtacctggcatatagcaggctgtgcaatccatattaactgactggataaattaatgctcagaaaagtgccccggagaat

SEQ ID NO: 13546 - DNA, 310 bp, Homo Sapiens
ttttttatttacatatatataatattttattttaaaatgtcattgaacatatacatttctttagctttttccaggggacattgcacctaagtttcaaaacacacaaaatagatcccctttactaaacagttttcattttggggttacaaaaaagtcaatgtttcacaatcacaaagcataaaggtacatggttctgaaacaatttccaggcagatttctctcattcactgtactagggtagttttggaaacccagaccatgatccattccttacaaatgatctccaccatgggcctccctgggtctccag

SEQ ID NO: 13547 - DNA, 278 bp, Homo Sapiens
atgaataaagtgaaagtaaaacctcccccacccaacctacaggaaagtggttaacaatgaacagtttgatagcattccattgagacttttgcctttattcttatgtttatgcatgtattcatccacaggaagacaaagaaaagactggacgagagaatgaaaactgagcaggaaggaagtgagctagtgaaggtcacagagagcaggagtgcagaaccatggagacccttctgacctctcacttatgcctgaggtacgtatgatgtgccgggtaccga

SEQ ID NO: 13548 - DNA, 375 bp, Homo Sapiens
aacctagtcactgtttacaattgtatgataaagcctgaaatattgtatgtgctgtggtgtatgagcattgccaactttatatttattgcagtgaagaagaaactaaaaatatatggaaatgaggagcatgtccaagctcctaaatccgtgtgggtgcatgtgggagaagtgagttagggcctcttgaaaggaggctttttggagaggggtcccccaggtttcttggtgttcctgcttggggatcactgctgctagctgactggacctccccattggaagtttgtgattttgctttggcaaagtttcattgactagtagaactcattctgttttagtgtatatttcaatataaatgtaaacattttgctcaaaaaa

SEQ ID NO: 13549 - DNA, 249 bp, Homo Sapiens
gggcaggggcaggggcagactcacctggcctggaccccccccggcaccttgctggccttgctctatggcccgtgcccgtctcccgagagggtgctgagcagcccgatcttggtggtgaggagcttgttgtggggaagctggtacagcagctgctctccttcccggaagctgccgtagctgtctcggctcttgacctcacaccacttcagcgtgtagtcgtcctgcctaatggatcctctaggcacaccg

SEQ ID NO: 13550 - DNA, 472 bp, Homo Sapiens
gcggccgctcctcttgctgggggcagcctgcaccagcggctagctcccgactgcccacatcggggcgctggacacccgcgctgatctgctctgtgagatcagaggccactggggcctctagccacccccacgccctgtgacgttgactgacgcgctgcgcagcgttgccaaggtccggggccatgggagcggggtggggctggaaaggaaggtgaaaggttggggggaaggggcggggcaggatgttctgactccgtgcctgtgcctgggccggcaagtaggaccccaggcactgcccttcgcccagagtgacctcaagaaatagcagttcaatgaatgcctctctgccccttacccacagtcaacttcccttcacagtttacctcagaggccttctcctcccctccccttctctcaccacttgtgtatttccagagacattctcttgtataaataagtttagtagatttac

SEQ ID NO: 13551 - DNA, 422 bp, Homo Sapiens
tccggcaagcagacgtaccaaagaattacacagaaagggaagggagaaaaggctgacagagtgactcagagacagatggaaagaggctggctggaacaaaggcacttgaagagctgtgttgtataaaggaatgcagaactgagttatacattgacagctggaactgagccatatgggtaagggtgtggttggtcatttccctcatttgcgcattctggcccctgtgattccacctggaagacagcagcttcgtgctgagtggggtaaagaggagcagcacaaaagaagggtaaatagggggttcacatcaatctcagagacagaagcttcgagaaggactattcatccagtcacctggcaccttctccagagcagcagtagggaccaaaacagtacgggaggagggcaatgagacaagtggt

SEQ ID NO: 13552 - DNA, 1049 bp, Homo Sapiens
tcggtcctctggtaagggaagcgacttgttcaatcggtgaagaaattgggcttatggatcatgcatccagcatcagtcaagtcgaatacggaagtacttttccatgtttattacacacgtagtagaatctgttgctacagcgtatttcttgctttcttgtgaagcagcaagtccctgatttcagtggggccttttttcctgcaagtaaatgctgcataagaacgtgctaccatttacctcaggatatcattgtgtttgctaatatggaggagccacctatgaagacggctcctaacaggttgataaccctgaaccgcaccactcctggagtgacggattgtcctgggaggcacctacagtgcacaactacgaataagtttcctagaggaagttctggcgggtctggactgcacagcctgaagcaaggagagctctcaagtcacatcaaggtcagcgagcagaagatgaaacggtggttgggggaagggcacagcttcctctcttgtccccactacaggttttccctactaaacaaaggtgttggagagcagctttgggttctgtgctggttgttagaactcatctccaggtagcccacggatacgtggttggcacagacacaagactcccagagttgtcctaacaataagtctgagcccatctcaacccacttttctccggtagtctttatgtatctgttagcacaatcacttcagttactgatgaattatgtagggatctgacttggggaaagggttatcagagcctagaggggcttaaaaagtaatcatttgatgtacataccacactccttggcttcctttctcttcccttaaccctttctgcttttcattaaccacattcctgcacaactcatttctgaaaacctaccatgtttctttacagagccatccaaaaatttttggtccctacatagcaattttctgtggcactgagaaaccatgtatgaccacaataaaaatccatttggtgaaagaaaaaaacgccaccgcccaggagaacgacccacaccacacacaaacgagggg

SEQ ID NO: 13553 - DNA, 471 bp, Homo Sapiens
  misc_feature (93)..(93): n is a, c, g, or t
aaacttaggttcaggtcccatatggagtaagtggcaggtatggtattagaactcagttctgattctctgtccactccactgcaagccctgganaggcatcaggaagaggcccagctccaggatcgtgtgtatgctctccagcagacagctcttcaagggtgatcttgtttctcaatgtcactcattcccctctctcttaacatcaagcttgtttgtccagtagagcctttggagatttaggaccataatgaggtctcatgttctctgctcccacacctaagccaagacctttgggtcccagctcctccccttccactcagcactatccaggcaggaggaccaaaagggactcagtgtggtctacttactctggggccctagaatccctgccccccccgccacccttcatgtttgcttcagcagctggtagcttttgatgagacagaataaagtttttatttttatattaaa

SEQ ID NO: 13554 - DNA, 770 bp, Homo Sapiens
  misc_feature (436)..(436): n is a, c, g, or t
  misc_feature (442)..(442): n is a, c, g, or t
  misc_feature (457)..(457): n is a, c, g, or t
  misc_feature (483)..(483): n is a, c, g, or t
  misc_feature (510)..(510): n is a, c, g, or t
  misc_feature (526)..(526): n is a, c, g, or t
  misc_feature (531)..(531): n is a, c, g, or t
  misc_feature (559)..(559): n is a, c, g, or t
  misc_feature (563)..(563): n is a, c, g, or t
  misc_feature (566)..(566): n is a, c, g, or t
  misc_feature (613)..(613): n is a, c, g, or t
tttctctgtccaaccatgagcatgaggggcttcttggtgtcatttccactccccttgccaatatttatttggaaacatttcaaactacagaaaagttatgcaaattacatcaggaacacacacatcccctgtgcggagatctgtgctttatgtctttgaaagtaagttgtcgagatcacagcactccacccctccacaccgaagcccgcagcttctcaggaaagggcagtcttgtgtgatcagtgcatatcatcacacacaggatgtctgacactggcaccacgctgccatctcaaagtccatttcaatgctgggggtcatcggttttcaacaagttcttccctgggttcaacgcatcttcccaccaaagggatggaatcttgggtgagtgttgaaatgtgtcaaaaacaaaaacccaaagtggaactggagcacntcacanaccttggaccaaaantggcctgtgaggcactggaagagacnccaccatgcgagctgatggtcacacancttgaggaccacaaancccangcaagagagcacccccaaagctaagtangtanccnaggtggtgctaccatagtgcctgtggttgcgcacacctaccccacancagccaccacgtgagcacgcagtacgacctcgaaaccctaggaatcagcagaccaagccataactgccaatgaaaccactcaagaaaagaacacccagagccccaaccccgtctagtaaagcaccaaccacagccattcaaaaatgacatataacca

SEQ ID NO: 13555 - DNA, 473 bp, Homo Sapiens
gccaaaaggagggagggactttgaatttgatatgaatctttaaaaccagaattggctggatatttcccatgattgggaaaagagtgaaatgaggacattctgtaaactgtccctccctaattccaaggatcagaaactccccgttttgctgactcattccataactggagaaagaagctccattgaccgaagccacagggcagcatggaagtttaaattttctctaaaattaaaatgccaaggataaagctggctgcttccaggagggggaagaggagtggggagtgggcggtgaaacttttccagatgaacggaccataaatgtgttactggctttgtgcctgtagctcattttattatgacctatatgctcctgatttaaagagatctgtgtactgtttacttcccacttcccagaatcccttgtatctcctttctcgggaattgtattttctaataaatgacatttgaga

SEQ ID NO: 13556 - DNA, 529 bp, Homo Sapiens
taggaagaaaagtgccaggatccgccggaactggaggaagtcaggccccacaagctacctccaccagatcagacactgatccagggaaagagccaggaatggcagtgtcttccctcttgccaaaaggcctggggaggtgaaggaagagagactttaggcaagcagcccaaaggggtaaatgaaagcaagaggctgctgccactgacctgctccattcagaacaagactggatgcttctgttgagctctccattatgtgggacccattcctcaccaaaatgaggagagacagtgactgttcctgccacagtccttcccagtctaacactattcctgggctgcatgatattcccctgggagcaaagtgacaggcacttagatgcagcatttcaccactcatgctactaatcatctacctgctactactgtaaaccatggttccagcagcctgttccacacccccacaccatcaggatagcacagggaaactgtagtttaagtggcaaataaaaacatttgcatcaaaaaaa

SEQ ID NO: 13557 - DNA, 712 bp, Homo Sapiens
tcagattctctttcggtgattcagagctgaaggtgcctcactgccctgtggaacaggtgaataaagccttcccagcatctctctctagcctattatctcctgttagacacagcccagaaaatgaatagagacaagtcctggctgggtctgggttcagaaacataatagaaggattcatctaaactgtcggccactgtggaggaagtgaaccttctagatcctgctgactcatacaatgagttctgtgtggaccatcagacaaaagggctggctggtgaaggtggctgttgtctggaaattcctcccagctctcctctaattatgtcataaggactggaggccccttagcctgcttgtgataacacgcaaggaaatatgggccaactcttcacatgaacacaagatatttccatgctagccttttgcaagtaacaacagagagagctctgtgcagttttcactggaatgcctgtggattgcttgtgtcataactgtaatctaaagagttgtccatttgttgattcctttgtatttgtatgggtagaattgccactatcaaaccaagatctttagctgcctttgtatcaacttctttggaggcttatgtgattttccagaaaatttccaaggcatagttttgtccctaagtcccatgaatatgtaatatttggtgtctctctattaaaatagcacttttcgtgcattccattaa

SEQ ID NO: 13558 - DNA, 595 bp, Homo Sapiens
aggcaaagaatctagatgcaataaaccacccctgacccaaccacaaatgccagcctgctgacgaagctgcaggcacagaaccagtggctgcaggacatgacaactcatctcattctgcgcagctttaaggagttcctgcagtccagcctgagggctcttcggcaaatgtagcatgggcacctcagattgttgttgttaatgggcattccttcttctggtcagaaacctgtccactgggcacagaacttatgttgttctctatggagaactaaaagtatgagcgttaggacactattttaattatttttaatttattaatatttaaatatgtgaagctgagttaatttatgtaagtcatatttatatttttaagaagtaccacttgaaacattttatgtattagttttgaaaataataatggaaagtggctatgcagtttgaatatcctttgtttcagagccagatcatttcttggaaagtgtaggcttacctcaaataaatggctaacttatacatatttttaaagaaatatttatattgtatttatataatgtataaatggtttttataccaataaatggcattttaaaaaatt

SEQ ID NO: 13559 - DNA, 634 bp, Homo Sapiens
gcacgagcaacggtagacgagagccaggttgtgacgcgttatgcctatgtactcttctaccgccggcggaactctcctgtggagaggccccccagggcaggtcactctgagcaccacccagacctaggccctgcagctgaggctgctgccagccagggactaggccctggccaggcccccgaggtggcccccacgcggacagcccctgaacgcttcgccccccctgtggatcggccagcccccacctacagcaacatggaggaggtggattagcaggtccctggctgatgggggggactgggtttgggacaaccacacagagggccagctccttgccgcttctccttctctaacccagaggacactggctctgtcaatgggaagctgaggggtatgatttgggtgtggagacctctcaggttgggacttcttgtcagcttggacccctgaccagtgggctttggcttctccagccgcctccagtgctgcgtgatttgattctgttgtaccttcaattcttttgacccgcattataaacattataattttattctaaaaattgtaattttttttgcattttggaagtgactgctgctgtttaaatatattttaaaaataaataataagtaagtag

SEQ ID NO: 13560 - DNA, 698 bp, Homo Sapiens
  misc_feature (39)..(39): n is a, c, g, or t
agcataaataggaatagacataaagtgctcttctattanagcctttggtgatctatttactatgatttatattgtacagttcctcgatttacagaaaatcatcaaaattattaatctacatatcttatgtatataaatattgcctaatccatagaaaaaaggatataaagtattaaatatgtgatatatagctatatctatctatctatgtatctaatagggaagttcaagtcacttcaattgaagaaacatatctctgagcataggagcagcctcaggtcctatggtgggatgcagtggacaggagagggggaaattagaaaagagaactatataattgaaaaagggatataaagcattaaatatatgatatatagctatatctatgtatgtatctaacagagaagttcaagtcacttcaattaaagaaacatttttgagcatgggaccagcctcaggtcttatgctgggatgcaatagacaggagatggggaaattagaaaagagaactgtgtaattgaaatgacgtgggctgcacccttaaggaacttataattaatgatgatctgaataaacataccaggataaagatgtcaagtgagtgtgactcccttaaagtagattaaagtgtgcattctttgtttcctaatactatgattggtactgcttgaaattacatttgagttgaagtctagaca

SEQ ID NO: 13561 - DNA, 2043 bp, Homo Sapiens
ggatgttgagttgcccgccaccatgagctacacaggctatgtccagggatctgaaaccactttgcagtcgacatactcggataccagcgctcagcccacctgtgattatggatatggaacttggaactctgggacaaatagaggctacgagggctatggctatggctatggctatggccaggataacaccaccaactatgggtatggtatggccacttcacactcttgggaaatgcctagctctgacacaaatgcaaacactagtgcctcgggtagcgccagtgccgattccgttttatccagaattaaccagcgcttagatatggtgccgcatttggagacagacatgatgcaaggaggcgtgtacggctcaggtggagaaaggtatgactcttatgagtcctgcgactcgagggccgtcctgagtgagcgcgacctgtaccggtcaggctatgactacagcgagcttgaccctgagatggaaatggcctatgagggccaatacgatgcctaccgcgaccagttccgcatgcgtggcaacgacaccttcggtcccagggcacagggctgggcccgggatgcccggagcggccggccaatggcctcaggctatgggcgcatgtgggaagaccccatgggggcccggggccagtgcatgtctggtgcctctcggctgccctccctcttctcccagaacatcatccccgagtacggcatgttccagggcatgcgaggtgggggcgccttcccgggcggctcccgctttggtttcgggtttggcaatggcatgaagcagatgaggcggacctggaagacctggaccacagccgacttccgaaccaagaatgaagaagagaaagcagggcggcagtcctgattgagccagatagcaaagccacccgcacggactgctcggacaacagcgactcagacaatgatgagggcaccgagggggaagccacagagggccttgaaggcaccgaggctgtggagaagggctccagagtggacggagaggatgaggagggaaaagaggatgggagagaagaaggcaaagaggatccagagaagggggccctaaccacccaggatgaaaatggccagaccaagcgcaagttgcaggcaggcaagaagagtcaggacaagcagaaaaagcggcagcgagaccgcatggtggaaaggatccagtttgtgtgttctctgtgcaaataccggaccttctatgaggacgagatggccagccatcttgacagcaagttccacaaggaacactttaagtacgtaggcaccaagctccctaagcagacggctgactttctgcaggagtacgtcactaacaagaccaagaagacagaggagctccgaaaaaccgtggaggaccttgatggcctcatccagcaaatctacagagaccaggatctgacccaggaaattgccatggagcattttgtgaagaaggtggaggcagcccattgtgcagcctgcgacctcttcattcccatgcagtttgggatcatccagaagcatctgaagaccatggatcacaaccggaaccgcaggctcatgatggagcagtccaagaagtcctccctcatggtggcccgcagtattctcaacaacaagctcatcagcaagaagctggagcgctacctgaagggcgagaaccctttcaccgacagccccgaggaggagaaggagcaggaggaggctgagggcggtgccctggacgagggggcgcagggcgaagcggcagggatctcggagggcgcagagggcgtgccggcgcagcctcccgtgcccccagagccagcccccggggccgtgtcgccgccaccgccgccgcccccagaggaggaggaggagggcgccgtgcccttgctgggaggggcgctgcaacgccagatccgcggcatcccgggcctcgacgtggaggacgacgaggagggcggcgggggcgccccgtgacccgagctcggggcgggcggagcccgcgtggccgaagctggaaaccaaacctaataaagttttcccatcccaaaaaaa

SEQ ID NO: 13562 - DNA, 542 bp, Homo Sapiens
aaaacgaactagaatccaaatctgcttatggcaaaaaggggggtgtccggagaattccagctttggcccgcaattgtacaccagtctggatagagtgtaatctgagaagggaatgggtctgggttgttccaccccttccgagttccaaaaagagggaactggttttcttggttctcagcccagcagcacctatcctggctcttggtcctggcctgcagccaagtgctgttccatagcctgaggcttgagacaggtggggttggctcctcaccaaccccagttccgtcccatcctgagggcaagatcctgggctcataggcagtccctttcacttccttgtcttgctccctgctatgctggagatgaatgtgactaaaagggccatcttgctggcttaatgtgtggctggagagaccagcctggagacaatgtggcaaaatggggcgcttcatccagtctgtctaagccctgtcgacttggggaggtgatttctttcctggttctatatgtgaagcaaaataaatgttttaaaattaaaagcc

SEQ ID NO: 13563 - DNA, 814 bp, Homo Sapiens
  misc_feature (65)..(127): n is a, c, g, or t
ctcaggaccgcgccccccgcggcgccgctcgctggcctgtactacggcaccctgggcacgcccgnnnnnnnnnnnnnnnnnnnnnnnnnnnnnnnnnnnnnnnnnnnnnnnnnnnnnnnnnnnnnnntggggcccgccgccgatctgtgggccgacgtggacctcaccgagttcgaccagtacctcaactgcagccggactcggcccgacgcccccgggctcccgtaccacgtggcactggccaaactgggcccgcgcgccatgtcctgcccagaggagagcagcctgatctccgcgctgtcggacgccagcagcgcggtctattacagcgcgtgcatctccggctaggccgccggcgccgcccgggtccctgcagcgcttcctcccgcagcccccgcgaccgatccgaccgcgtcgctgccgctctgctctctcatacgcgtgtatgtttggttccatgtcacagccccctaggagccagtgatgctcggccttgcgcccgttccacctcccaggccacccttcctgggcttctgggccacctgccctcggggggcccctgcgagggtgcctggagttcccacgtgtcccggggcttttccaggaagcccgagcccaggacctgttggcagagttgccagggttacatttttgaagcacctgctccttttcttgcagtgtattttctacaaccagattgtattaatattttttactttgcccttttaaaaaatatacctaatacaatatatttaatttttaattaaactcttaaagcttttaagaagaaaggaagagaggggaaagagagaag

SEQ ID NO: 13564 - DNA, 594 bp, Homo Sapiens
cagctctgtgccaccaagttccgagtgacccagcccaacacttttggcctcttcctgtacaaggagcagggctaccaccgcctgccccctggggccctggcccacaggctgcccaccactggctacctcgtctaccgccgggcagagtggcctgagacccagggggctgtgacagaggaggagggcagtgggcagtcagaggcaagaagcagaggggaggagcaagggtgccagggagatggggatgctggggtcaaagccagccccagggacattcgggaacagtctgagacaactgctgaagggggccagggtcaagcccaggaaggccctgctcagccaggggaaccagaggcagagggaagccgggcagcagaggagtagcttgaagtggccagaagggtcattcggggcgggagaccctgagcctgctgagaaatccttttagcgccagcaagccccacccagggccctgtcctgtgtctgccaccacctttgtctgatacttgtttccagggaagctgggggaactgccacatctgaggaactggaataaagatgagggggcttcgggggcccccagactgtgtgccc

SEQ ID NO: 13565 - DNA, 281 bp, Homo Sapiens
gaggaaccttaaatgcatattgctaaggaaaagccaatctgaaaggattacatattgtatgagtccaactatatggtaatctggaaaaggcaaaaccatggagacagtaaaaaggtagtggttaccagtggtccatgggaagggttggatgaataggtggagcacagaggatttttaaggcagtgaaactattctgaatgcatactgtaatggtggatacatgtcatacctttgtcaaaaccaataaaatataacaaccaataaaactgcacaaagagtga

SEQ ID NO: 13566 - DNA, 206 bp, Homo Sapiens
ccgagcctgagtggcgccgggcccgacgtggggctcctgggccgcggcggcgggcgggcgatgctccagaggcctgaccagccatggaggccgaggcaggcggcctggaggagctgacggacgaggagatggcggcgctaggcaaggaagagctagtgcggcgcctgcggcgggaggaggcggcgcgcctggcggcactggtgcag

SEQ ID NO: 13567 - DNA, 466 bp, Homo Sapiens
cattgtcttcccatgaaactataaatggctaattcaggaatctgaattcaggaacactccatcttcctttaagttccaccttcccctgacccgttctctttctcagtgaaagcatttcttagaatgttagccattttcactagaaaactggctttctgagccttttggcaatcacaacataggtacctacaagtgtacatgtagccctgcggttttcagctttgctggtacattatcacaccaaacagagatcagggaaaaggaatcaacaaatgacaaggcaaatgagacatttgccaggaagccaaaagtcaacgatatttcctctgcctgctaaccagaaagagatgtatataggaaattcaaagttcctgctagagtagtaaacccctttgtaggtcacaattaatcacaaaaaccagaatgggatgaagctatcatcctgactttccgtatggatgcaaag

SEQ ID NO: 13568 - DNA, 425 bp, Homo Sapiens
tcccagcacacacttctttggcctaagggcttctctctcaggacctctaatttgaccacaaccaacctggcttcagccacatcagtgggcactggagctggggtgcacatggggcctgctcaccttgcccacacatctccagccagccagggccctgcccagcttcaatttacagacctgactctcctcaccttcccccctgctgtccagagctgaacatagacttgcacttggatgtcacctggagtgtcacatgggagtgttatggcagcatcataccaaggcctactgttgcacatggggccaaaaccagtaaacagccaccttcttggaaagggaatgcaaaggctttgggggtgatggaaaagaccttttacaaatgataccaattaaactgccctggaaagggcataggtgggaaaaaa

SEQ ID NO: 13569 - DNA, 483 bp, Homo Sapiens
taaacatacacattactgaaatgacagcaacccacattgcagaggagaaaagtctattagctgtacagtttacatttcaatgcccaaacttatttatatatttacataaagatgctaccttgattaatcaatgtctatttgcatttccacatgtgaatttcttcagttttgatattccatatgaaggagctacagtgaaaacacttttgaataaagcagtgaaccctaagaatcttatcttgagatgagatgtgtgaaccaccatttgaatgttatttctccctgctgtgtacattagtctggctgggtgttggtcacagacatggatgcactgacggctattcccataaccgagccaggcgggaagggggaaaaggaagacattatttgtcaccaacaacccagtatcccaagtcaaaattctcaactatggccaaaaaggcctaaactcgacccacaggaactggctttctaactggttga

SEQ ID NO: 13570 - DNA, 196 bp, Homo Sapiens
tggcacagcagactgtaccctggcacagcagacgtaccctggcacagcagacgtaccctgtgcacagcagactgtaccctggcacagcatcacgtaccctcacaatgagatcctcgtttaaatggatttaaatgtggactctattccatattagcagggcctcagaaatgagtccatgtactagttatttattcgt

SEQ ID NO: 13571 - DNA, 211 bp, Homo Sapiens
gggccgcctgacccagtccacctgcaccagtggggtgtggcatcagttaagcaaaggacccttaggcctatgcaacatttctgcccctaagttagagaaccaccttttagagtggcgatctcatgggagtggcagcttgactctgcaggaaatgtgggtgctatgagtgcagaacagaaactcttacgcgttctgatataaaaacaataca

SEQ ID NO: 13572 - DNA, 274 bp, Homo Sapiens
tcactataaggccaggacgacaccacagactggggcgggggcggggctgaagcagcagacattagttatctcacagtcctggccgtcagtccaaggccaagtgtcacagggctggttcctcctgaggcccctctcagtggcttgtaggtgctgttctttccccatgtcctcacctgaggcctctctccgtggcctgtagatgccagcctctccctgtgtcctcacctgaggcctctctccgcggcttgtagatgccagcctctccctggcctga

SEQ ID NO: 13573 - DNA, 589 bp, Homo Sapiens
tactaacttttatcttagaaatatagatcattatgcattgggttttttcaaagggggaacactttagtgaacaatagtttacttgacctttagttggaaaagaaaactaatggtggagaattttctttggctgggagaatttggtagattgagagaaaggaagaacatcaatactgcatttttacttgacatttaccctgtagatcctcctagaggttcgatgcccccaagacattccaacactgagctgtttcttctccaggtcttaagctttgaatacaagctataccagcacatctaaaatcggtctctacatttttccatcttaaatatgagctgtccagcttagtcaaaactaactgcaaaacactgggtgtaccatttgagtcatttggtcttaaaagaaacactattatcactgtgtcacagtttgagagattttcacttaagcatttaagttgcaaaccactacatatttgtcccattagtgactagtgggccttaattttggcattcaaattagggtaaaaaaccttggttcttgaaatgctacagaaaatagcttgaggccaggcacagttgctcacac

SEQ ID NO: 13574 - DNA, 687 bp, Homo Sapiens
tagctacaaaatgaagttctgcagtagttatcaaagcgaagagaagccattgtgaagatcatggcattgtatttcaggtagtaggaagatcctggtaattgtatcagggacagtttttacttccccacacccccacctcctcagaatgggggaatgaaagcattgtccagtaattgcaaagtatctggtggttattcagatgataatggacatttttacaactggagtggaaaattatttatttctgaaggtcgaatataagtgaccactgtactccttgttgaagagagatcttgctttatttcttgaagttttctgggcagttgtagaaaatggaatgtaaaggagcaactagaaaatctttattttacaaagctgagatcttgaaagagaagtaattataagcttggagaatgctgtattagtaaagatacactgggaaaacctgttggcttgataaaaattcccattctttattaaaacaaatgcatgcttatttgaacacagatctaccaattttatattaccatatctaattagtattcagtcttagctttttttgcctatgagacattttcctattaatcataatggtgcttctctaccatatagcactatagtaaagtaagtggattatttagaagaaatgcattcttaacattatctcctctacattttctgacatct

SEQ ID NO: 13575 - DNA, 474 bp, Homo Sapiens
aagttagtcgggacgaggtggacatggatccgcagaggtcccccctattgaagtaaaggggaacatagaactgaagagacctctgattaaggccccttcccagctgcctctctcaggaagcagactcaagaggaggctgaccagatggaagatggcctggagcctgagaagaaacggacaagaggcctgggtgcaacgaccaaaattaccacatcccacccaagagttccatccctcactacagtgccacagacacaaggccagaccacagctcaaaaagtttccaagaagacaggaccccggtgttccacagctattgccacagggttgaagaaccagaagccagttcctgctgttcctgtccagaagtctggcacatcaggtgttcctcccatggcaggagggaagaaacccagcaaacgtccagcctgggacttaaagggtcagttatgtgacctaaatgcagaactaaaa

SEQ ID NO: 13576 - DNA, 337 bp, Homo Sapiens
cggagcccagagactggagcaaggttgagagccactagcctagaacaagcgagctttcagtcccactgtgctctgcctggtcagagcatctagtgcaatcccggcaccacattattagggacctttgacacactggaacaaacccaacagaggatgaccaggatggcaaggttcctagaaaccatttcctaggagaaccatttcagggaattcgggaagaaaacctggagaggaggtgactttggagggtgcgatacacctctcacacttgcaacgggtgggatggggaaagggtggcaggctcagcccaccagcggacagatttcagctcacatgg

SEQ ID NO: 13577 - DNA, 295 bp, Homo Sapiens
ctagcacattcacatcaaattgccagcatccggaacacaagctctccaacccagagacctgtattccagtaccaccagcacacacacaatcacaaaagcagaagaggtctccaaataaaactgcccagggtccactttggtttcctacctggacaactaaagcgtttatctggaggtttctgctgagttctctaacagcaacaaacataaaaaagccaaaagcaataggcatttgcttcggtcaagcagccaaagatgtacagggtggtacgtctgctgtgccggatcctctaga

SEQ ID NO: 13578 - DNA, 450 bp, Homo Sapiens
tcggtccagacttctgtccaccagcaaggctggtgggcgtggactcaaagcatggcagcggcagaggctggagcagttggggatcttcagcttctaaatgctaattacacagtgagctttgggctattttttccatgagcttaatgatgctttctctgggcttttgggggagggtgtccaccagcttcttcagctgagcccctgcctccctcatgtcttgatcagggctgaaaagttccatggcagcctcataactggagggtgtgtccatgaggagggtttcgatgacacgctgaaagctcgggcagatctctgcagaagcggagctgcagcagagagccagtgtgaccagggtgagggtgacagcgagtttcatggtggaggagggggatgctctggcccgtctctggttccgtctctgagtctggtgacagaagtcatgtaccgact

SEQ ID NO: 13579 - DNA, 843 bp, Homo Sapiens
ggatgctggaggcatttgcatatccaccaaaatgtggaatctttcccagcgaagaatcttcaggctcttggagtcagcaaagtagagaaagagcattggctgtatcctcagcaaattaccaccaaccaatggaaaaatggagctaccagggattctaggggaaaaatgctgtcaccagccaccaagccagagtggcaaaggtgggcagaatctgcagaaactcgaatcgccactcttcttcagcaggtgcatgggaaaccatggaagacacaaattctgcacatccaaccagtgaaatcctatgctccccatgtggatcacatagtcctggatctggaatgctgcccctgtccttcagttggctagaggaggtagatcctgggacacatgggatccacgtgcgagtggcccttaaatgtatcagttcagtccaggttgtcatcccttttgtcccctggtgatcagtttttttcatatttgatagccctgaaagcaggctctagatcaattcaaattatttcattggtctttcattgataaccagaaaatgaaatacctgttgggagaagcagcatggcccatttgaaatgaggctcatctgtgcaattatgaattccaaattctgacctcagttctggaattgaagttccagtatgtttaggcctcgggtaacgtgatttgcaaaaatgacgagtatctttggaacttgtctcacgtgactatttagcaactattacccaggaacatcggttaattctagagtgaaaaacacagtgcttttccaaatgctctggtaccatatagaaaattggctgaaggagggccacgatgaaccacggagac

SEQ ID NO: 13580 - DNA, 303 bp, Homo Sapiens
tggcggacagaactctctccacagcacaggagtccccaccccacccagacatggagactatctttcaataaagggaagctccaggtctcagcttcagagctttctctgagatcaatgtgaacgcacggccttgccccaaactagttgtttcagggttgcaaacctctgtccaactccccttctccagcgtcctggggaagggtctttgattctttgaaatgagaagtctaaggatcaagaaccccgtttggctctcagctctgatctgacctggaagaggagaaacattgaagaggttccagc

SEQ ID NO: 13581 - DNA, 707 bp, Homo Sapiens
taagctcggtacagacttctgtcaccaggtatcgtgggaggcattggcatagatgtgttctgattgtcggccaaaacaccaggctcacggaaatgcaggtgctgtttgcttcaggagagcattctctggatgccctcccatgcacacacgcctggagggggctcacctccacccagccctgagcttctgaggccagagactcaagggctcagggaagggtggctacagtgagcctgggccgtgaacactcaccccttttattgccttcagagggctcctgccacagcagatgaagcaaggaagttggaggaggccaagtcaagaggctccctggtggatttcattaaacggtttccatgcatctttctgaggctcctgatgaactcactcttcgtcctggtggtcctggcccagtgcaccttctcctccgtcattgctggcctctccaccttcctcaacaagttcctggagaagcagtatggcacctcagcagcctatgccaacttcctcattggtgctgtgaacctccctgctgcagccttggggatgctgtttggaggaatcctcatgaagcgctttgttttctctctacaagccattccccgcatagctaccaccatcatcaccatctccatgatcctttgtgttcctttgttcttcatggatgctccaccccaactggtgacagaagtctggtaccgagctga

SEQ ID NO: 13582 - DNA, 630 bp, Homo Sapiens
ctgtccaccaggactctgatagcccctggcagccacagcccattttgccaagatgtctagagtagccaaatatcgccggcaggtgagtgaagaccccgacatcgacagcctgctggagaccctgtctcccgaggagatggaggagctggagaaggagctggacgtggtggacccagacgggagtgttcccgtggggctgcggcagagaaaccagacggagaaacagtccacgggtgtgtacaatccgggaggccatgctcaacttctgtgaaaaggagaccaagaaatcttatgcatgagggagatgtccatggatgaaagcaagcaagtggagaccaagacagatgccaagaatggagaggaaaggggcagagatgccagcaaaaaagcctggaccccagacgggactcagatctggggaaggagccaaagaggggtggtttaaagaaaagcttctctaaagacatgataccaggctgactcaaggatgagaatgagtcagtcattctaagagcattccaggcaaaagccctgaggctaagaaattactctgggtgtccacgaacaagccatatcccagtgtggcttcagcagtgacgagcagagctgcaccagagaggggcggagcag

SEQ ID NO: 13583 - DNA, 501 bp, Homo Sapiens
ttgtgaaaaagcagaaggtccattgagctggttaacactccagctgtctgtggtggccaagctgaaagagctttgtaacactggggttgcaggcacccacctctagacgctaccgcagagccagagcccaaagccctcaccccggcctctgcacttgcccatctgcgtgctccccctctcgcaaggggtttctgcagagggggctactgaacaggtgagccacacccctgtcgcacgccctgcaaggggaatcagggaactcttccgtttcattgctttgaccacatcctataaatcttgttctccttgtctttcagctccaatttgtttatacattcagtttttacttttgactttactcatgatttattatagaaagatgtttaacaattttctataacaaatggaataatttttgctcctctttcgttgttaatttattattcattggagttagaaaattgttgctaaaataaattctgcattttgaaatttaaaaaa

SEQ ID NO: 13584 - DNA, 445 bp, Homo Sapiens
atccgaaagggcaggtccaggggattaggtttggggtcagaggttctgttttccaggggaggggtgagataggcctggatcatgccctctgccatgccctccagctaggaggatcttgagtcagagaggattggaagtgctttctcctccacccaggtgaggtcaggggagcttaggtcttagggagatggcaagttgaggtatgaagggaagctggggcttttggagctgccgaacaactgagggacccagtgcgccttccatcccgcactagtgaatagcgccccctcttcccccgaaaacgaggtgcgagaggaacaattcccacgctggggaaggacttgtctccttttctgtgaaaatgcttggtaaaaagttgttattgtttgcatagagcagattcttgagaaaaactgtttgggaccataaaagtttggttggtttt

SEQ ID NO: 13585 - DNA, 557 bp, Homo Sapiens
  misc_feature (158)..(158): n is a, c, g, or t
  misc_feature (179)..(179): n is a, c, g, or t
gtctcctccgggtgcacggctcagtcctgcagctgcagctgagactgcggcggagactgcgcgagcgtgaggagaggctggggccgcaggacattcggaagagggcgccggccctcccggcgcagcacaaaaccccctttcttccccccgcccctgcnccgccctccccggggccgccnccgccccctggtcgggagcgcggggctctcgggacggtcacgggacccgctgccttctctgcttcggctccggcagcagcggcgagagcaaggacgagcgaagtaggacatcgttcagcggatgagaagccgagggcttggagtagggaggaggggcaggaggggcggggagggagcgttcgcccagcgttcgctgagctaaaggatgacgatgttgcagctggaggggtggaacttggacaactggagagtcttctcgttgttcaaagaagaaggaggagggagtcaactagactgtaagaagtggatcaagggagaatgggggctttgctcctgaaaagagacaccctttctaataaaaaaaatgtaaaactcaaa

SEQ ID NO: 13586 - DNA, 542 bp, Homo Sapiens
tttgtcgagcagaaccccaatccaaacctcagcatatatatgtcccaaacaattatctagtaccaacagagaagaaaaggtctgcactccgttggggtgttcgttgtgaccttgcaaatggtgtcatacccaggaagcttcccttccctctttctccttcttaaatctttttaaacttctttcacaggattgtttgagataacctagctctttatatcttcccttttaaatagaaacaactgtcttgagaagctcttcgaaacattttatggtaaggacttcaactatcattggtctttcctagctatatatcacattggtatcagatgatacttccaaattgccactcaaatccagcaattgcaagataaatcatatcagagaaagaacaacagacctggtctttctaatttgtcaaattagtaagggccctttgtgtcctgtaactttttttacctatcaatatgagttgctgtgcttcagtgtgtgttttttaagttgctgggcataacacttaccaattaaaaaatttcggaaattgg

SEQ ID NO: 13587 - DNA, 245 bp, Homo Sapiens
aatgctagagcacagtggctaaaaaaggtgggctctggggccagcctgcctgggttccaatgcacttgctggctgtgtgcccttgtgcaagttacttaacctctctgtgtttcagcttccataactataagaaaaggaatattagcacgttttcccaacagagcccatggggggttcaatgagatatggaagcacccccacactgtcaggcacaggcaaatgctcaataaatgttcattattagt

SEQ ID NO: 13588 - DNA, 651 bp, Homo Sapiens
atctctacacctcctggcaacctccactaactttttaccacattcgtccacattgcccaccaaaaatgtttcagaggtgtctccatggtagccattgtaatagactgtgacatcaatgttgataatatctccatcctgaagaggtcgactgtcaggaataccatgacagagcacgttgtttacagaggtacaaacagattttggaaaacctccatagcctagaggtgagggataggcattatgactgatgatttcccgatgaacaagagcatctatctcttcagttgtcatgtcaacctttaaactcttcccagccaagaggaggacgtggcgggccagctgacaagcctgatgaagcccttgaatctgatcttcattcttaacttctatgctgtctccccagtctggtacaatgcctgtcgtcacatagtctggcttctttatgtgcttaggaaccggatgagctgaagaaactgcagccggcaaactatactgtgtgaaatatctctttgtctccgaaaaaagaaatttcttctttgttgactgcttgactgcttgtgtaagtagatatgattgagtggtgaagagaaaattctatgagaaactctgcggacgagcaggtggacgccactgggcgccgccatgttggcg

SEQ ID NO: 13589 - DNA, 463 bp, Homo Sapiens
  misc_feature (40)..(40): n is a, c, g, or t
  misc_feature (64)..(64): n is a, c, g, or t
agaagtcgcagcccgctcaggcccgcgcctttcccgctcnccgtcttccctctctcacacaacntactccgccctccgcccaagcccgcgcgctagctccttctctcgcccggggttcctgccggtagctctccgggtcttggcgcggcgggggcgccccgggggtgccctcgccctcccgttgcgggcgggcgggcggtatgtggcgcctggtgcccccgaagctgggccgcctgtcccgctcgctgaagctggcggcgctgggcagcctgttggtgctgatggtgctgcactcgccgtcgctgctcgcctcttggcagcgcaacgaactgaccgaccggcgcttcctgcagctcaataagtgcccggcgtgcttcggcacgagctggtgccgccgcttcctcaacgggcaggtggtattcgaggcgtggggccgcttgcgcctgctggacttcctcaacgt

SEQ ID NO: 13590 - DNA, 303 bp, Homo Sapiens
tagctcaaggggggcagcccccagagtcctgtgcattctgccaaggctccatagctttgccaaatgcacggagctctgccattccggtgcagtgcaggccttgcgaagggtttatctgcgttcgtctcggtgggcttctcctgcatgggagttgtgttcctgtgcaagggggagctttgctccaggacaggatgactgtcttccctattcttagggacaagtcccaagatgccagaaaggcagtctcccaaggacccaccatgcaaaagtgtcaataaaccacaagttctgaactcaaaaaaa

SEQ ID NO: 13591 - DNA, 785 bp, Homo Sapiens
  misc_feature (484)..(501): n is a, c, g, or t
caagaattactataatgtgtccaaaatatcactgcatacaatatctggtatttgaagagaaaaactgacttttgtatagtataaaacacaggctttcacaaattttgtattgctttttttccagttttgcagaaaatttacattctagttctcttcacacagtagcagttgtaaataatttatgaatgacagtacacattaaaaggtatgcattagcagcatattagtatgctgttttatttgctgaagaaaatactgtcttctatttttaatgatacattaggtacgatgtgtagttcggtagagtcctaaaatttttgtactactttcaatttggtgaaaatgtattaagttgtctaccatgttttcttttctagctgaataaaccacatcaaaggaaagggaccacagtatttgaatgtttgaaagtctgtaaagcttaaggttttaaaaatgttgcccgtaatgttgaacgtgtctgttnnnnnnnnnnnnnnnnnntagttgcttcaaactatttttatgagaagttgtaagcattttttagatataaagcagtataaagtacttgttattttactctgaagttgtttaaaattcaccatgactttgaccgctgaagattctttaagcgggttaatttatgttttgaggtggaatacaatttacacttttttcttaaaaacatgaatgtgggtttctatattaagcatattttgtgactactattaacagattgatttgtttagatattaaatgctttaagctattttaccttttcaaaa

SEQ ID NO: 13592 - DNA, 496 bp, Homo Sapiens
ttgcaggtgctgtagcaggcgcaagaccgtagatctcaggcctctaacacttccaactccagccaccactttcctgtgcattttcactcctgagaagtgctcccctaactcagatcccctaacttagatttggcccccaactccatttcctgtctgtcttagacagcccttccaactgtgtcatctcttctctggaggtcaatggtggagggagatgcctgggtcctgttcttcctacataaaatgcaagaaaacagcatggccagtaaactgagcaagggccttggaatccttgagaatcacatttatgtgcttatgattacgggcaagctaattaaccttgttgaatctcagattccccatttgcaacattaggttaagaccagtactgcaggattgttgcactaaatgaaatactgtatgtgaagtgcctggcacagtgtctggtacatttgtgtttaataaaagctaactccatgttcataagagaggactg

SEQ ID NO: 13593 - DNA, 489 bp, Homo Sapiens
  misc_feature (271)..(271): n is a, c, g, or t
gcagcagaggatagactacgcacaatttctgccaaagattgatggcaaaaagatggcagacacaagcagtatggatgaagactttgagtctgattacaaaaagtactgtgtgttacagcaaagctaccactctggctgctagacagcttggtggggagggagatgactccttgtagctgatacttggcaaagatgtcactgagaggcaagctaaatgtagttattttatcctgttagaatacaaattctaattaaaatagttaactttaangagtagtagtaattttattttgaagtctcatgcaagttgtctgatagagaactttcaggcagatcccaccattagcctgtaaacaaaaggtttggcaccagccacctgggaccaaataagaattcaattgtgcttgtccagatatgaacaaatatgtagtgagtatagagtttatcaataatcataacaaatattaaagatttccttgggagcaattt

SEQ ID NO: 13594 - DNA, 521 bp, Homo Sapiens
ctatggtgatgagactggctatgggactcatctggggatcatgagcaaacagacccagttcctgcccccacggagctcacagtcccgaggggacaggcactcccttgggctcactcatcaggctgcatctgggctgtgtccactgtctgtctgtccccctggagggcagagcagatgctgtctggacagcatccaggacagcatctgtgcctcctggacagagatcctcagctcagcactgctgacatttgggccccacaagcagcctcatgccttaggggctgccctgagcacgggaggagagctcagcagcactgcatggcctctgcccaccagggggacagacagacagtggacacagcccagatgcagcctgatgagtgagcccaagggagtgcctgtcccctcgggactgtgagctccgtgggggcaggaactgggtctgtctgctcatgatccccagatgagtcccatagccagtctcatcaccatagctggtgacagaagtatggtaccgcatg

SEQ ID NO: 13595 - DNA, 586 bp, Homo Sapiens
  misc_feature (455)..(464): n is a, c, g, or t
tcaggttcaagtgctggattgtgtcatgtgaccatcccaaaactcagagcaccctatggccgtctttgccctctgtcacataacttgaaaactgcctgatggcctttttgcagtggttccctccaggaagccttgatctcagttgaagaagttctttcctggcattccaatgcccctgtcagctccatactcctcagacacccttaacaaaggctgtcatgcacacaatgtgacaaatacacaaaataaatgataattacactaataatgatatgttcagaggggcactggccaggtccacacacatcataaggtgggagggggtgctaactcccactgggttgctgagctgtgccccccaagtcccttcactctgtgcctctttgggggtagggaggaacaggggaatgagacttcagctcacagatttatgttcataagagaaagacccctgnnnnnnnnnnacccaccacacacacacaaaggtctttatttggtggtatttaaggagctgtattctaagtgtcccccatatttaatgccccagctctctagaatctgtagagggaagatacctgatgcttat

SEQ ID NO: 13596 - DNA, 303 bp, Homo Sapiens
ggtcggtactatacttctgtgcaggcaggttctggtgttggggacaagggtgtgagtgagaggactgagttgttgcctttaggaagtgtaccgtctagccaggagtaacggcttgagtcgaagtcggctcccattgggcctcttagggagtcccagtttgctctgaggcctgctcctctctgggaagaaatcaccttgagagcttctgggatttggaactccctgcatggttggatcccttccatcttcatgtgaatagtcttggtaatgaggctgcccaggaaagccataacacagggacat

SEQ ID NO: 13597 - DNA, 148 bp, Homo Sapiens
gatatattagcaagtctgtgatgtactttcactggctctgtttgtacattgagattgtttgtttaacaatgctttctatgttcatatactgtttacctaaaaccatggagtctcctggcaaagaataaaatatattatatttaaaaaa

SEQ ID NO: 13598 - DNA, 265 bp, Homo Sapiens
tgtctttccctgctgctcgaggactctggggcccaaagataaagaactcactttatatagtactcagagaacaaagagcagaaaaatgtctcccatcccattttcagcataagtattaaagcaaaacctaatttaggatctggcacccttgtggcaaggcagacacagctgaggttgggctaaatcttagcttccaatgccatagcttttgttcaagtttggatggcagctgctccactactggagcagcaggggaacagaccag

SEQ ID NO: 13599 - DNA, 529 bp, Homo Sapiens
gttcccgcaggcggcgacagcagagcgcccactgcctccagcagattaatattaagattggaagtttgtgtcttttgctggatattggaaattgaatgtaatggcaacagaatttataaagagttgctgtggaggatgtttctatggtgaaacagaaaaacacaacttttctgtggaaagagattttaaagcagcagtcccaaatagtcaaaatgctactatctctgtacctccattgacttctgtttctgtaaagcctcagcttggctgtactgaggattatttgctttccaaattaccatctgatggcaaagaagtaccatttgtggtgcccaagtttaagttatcttacattcaacccaggacacaagaaactccttcacatctggaagaacttgaaggatctgccagagcatcttttggagatcgaaaggtagaactttccagttcatcccagcacggacctagctatgatgtgtataacccattctatatgtatcagcacatttcacctgatttgagtcgacgc

SEQ ID NO: 13600 - DNA, 286 bp, Homo Sapiens
tgtctttccctgctgctccttcacctcctcagtgaatctggggcatgttgttctacccaggatctggagcttctagcagggaccatggcagttctggaagggccattcccaagtttcgcccctgtacacctctgaaatccacactcccaattctttctgcgacagaataatcctgcttgtttgcgatcacagatcatggccccagaggcttgggccttatctcctccccagcttcattctcctgctgctcagaaaacctttcacctctgagcagcagggaaagaca

SEQ ID NO: 13601 - DNA, 187 bp, Homo Sapiens
cgctgtaactatctgctgtctggtcacagtattagatgggaccagagcagagagggtctgtaggccatggcaagagtgagaatttactcaatacacagtggaagttggggatgagtgagaagcacaagagtggcacactgatttctacaacagtcagtctagctgctgggagcagcagggaaagaca

SEQ ID NO: 13602 - DNA, 472 bp, Homo Sapiens
tagaactctctgtagtcggagagatcctgtgtgtaggccaggctcgcctggagggcccgggcagcacaggaggacgagcttgtccagcagagggtctggcagagggtcgggcagaggtttgggcagggggtctgacatccctggctcctgctctggctctggctgccgggatttgcacaggcccaggtgcatacagatgccgtttgagtcaatctggttctggaagtagtcgatgaccagggggaagtagtcgtcaagcacttggttgcactggggcatgagcagcttcaaggggaggacgttgcactcctgctccaggaacttcctcatcgtgtcctggaaaatggcctccttggccatcttgtcaaggatgtggacgatgtcctcacactcttggcataggtcatcggctcccacatgtccccagacttcctgtaggcaatgccctagggctctgcactgcaatgcttgc

SEQ ID NO: 13603 - DNA, 404 bp, Homo Sapiens
acgaggatatgctgcagatctgggacacagcgggcaggagcgctaccgcaccatcaccacggctactaccggggagccatgggctccgggggcatgtatgacatcgccaatcaggaatccttggccgctagtgcaggactgggccacgcaaatcaagacctactcctgggacaacgcccaggtcatcctggtggggaacaagatgtgacctggaggacgaacgtgttgtgcctgctgaggagggccggaggctcgccgacgaccttggattacgagttcttagaagccagtgccaaggagaacatcaatgtgaagcaggtcttcgagcgcctggtggatgtcatctgcgccacgctgaacgagtccctggaacccagctccagctcgcgcagcagggaaagaca

SEQ ID NO: 13604 - DNA, 761 bp, Homo Sapiens
  misc_feature (183)..(319): n is a, c, g, or t
cctacaagaacatctgtgcctgctcgcagattcggcttcgcctcttacccctgacgctctaggcaggtcctttctgcttctcagcttcagctcagtcatcagtaaatgggtttgggtgaggacaaagtgatagtggcgagcctatcccaagtgctctcattctaggaactggcagagtcctcnnnnnnnnnnnnnnnnnnnnnnnnnnnnnnnnnnnnnnnnnnnnnnnnnnnnnnnnnnnnnnnnnnnnnnnnnnnnnnnnnnnnnnnnnnnnnnnnnnnnnnnnnnnnnnnnnnnnnnnnnnnnnnnnnnnnnnnnncggtccctcactggagctgctgtgctgtgctgtgctgggatttgctcagcgcatgtggcttcccttctgagacccgtttagcctggccccaggggtggaggaggctctctgttgagcaccaaagccctgggcaggagcagaggactgggaatgcatccaggaccgtcttctgggggtacagagggaggggtgccaactgcgctgaggcctcctggtcccctggtccccagcacttcagatgacaacctaattaagaacatcgagctgttcgacaagctggccctgcgcttccacgggcggctactcttcctcaaggatgtcctgggggacgagatctgctgctggtctttctacgggcagggccgcaaaatcgccgaggtgtgctgcacctccattgtctatgctacagagaagggcggagcagcagagaggggcggagcag

SEQ ID NO: 13605 - DNA, 428 bp, Homo Sapiens
aaggaagagagattgggaggcagagtttgatggggaggagggacaggaagacccttttaatgatgagggtaactatttcagttgtgagccttctagggccccaggctgggaggctcagaggactgaatctggtacctgtgttccccccggcaggcagggacaagatggcatggcaagcatgggggcggggtgggtggggagggatgctgcatttctcagctgggcagtaatcaatttaatggtcctttaaaatgtctgtgtattaaaaatttaagaataccacactttaatattaaatattcataaggtctagtatcttgataataatgtagatgttttaataacaatttttgtccttcttaaaataaaatgaaagaaacttgcttcccttagcctttgttctagaaaataaacttgtgcactttgaa

SEQ ID NO: 13606 - DNA, 458 bp, Homo Sapiens
agaagaggaagaagaaagaggaggcggcccggaggaaacaggaacaagaagcagcaaagctggccaagatgaagattccccccagtgagatgttcttgtcagaaaccgacaaatactccaagtttgatgaaaatggtctgcccacacatgacatggagggcaaagagctcagcaaagggcaagccaagaagctgaagaagctcttcgaggctcaggagaagctctacaaggaatatctgcagatggcccagaatggaagcttccagtgagggggcacaggactgactttttaaaccattgtggactagtggctgctgtctgcctcagtgacaatgtcccagcgctcctatcatgtttacagtcacccttgggtcctaaattaagagttgtgttcatgtaggttcgtgtcgtcgttggctctgagacattgataataaatttttctcaacagtgaaaaa

SEQ ID NO: 13607 - DNA, 764 bp, Homo Sapiens
cccacccccgacgggcttccaccttgggctcagcccccacttgatcatgcagccattggcctcccacactgcaggtgggcgtgccacctatgactctgcccatcatcctcaaccctgcgctcatcgaggccacctcaccagtgcccctgctggccacacccccgccccacagatctccatacccacctctgaggtcaactaaggcaggtcactcagagatcaggaccagtgcttcccaccaggctttccttgaccccacttctggctgtcctgcgggccacaagctcttcaggccaagtcagagctgctgttgctgccacttggatggggacctgaaaaagagaatgttgatagccccagctaagacccccaatcagctgtgggacctttttcctcctctgcgctccattcctgggggttcagcctgagagtgaactcagctgtcatctgcagcctctgcctccagcccggcagctctggggaggcatccgtgtgccggccctgcagtgcctgcccacggtcaggcattgaaaactaagcccaaccactctgcactttgtttcccactcccattagccctgggccacctcctccagttcttcctcttttactaattagttggtcagtttggagagttgactggcaccatggagggtaggcaggtgggggctgggtgggggactgcccacaggagcatgtacatatggaaaaacagaacaacagtggactttttatgatataataaatgtcttagtaccagcaaa

SEQ ID NO: 13608 - DNA, 520 bp, Homo Sapiens
  misc_feature (479)..(479): n is a, c, g, or t
gcggccgcctgagacctgagctgctgtgaaagcccctgcacaatcagccagggagaactgggcgggtttagtggccccaggcccactcctcatgcagcagtgtgctggggcgacagctcgtctcccctctcttaagcacccgcttcctcaccacccccactgttgggcctatagtagcaggttagtgagtacctagggcggctcaactcctcccacagcaccaacccagcatggtcccactgaagtcctactacgccctcccctccccagccttttccagaaaccatactgggctcagatcagagctccgaagcggtcaaagtgagctgagcaggacaggcccagcctttctccactgccacgtacctcatgcacatcactcatctcctgctgcaggccaaggccaaaattgggctagtcctggccagggaaatcagaagctcttcttgggtgagattgagcctcctgttgctccctgnagttccggaggctgggctgcagcccactcagcttgcgggca

SEQ ID NO: 13609 - DNA, 509 bp, Homo Sapiens
tccttcaccaagaagacgggagtcggcagccaggagttcccgtggcacctctctctcttcgtggctccctgcttcccccttccctctttccgaggaagggtcaacctattctctctcaaagccaacccctaggccaattgcctggatctcctcccctctcccttctttaaacgagcttgcctccctcctgccaagtttgagggcaaggctaagaaatgtcagccacggaaacaactctattatctggtgactttgggtaatgtgaatcagtgcctgaggacctttgctgtgtccttggtacagaaccatccacttgacctaactacctcccctggaccgctctcgctcttctcttctttgttaagccaacaactatcaccctctcctactcttcttctccctgccccctggagggcactgtgtttggttgtgcaaatgtatttactatgcgtgtttccagcagttggcattaaagtgcctttttctaataaaatcagtttattatgaca

SEQ ID NO: 13610 - DNA, 775 bp, Homo Sapiens
agcgcgcagcagggtcctccaacctcgccccctgagtcctccagcccagtttcccagtctgctccctttagggcctccttcaggtttctcccagttccacccctttcccacctcctagcttcaggatcccctatcctccaccttaggggcccaaagccttgcacccagtgcccttccctagtcctgccccatgatttctccaacccaccagatgctcacagctcagcccttatttccaagtgttccagcctggacgcttccccacagccctccaattctctctcttcctggggcccctaagcctggaagcagttggttagggctgaacaagacagagacggtgaccccaagtggggttgcttacctgagctgtctccttccagaacatctgctaaagctgcaggagcctgggccaggaccagggctcccagcaggggcaggaacagctgggccatgctgcaggctgacagagggacatgagaaggaaagatggggttagacttcaggatggacttcccccctgctccctaccacacccatgtgggttcacacatatcctggctccagaagtcccctaccttcacatcaccatggactctctgtttctgatccccatcttcccagcaagtgatttcttctcagaaccaaaacccgagtcctagtcaactcactgtgtgacctaagccaagctccttaccttctctgagcctttattttcttacttataaaaaagcatcatcattactatctcatgagttgagataggtccatgtgc

SEQ ID NO: 13611 - DNA, 655 bp, Homo Sapiens
  misc_feature (319)..(331): n is a, c, g, or t
gtagggggagggagggggaagttaagggggtcacctccattctggggaatttatatttgaattgaggctttggccttaacacccaggaacttttctattacaatcgcttaggaagtaaagccttgtctccctccctgttctctgcctcttgtacccctctgacccacccgctctgccccactcccagccctcctcagccccagccctgcctgccctgcccctccagggggccatgagtgcctaggtttctcataccccacaaggtcacagcaggggagggagggacaattttataatgaaccaaaaattccatgtgttnnnnnnnnnnnnncggaggagggtaaggggtgccgcccatgggccacaaatctctacaagtgcctgctatccctctcccactccccaccccagcaccggtccaaccccttcatccccagctgctcctaggactggcccatgggcaggcgggtggggggatgggaagggggtgccctgaaaccaaactggaagccccctctgcctcccagctggggcctctggggtggggtggggggctgtggtcaagccttattctgtattggggactgagggtggggggagtagaggggccgctggagaatgtattcaaaacaataaaactttggacctttggaaa

SEQ ID NO: 13612 - DNA, 346 bp, Homo Sapiens
aagcactcacttgtaattttagtttttaaacccaagtccctctaactttgcctttgaaaccaaacaattcaaaagttggatctgagtttggagaaaaatatttccaacctaagtgggtattattttgaaaccagatttttaatttaatagcctatatttgtagtctgttggataggtgtttccaaagtgtgtcttctcaagtgaaaacgcaactataggtttcaagtactccttttctccgatcctgtgggacttgaatatccaaaaaccctgcactttgaacaatcagctgttgctatctggaactaaacagaactatgagtaaaattgcctggatactttaaaa

SEQ ID NO: 13613 - DNA, 196 bp, Homo Sapiens
accctgtctttccctgctgctccaaaagcagcacactatgaatcaaagaatcctgttaagaggtaggtataatcatgtcactcctctcctcagagccagcagctcttcaccttcccaggaataaaagtcaaagccttttttatcaggcacagcctgccagaccctgcgttctggctctgagcagcagggaaagaca

SEQ ID NO: 13614 - DNA, 318 bp, Homo Sapiens
tgcctgctgctctctgctccctaagaggcagaggcagccctggatctaggctggtgatgggggtccggcccctatggtgggagaagctggggcagtttcccaggggttggtctagccacatctgagttctgagaattgggacataggagaagaaagcctctcatggactcctggagatggtcccagaatggagtctagctggtgcagtttcctgctgtaggtaaggctggactggatgagctcctgccttcttcgtcctcctccatagccaagtcctgagagcttgaagccttggctatggagcagcagggaaagaca

SEQ ID NO: 13615 - DNA, 311 bp, Homo Sapiens
caggtctcaaacttcactctgtttacaacataagtaacaccacacccctgctagacaagcagctcgattcccaaccagcgcatttccactcatacaggggctctctccatgaccattgctcagcaaccaggaataaccaagtcccagatcaggctctgcctcctcctggagcccagcctctgttctaggtcatgctgaagagctgcctgtgtgctcaaccaagctgctaccctgtcacagatcccccgtttagctcctccttgggtgtccacaggctcggtggggccaaggtggagcagcagggaaagaca

SEQ ID NO: 13616 - DNA, 270 bp, Homo Sapiens
tgtctttccctgctgctccccaaacctcgtcagttagccctgctatattaaaatgactttctagaacttgttttcttaagaaatctaagcatctaagctattagaatgttgatggggggatgggtggaaatgtaatgatttagaatgcaggcagatgtctctgttgcatattaaagaccgtttcttccccgccgctaagcttaattgtgggtcttaggttcaatgtgggtcatatgaacatatgttcagggttaccacgcttcagacgcc

SEQ ID NO: 13617 - DNA, 458 bp, Homo Sapiens
aagcgaatagaaaaagaatcaagaaaataggccaacatatggagatccgggagacggaagtacagagggtcagcctacacataggtagcacgggtaagctctcccacttcactttctccccggccaaaggtagttaaatatgtgctcgtcctctacttagaccaaccaaatttccaggtggtcttaggtattatctcaaaacttactttactagaagagctcaaaagacggattctggcccaatcatgctatgtactcgtacgtaaggaccaaggaagcaagaacaatcacaggtcaaacaacttctagcatctcacataattttggggcactagaaggcagacatgatggggaggtgaaaaagttctagaaattgtattggacaggtatcggaatctaggacacatggtaactggaggaattacttagaggagactgtaggcactgtttggagtctg

SEQ ID NO: 13618 - DNA, 453 bp, Homo Sapiens
tctagaggctcccggttagagcagaagctgaggctcagaaagattaagtacttgttgagggccacccatgtaataagtggccaaaggggaccggtgtctagtctggtccagccctcccacctcaccaccagccttctttggtgggtggtcacctccttctctagcttccggctctgagcacactcacaggcgcaaccagatactggggaacacagatgccctcaagtgcagattggccaggtacagccttgcatcatagtcgctaatcacatggtgattagcaatcttgaaactgggaaggttgagtcaagcaggcttaagagaggaagtgagtctcataaaaaaatctgcatcagagaaggcagggcttgagtttgggaaagagcgggcaggaagggtatttcaggtatgtaatatgacgtgaaggtgggggagagaaagccaaactaactt

SEQ ID NO: 13619 - DNA, 319 bp, Homo Sapiens
tgggaagcaacagctctctctagaaggatggctggagggcaactgttcctccctggtcccagcaaaaaatgacaagagattttgtctctagaaaggataagcagtctctgaccttgaggacagcaaggatgaggatgagatagtagtaaatgtttacacactgaatgctccaacacctctcctccggcccccactcctacccagccctcttcccacactcagctcccggccacgcctacatttcccaggtaaaatatgtgacgatcctttttggggaactgagacctgacaggaaaaataaagactaaagacattggga

SEQ ID NO: 13620 - DNA, 249 bp, Homo Sapiens
agactggagacggagggcgagaagagtacagcagcagggtggggaagaactgggtgatgatggggttgttgaggtactccagaggattggtgaggttgaacttgtccatggtggtgatgatgatggctggagtggtgaggaagaagaggaggatgaagaggacgacattgatgaccaggcagcgcagccaccagatgaagcctcggatggagaggtgctcccagtacgctgtgggtaccgacgctcgaa

SEQ ID NO: 13621 - DNA, 463 bp, Homo Sapiens
cagaagctgagtcgggaattagtacatcacagtaatgctgcatatgagcaggaggtagaaaccagacgttgagaggctacctgaggtcaggctagtggaaagaaggtctggtgcagacggtgggagaagccgggcagaggaaactcggaaattcacagcaggaagctccacaaagaagagcgtccatgtgagtgatccattgccctgcccctcttgaaggagcagccccaacaccagggctgagcctgcccaaggtgatgggtggtgttaaatcatgcactctgtgcgtggagcccttcctcctggaatcctgactctgaagccctgtgtagcctctttccattcttcaccagctctaggatgtacctcctgcaactctcttctctccccttacgtatgaattccccccttcttctgaatcattccccttagcactccaacactatcatttctcctacctgca

SEQ ID NO: 13622 - DNA, 832 bp, Homo Sapiens
  misc_feature (99)..(131): n is a, c, g, or t
cgatggcggcggacggggactggcaggatttctatgagttccaggagccggcccggagcctcctggaccaggagaactgtaacgcgagccccgagcctnnnnnnnnnnnnnnnnnnnnnnnnnnnnnnnnngccgacggtttcccggccctggcctgcagcttggaggagaagctgagcctgtgcttccgcccctcggatccgggcgccgagccaccgaggacggccgtgcggcccatcacggagcgcagcctcctgcagggggacgagatttggaatgccctgacagataattatgggaatgtgatgcctgtagactggaagtcatcgcatactaggaccttgcacttgcttactctgaacctctcagaaaaaggggtaagtgacagtttgctctttgatacatcagatgatgaagagctgagagaacagctggatatgcactcaatcatcgtctcctgtgttaatgatgaacccctcttcacggcagaccaggttattgaagaaattgaagaaatgatgcaggaatcaccggacccagaagatgatgaaacccctacacagtcagatcggctttcaatgctttcccaggaaattcaaactctcaagaggtctagtaccggcagttatgaagagagagtgaaaaggctctcagtgtctgagttaaatgaaatcctggaagaaattgagactgccattaaggagtactctgaggagctggtgcagcagttggctttacgagatgaactggagtttgaaaaggaagtgaaaaacagctttatttctgttcttattgaagtgcaaaacaaacagaaagagcacaaagaaacagc

SEQ ID NO: 13623 - DNA, 252 bp, Homo Sapiens
cagcatgagggtggctccacccatgaggctggtgacactgacgctggcttggctaagttggctcaagccgggtctggcctgacagggtgcagtcacaccaggagcgcatggcaaatgcagcctcagtgatgcctctcttgccgggtaggggctgggagtccccgtgcaccctgtctttggcccatgaggggctgcagcactgtgggcgccacagcacagattaaactctcaaacccacaataaacaaaaaaa

SEQ ID NO: 13624 - DNA, 982 bp, Homo Sapiens
  misc_feature (850)..(870): n is a, c, g, or t
  misc_feature (916)..(916): n is a, c, g, or t
cggtccggaattcccgggatggcggcgcccgcggagtcgctgaggaggcggaagactgggtactcggatccggagcatgagtcgccgcccgcgccggggcgtggccccgcaggctctccggcccatctccacacgggcacattctggctgacccggatcgtgctcctgaaggccctagccttcgtgtacttcgtggcattcctggtggctttccatcagaacaagcagctcatcggtgacagggggctgcttccctgcagagtgttcctgaagaacttccagcagtacttccaggacaggacaagctgggaagtcttcagctacatgcccaccatcctctggctgatggactggtcagacatgaactccaacctggacttgctggctcttctcggactgggcatctcgtctttcgtactgatcacgggctgcgccaacatgcttctcatggctgccctgtggggcctctacatgtccctggttaatgtgggccatgtctggtactctttcgcctctgccatcagccttcccagtatgcacggatggcagtgatgggcgcttgtgatctgatccgtgcctcctccctggatgtgggagctcctgggcttccaggccccgggcacctagagacggatggtcgcacgcatgattgtcggcatctcacagcggctcagcacgtcactttggactgtcgcgcagaaattcagaagactcgtagtagcttcggcagtgctctccctgccttccgagcagccatgcgtctttgaactgtcttcccttccctgatcttggagaacatagagctgccagttactgaggatgggagtcccagcttctggagacaggattnnnnnnnnnnnnnnnnnnnnntctgtggacgctgtcaaggctgccccagcataccccccatcccggnattgtcctgtgggggcttcggggggctgatcttccagatcatgcctgaagcaggcctgatcaaaat

SEQ ID NO: 13625 - DNA, 925 bp, Homo Sapiens
aaagacctgcaaataattttattgcataggacactattgatgacacatagaatgggagctgcaagtatgtggcattggaacaagccttacaaatattgcattttaagaatacacacattttttacagtttgtcttttttaaaaaatttgaagttatagctacgacttaactacggacagtgaagccattttaggaatgttaagtgattaaaaaagaagatgaatgatacaaagaaaagaagccaccattcttgccagctaatatactggattccttcaaaagccaactatacatgctgccttcagttcatagttaaatatttctagtaatctgttttgggagaacaaatgtctttcaaggtttcaagttcctctataagcttcttgttctggacttccagcactgcaactcggctctccagacattttacatattctttctttcgacgtcgacattctttggcagcttccctgaaaaaaagcagaagcaaagggcaaacaaagcattttttgcatgctattgacaaacagatcaaagtaagctcggtaagtgtgatcacggctgcattccacatcctggaacaacattcccaattcaatttcaaacactaatccaaactggattcttaagggtcacacgtgtccttcccacaagtccacatggcaataagtaggactgctgcatctcctgccttgattagagtaaacaaggtccaagtcaaagacagttactctactttatggcaataaagatctttgagggccttgagttcctcaatgagagtcttgttttggttttcaagcacagccacacgattttcaagacatttgacatattctttcttcttcctgcgacactcccgggcagcttccctggaagctacacaaggcaaatgactacaggaacagccttccacagcatccac

SEQ ID NO: 13626 - DNA, 747 bp, Homo Sapiens
  misc_feature (100)..(100): n is a, c, g, or t
  misc_feature (681)..(693): n is a, c, g, or t
ctcagcttttatctgacaagcatatatgatcatcaaatattgaagctttaagcaaagttgttcagaaactgatcccacaactccaaacttctggagaatnttgctgaacatcttaatctcaaattctgaaattgaaagggcatttctatttgatgtggtcagtaaaatttatattgcaactgatagtactccggtggatatgcaaacctatgagctctgctgtgatatgatagatgtggttattgacatctcttgtatttatggtctcaaagaagatggagcaggaaccccctatgacaaggaatccacagccatcataaagcttaataatacaaccgtgctttatttaaaagaggtgacaaagttcctggctctcgtttgctttgtcagagaggaaagctttgaaagaaaagggctaattgactataattttcattgcttccggaaggccattcatgaagtttttgaggtgagaatgaaagtagtaaaatctcgaaaggttcagaatcggctgcagaagaaaaagagagccacccctaatgggacccctagagtgctgctgtaggtgaggtttcaggaatgtcttttgaaatcagaccttatccatgaggctgctgcgccatgttgcactaaaggaagaggaagaaggagattgggacacataccattgatttgttgttnnnnnnnnnnnnnttcctgcaaccctcttgatcttctcttttataaataaagtaagcactttgaagc

SEQ ID NO: 13627 - DNA, 440 bp, Homo Sapiens
acattctggatttcagagtagagatttctgtgttgtctcctagaaagcattacatgtagtttatttcagcatccttgttgggtggggccctggctctcttcccctttggtgggacctcccctttctttgggcttcagttcactcaggaagaaatgaagtgtcgccatctttatgtgcttccagtggaaatgtcacttgctacagacaatagtgcatgagagtctagagaagtagtgaccagaacagggcagagtaggtcccctccatggccctgaatcctcctctgctccagggctggcctctgcagagctgattaaacagtgttgtgactgtctcatgggaagagctggggcccagagggaccttgagtcagaaatgttgccagaaaaagtatctcctccaaccaaaacatctcaataaaaccattttagttgaaaagc

SEQ ID NO: 13628 - DNA, 576 bp, Homo Sapiens
cgattaacctattgtgcgccttggttgacttgctttgttgcagccttttgtgaatcaactttttgactgtttggagtatggacatttatactctgtccttttgtggaaaagtccagtggtcctaaaggtattccatgagggttcaaaattttcttgagggcttgatagtttggcttttcatcatatgctaaactatgagcacataccaaaaattgggctatttcacagcaactgcttccagaaggagcccatttaagcactgactgggggagctcgtccaacagatttgttttagcagtctgcacagccacagggtccttcaggttctgttcccagggaagtttcccacacaaccaccgcagcatgcagtagccgaggatctcaacgtcacttcgtctggacaaggctactcccttgtgggcatccaagctggtaaactctattgtcccattatggccttttctaggattttcctgatactgtttgtggttcccattgggacaatatctgtaggaaagtccataatctgcaagataaaccaggccaagctaggtcccaattcttcctcagcctctg

SEQ ID NO: 13629 - DNA, 216 bp, Homo Sapiens
  misc_feature (56)..(56): n is a, c, g, or t
ctcctgagcagaagctgagccatggaggcagattctggaaggatgagaaaaaaaanctggagatagggaggcctgggagggagacaagttaggaacagatctacacactggagggttgaaacgatgggtttgaaactcagccagaactgagttagaatcctggctctgacttgacgtggccaaccctaagcaaagaatctctcacctctctatgcc

SEQ ID NO: 13630 - DNA, 414 bp, Homo Sapiens
attgaggtcttattgaatgagaaatcctgcactacatgctgtgaggactaaatagggagcttcttagagtccctatcaaaaatggagcttatagcatgagagataagacatatgcctcaataactgtaattaaatcagattatggtaaatcctgtaatcgacgtttcctcactgtactatggctgttgagaagagaaagtcctcacttcctgctgagggtatcaggaacgggttattttgtggagagtatggcatttgtcctgaaacttaatgcttccagcgaatcctaagccctttgagaaatggatccttcctgccttattcacccacttttttccatacctagcccagtccctgatacactattgctccatcaatgctttggtgttaagtaatgaataaaagaaagtacag

SEQ ID NO: 13631 - DNA, 389 bp, Homo Sapiens
gttctgcagatcacattagctgggtccagctgctccgaggtccttccacactgaccaggaagagaggctcggcatgatactcacatgccagggtagaatccagccaccgccccattcccttccaaaagaaaacctccgcagagcttgccctccaccctctcaagcagcagcaacattttacgtccccagctctggcagttccctgcaacgtctctttttcagctggccttctgtgtggtttccttctctctctacttgaaactgaccacctctccagacacacctgctccccttgggcccggcactccccgtttccccaggacacgtccaattcagctgtcacttagcggctggccaaagcatcagcttctgcttaaccgggaggctct

SEQ ID NO: 13632 - DNA, 202 bp, Homo Sapiens
ggatcaagttcatcttgggcattgtatagaaaagtttccacagttatgataaaaaggaatctatataaagtttttgttaattcccaccctctatccattttcccctttcttcctcctctctacatgcacctgcactttagttactctatgtgtctacacagggacctgtcaatcctactagattataaactccttgagagac

SEQ ID NO: 13633 - DNA, 413 bp, Homo Sapiens
tacgatcagctcggtacccgcgagaccccaactgccatgaagataacataaaaatattaagactagaaccaagaaatctgttcggcgaaaagtaagacaatattcttcttaaacaatatattaggcttaatttttatctgtttaaaaattttagataaattcgcaaaataattccttctttactatgatatgtaaggctatatattgtaggagattaaatacaaggagttaagcatgtatttaacaattcaaggcaatgtaccaaatgaatggcaaaaactggagagctaaatatgttcagaaagaaaagaaatcactttgaaacaaagtagccaaggaaggaagtgctaggatttgccagctgggcactgaaagagaaagcatcagaaagaattaagagagaatgggtcagt

SEQ ID NO: 13634 - DNA, 323 bp, Homo Sapiens
gtgtttgagagcatgctgggtgggctgatcttgcgacccctcagccgcttctcccgaaactctctccgctggcgccgagagcggcgtcccgagtacatggccttctcctcctcaagagccttggcatgcttgatggcctctgcctcctccttgtctttccggagcatcctgacgaagtcaccgtcggccatgccataagtcgtggcctgtttgttgagatctgccacctgctcctggttcaattcatccacgtccacctccacgtcgatgtcggggatgacctcatcttcgtccgagttgctctcctcctcggccgctgactc

SEQ ID NO: 13635 - DNA, 534 bp, Homo Sapiens
cctcgtacgtagatcgagcgaggagtggaaagtctggcctccggaggcgccgcgctcatgctggacctccaccaggtgggccatgtaattcttgtccatgatgttctgctccagagtctgggggtcgtgggccactgcctggtccaggaactggaggagtttgctcatgctggacacggggatgccaaacgactgcacgaacagcagcagctgctgcggctccaggtcctgcagggcggcgtccaccaggcggagcacctcagaacggatcatgcgcagcttcagccagtcaggaagcagcagcgcctcctccgatgtgtccaccaggaaggcggtgggcagtggcttctcctccggaaaccagatgtccagcagcgcctggaactcgctgtcgtcggctcgaggcgggcccagcgtcagcaggatcaccatggcatggaccacgaggatgtgcatggtggctgtctccccgctgctccagcgtagggaagacctggtcctgagactccgaccagctgtagacctcctccgctc

SEQ ID NO: 13636 - DNA, 541 bp, Homo Sapiens
taaaccaggaagccaggtcttgcctgggctcaggggcaggcactgggcccgaaggaggagggccacttcctgccagccctccaccgagcccacctatggcgcctccccaggaagtgctccggccagcccagggtaaacacgctagccctgcccctctgggaccatagcccggggacccagactcttggccacgctcattcccacccctacccaggaccggcagccggagccttgggtccctgcatgggcctggggcgccctgtgccccttcacctcgtcctcgtccagttgactgctgtggcagccggtgctacccgctgtgtccactgcaccctggccctgttctgagcggtcacagcagctggggagaagggccatcctggaagccgggcagatgaggacggaaccagacagtcccactgtggtgggcagaggtggggcctgggcctgaccacggggcagtgcaaggagagaggcatcctgagagggcctgaggtgtccccacctcccctgaacacccatccctcagtggccagcctgg

SEQ ID NO: 13637 - DNA, 315 bp, Homo Sapiens
gaaagaaccctgtgggatggattggaatgtagcaatcagtgtaaattcataatttctacaataagcatacttgtgtaggtaatgcatgtaatatgagcgtatgcatacatgtctgtgtccacataggtatatatttgcctgtgtgtatatatacgcagatattttctagctctattcaataaaaaggcctagaaacaaaggcatcccagtaactatgaacacacctagcactctaatcttagattctaatgctgtgcctcatctaaaagaaaccatggctctgtgaacaggactcactacattactttaagaagt

SEQ ID NO: 13638 - DNA, 426 bp, Homo Sapiens
ataattttgccacagacatctcctcacccccagtgcctgtctggagctcacccaaggtcaccaaacaacttggttgtgaaccaactgcccttaaccttctgggggagggggattagctagactaggagaccagaagtgaatgggaaagggtgaggacttcacaatgttggcctgtcagagcttgattagaagccaagacagtggcagcaaaggaagacttggcccaggaaaaacctgtgggttgtgctaatttctgtccagaaaatagggtggacagaagcttgtggggtgcatggaggaattgggacctggttatgttgttattctcggactgtgaattttggtgatgtaaaacagaatattctgtaaacctaatgtctgtataaataatgagcgttaacacagtaaaatattcaataagaagtc

SEQ ID NO: 13639 - DNA, 1170 bp, Homo Sapiens
gcacgaggcagcatggcggacgcagctcctcaactaggcaagaggaagcgcgaattggacgtggaggaggcccacgcgcgccagcacagaggaaaaggaggcaggagttggaaatggtacctgtgctcctgtccgcttaccgttctccggcttcagactgcagaaggtgctgagggagtctgcgcgggacaaaatcattttcctacacgggaaggtgaatgaggcctctggggatggggatggagaggatgccgttgtgatcctggagaagacgccatttcaggtggaacaggtggctcagctcctgacgggcagccctgagctccaattgcagttctccaatgatatctacagcacctatcacttgttccctccaagacaactgaatgatgtaaagacgaccgtggtttaccctgccacagagaaacacctgcagaagtacctgcgccaggacctccgcctgatccgagagacgggagatgactacaggaatattactttaccccacctggagtcccagagcctcagcatccagtgggtgtataacattctcgacaagaaggctgaagcggaccggattgttttcgagaacccagatccctctgatggttttgtcctcatccctgacctcaagtggaaccaacagcagctcgatgacttgtacttgatcgccatctgccatcgccggggcatcagatccctacgcgaccttactccggagcacttgccgctgctcaggaacatcctcctacagggcaggaggccatcctgcagcgctaccggatgaagggagaccatctgcgagtatacctgcactacctgccctcctactaccacctgcatgtgcactttcaccgccctgggcttagaggcccccggctcaggcgtggagcgggcccacctgctggctgaggtgatcgagaacttggagtgtgaccctaggcactaccagcagcgcacgctcaccttcgccctcagggctgacgaccccctgctcaagctcttgcaggaggctcagcaaagctgaattaactcaggcagaagagcacagatgtgtgggattgggggaggagtggggacaagattttttatctccaagtgaattttctaaaaatgtattttataccggcttattcctagtattgaataaactagcgggctcactcaaaa

SEQ ID NO: 13640 - DNA, 494 bp, Homo Sapiens
aaaccctgcactccaaaaaagcaaaacagaccctaatttttttgtgccaaaaactgtggacatgctggctcagcatcctcaggaccaagttgttgcttaatttattgttttttaataactaatccagataaaaagttgtggggcttcagggtgacctgggcccaaaggttctgaagggcagttcctggcagccccaggcttgctgtgggaaggggccgtgccgtcactttctcatcattccatggggtgtgtctgcctgggccaactctgcatggagaggccagggctggggacagtccgcactctgccaccctcctgccccttccacccaccccagctctatgtctgtgtctgaattgtggatcgtgcagccatggttattgtggaactgtggaacctgcagccatagttatttgactatatcttgaccgagggcttgcaggacaaagccaggccagtgttgcgcattacttacaataaaagggatcatttat

SEQ ID NO: 13641 - DNA, 337 bp, Homo Sapiens
gcatactacatgcagttctttaaccaatgtctgtttggctaatgtaattaaagttgttaatttatatgagtgcatttcaactatgtcaatggtttcttaatatttattgtgtagaagtactggtaatttttttatttacaatatgtttaaagagataacagtttgatatgttttcatgtgtttatagcagaagttatttatttctatggcattccagcggatattttggtgtttgcgaggcatgcagtcaatattttgtacagttagtggacagtattcagcaacgcctgatagcttctttggccttatgttaaataaaaagacctgtttgggatgt

SEQ ID NO: 13642 - DNA, 554 bp, Homo Sapiens
  misc_feature (80)..(90): n is a, c, g, or t
aataagcaaaacagtgtggtggggtttttccatcactggcctttgctgttcctgggtgccagatggcattatatccatgnnnnnnnnnnnagctgcaagttataatgttgaccaggcactgttacttccacttgatcacactgtttggggctctctttgatgtacaaaacactcctaagttaatgaaatgcgttgcagctggctaatggctgggaaagtgcaaaccctgcattgaacccttcccatcagactattcaatggctaggtaatgtcaggcccgagctggagaaggggcaaacaggctcgttgccaggcaggcccgggactcctgggcaaacggctgtggaggggctggtatttttctcctttcaatagaagtggtctgtgcctgcagcaaatgagaaataaatccatcaaggccaagctcaggcttattttgctggctgctagaatttgcataagagccttgtatatacaggtaaacaaagacttcctggaattactaatgtggaggtgatctcagaactgggaacaaagtagggcctcataaaatg

SEQ ID NO: 13643 - DNA, 686 bp, Homo Sapiens
  misc_feature (293)..(348): n is a, c, g, or t
gactgcccaacaacgtgaacgtatatgatactactgaacaggtatacttaaaatgattaaggtggcaaatgtgtatgtattttacaattaaaatgaaaaaagcaacaaacaaaatcctgaagcttttctcccatcaagatccttctttaagttgcagcaaatggagccagaatatggctgagacatatttctgcttcctaaaagtgttgcatggtggattccttccacgaggttttaggaactctagtccgacacatttaaggaaaggttaagcatatgggctaattgtgccnnnnnnnnnnnnnnnnnnnnnnnnnnnnnnnnnnnnnnnnnnnnnnnnnnnnnnnnacaagccagtgttccagatgttagagatacattggtgacatatacatccttgcctcaaggagcttccagtcttgtgggagaatcagagagatggcccaatagagtaacgtgagagcacacacagcatgggtgcccaaataggccgagtgcggggaaactcccaagaggaagtagcatttaagccaggattggaaagaggagttagtgaggcaaagagatggggcagagaagaacattctcaacagaggcaactgcatttgtgaagacccggaggccagattacatggcaagtatgagaaactaaaagaaaacaaagacagcgatagagcaggaagcag

SEQ ID NO: 13644 - DNA, 472 bp, Homo Sapiens
cgtacccgcatttttactttaaatacccgaaaaattatcttggagtggtggcataggcctgtgaatcccgctacatctggcttctgaggcaccaggatccatttggacctaagaggtgtgccgtttctgtgagcccaggatcatccccatccactccagtctgggcgaccagagccagactctgactccaaaagtatacaaacacaaagtggctctgactttcccataggcttaatattacatttggacatcgtggccaactctatcaagaccacaaataccacttacaattaattttaaattattcatctgtacatagttttctaaaatgtatataattcaaacagagcatcttgtaactgaagacacaccatatctatgatatcgcattagtccatgtggggaaaagaaagatcagatttgttactgtgtctgttagaaaaggaagacataagaactccgaactcatgcc

SEQ ID NO: 13645 - DNA, 507 bp, Homo Sapiens
acaccacaaactccgttgtatactccagaaaggctgcagaagtcccctgcaaaaatgacccctacaaagcaggcagcttttaaggagtccttaaaagactcctcctcacccggccatgactcaccattggattcaaaaatcactcctcaaaaacgacatacccaggcaggagaaggtacctctcttgaaacgaagacaccaagaactcctaagaggcaaggtactcagccgcctgggtttttgccaaactgtacttggccacattcagtgaattccagtccagaaagcccctcctgtccagcccctccaacttcatcgactgcccagcccaggagagagtgtctcactcccatcagagaccctctcagaacacctccgagagcagcagccttcatgggcacgcctcagaatcaaacacaccaacagccccatgtcctcagagctgctcgggcagaggaaccagcccagaaagctaaaggataaagctatcaaaacatccgactcgtg

SEQ ID NO: 13646 - DNA, 461 bp, Homo Sapiens
cctaaagatagatctgtcctggtgcggcgtcgtatcctatgttcgtgctgctgtggactccatactgtgtctctgtgacgactctgtgtgtgcctggatgtgggttcgtggctcagagaccctctgagagtgaccccaggagctttgagtgtgtctcctctggctgtggctgtcggggcactcactgcttgagacgggatttctagagtgcttggagcatgcacgtttctgcaggcattatctgaaggcacgtgtctttgtaatggtgttattggctgggggtggccctgtggccactgtcgtgggtaggtgggggtgtctttccacagcgctgagtctttctctattgcgtctgtgttctgcaggctctgaccttggagccacctgctggctgtgtggaccgggatccgccttgtccgctgtatctggggaagagccagcgctgggtatcctctccgtcg

SEQ ID NO: 13647 - DNA, 560 bp, Homo Sapiens
tgtggctgctgactataggtcaacagtagtaggccggggagttccaggaggttgagagtaagggtctgtattggacctagctgttcctgaagattgggaataagaatctacaacgggtcgtggagttcctgggggttgggagtatgggtcctgagatgttggccttgatatggttccaggctgggaaaaagcccttgaaggatgggcaaaagattcattcactgctggatgtggggtaaggggaggctgactatatggatcatttgactgattatgagaaaaattatctataggtcttggtgtcaaagcaggcctttcataagggtcaacagacaatcgccttgatgcctgtgacactgatccataaggatcctgagaggatggaggaggttgcattggagtcttaaaaggtccaggaccactatcaagaggtgcaggtgtcaacaagggtcgtgcatatgagtcaggtatcctttgtctttgaaacacatctgccctaggagatggtttagtaaagtgatcactggttccagctgctatagcctttgcagtttgttctg

SEQ ID NO: 13648 - DNA, 543 bp, Homo Sapiens
caagaagcgggcggtggagaaggtaaagctggccatcaagccatactttcagaagaaggcatcacaaggaaggagtacaaggacatcctgaggaaggccgtccacaagatctgccacagcaaaagtggggaaatcaacccagtgaaggtgagcaacctggtgcgggcctacgtccagcgctaccgctacttccgcaagcacggtcgcaagccaggggaccccccagggcccccacggccgcccaaggagccagggcccccagacaagggtggcccgggcctgcccctgccccctctctgagagccctggccagctcttcgcccctcacctctttgaaactctggacgtatttatggctccacctccccacctccctcccccgtcagtgggatgactgggggagggttgctgcagggaagaggagagccccctgccctgccctgccccgtgtccacctcccttgcccccaagcctgtccccagtgcccctcccttctgtttgtgcccctctccccaatttcattaaagatttcatgaaacatta

SEQ ID NO: 13649 - DNA, 2132 bp, Homo Sapiens
  misc_feature (1920)..(1933): n is a, c, g, or t
  misc_feature (2066)..(2076): n is a, c, g, or t
ccacgcgtccggagatcattatctgaactcaggcagcctaggagaggcagtggtgggattccaatgggtcttggtgggtgggaggtggggcatgtgcaaagcaagcaaggaacatttggggtaagaaaacaaacatgaggcaaaagaaaaaatacatgtttttaagaaaacattgagcagagaactgcagccaggatgcgctcagcagacattcactctggctgctgggacatcagaaaacaaagtcttcatctctctctccagtttcacccaccccaccctttgctttcatttcaggtgtgttggtctatatgacagggaggagagtaaaggagagcaggagcaattggctgcctgcaaagccagctggaggtgaagtgcaggaaaggaaaggtcaccccagttctactccatggcctctctgctcccagctgtggtaggctcacatagccagtgtgatcggtttttaagaggcagtgcttttcagcttttctccctgatatatccattttgcttcccagcactttttaggagtagtgagagcacttcctgcccttgttggaagccccagggtggacactcagcacgaaggtctctcccttaactgctgcccttccaagacttgctcccgagatggagtgggcgtggtcttccaggctggcccttccttctcctcaccgccaccttccctgccccagccccagcagccatgggtacatgggtccccagctcacctatggattcccgccagtctgcccagctgcagtactcacgccccatgggggatcttggtctgtttttcttgtgggagcctagtggagagcagacgtggctttttatgtgtcttgttggggaggtgacttgcatggtggggacaaggctgtcgtggcaaccttgggatcgagtttgagactaaaggatgtcatgagatccctggcttctccccatgttgttcccggacaagggcagaagggaggcatggcaagggacctctgctgtccttactcaacagtggtcctcatccctccccacctcccactgcttcctgcaagggcaccagttgtatgagaaagttggcctttggacttaggatttcttattgtagctaagagccatctgaagcagcaggttgcaggacaaatgcttcagtccgccgagagcagtaccgtgtggccaagaggtggactcagagccttccttgagctaaactcggccaaccaaggcacgcagcatgtcccctcaggtctccagtcagtccaggttgaccctcagttctggacgtgtgtatatagctgtatttaatacctcaaggtcattagtggctctggggatgccagggcaggaggacgagggtgcgctgtggacacagcagtccgcggaattccgttctgggaagccaatggtcgccggcaccccttgcttcctccctctgttgtctgcctgtgtgacacacatcaatggcaataacttcttccaactcctcgcagaagtgggagaggccggcagcctgcaccgagaggggctttcctctctcttgcccaccgcttcgttctgttttggctgcagagagtggttcatccatactctcattccctcgcctccccttgtggacgggggtcttgccttttcaattcctgtgttttggtgtcttcccttatctgctaccctgaatcacctgtcctggtcttgctgtgtgatgggaacatgcttgtaaactgcgtaacaaatctactttgtgtatgtgtctgtttatgggggtggtttattatttttgctggtccctagaccactttgtatgaccgtttgcagtctgagcaggccaggggctgacagctaatgtcaggaccctcagcggtggagcctgctggggggacccagctgctcttggacaagtggctgagctcctatctggcctcctcnnnnnnnnnnnnnncaagtaatttgtgtgtatttctaactgattgtattgaaaaaattcctagtatttcagtaaaaatgcctgttgtgagatgaacctcctgtaacttctatctgttcttttttgaggctcagggagaaactagcannnnnnnnnnnccaaactactttttgtcactgtgacagttgtaaataaagtttgaaaatgctttcca

SEQ ID NO: 13650 - DNA, 671 bp, Homo Sapiens
aaccgtttgctatagcttactgcgggactaattttaaataaggaaataagtatgtcagatgcagtagacgatacaggttgcatgtggacactcagtcacattaacaacttgggaaaaaaatggcaatgttacggtgaatttctcagatgaacttttttcagttataaaacatctattttgaatccgtaaatatttgaaatgttttattaaggcatgtaataaactattctttgaaacttgttgggtagaatgaaaattaaagccataatggtaaaagatggcatactgattataaaagaagcagaaaaacattgatttttttatatctttcataatataattttctaacaatgcaataaaaccactaaacttttgtgtccatattttactgagaccatgtttcattaaaagcatagtttcatagtatttaatttacatttctccctaatgttcttacccaaatgtacctgaactaaaaaatgttagatgttggtgataagttgacagttaaataaaattctctaaaattgcttctaattgaatagaattgtacattccattttcattttctcacttcatgtggatttactcagtttagtcttttgatcggtaattagtatatctgaatttgtaggagagaatctttccttagttgatgataatcatgcctc

SEQ ID NO: 13651 - DNA, 760 bp, Homo Sapiens
cctcagaaaatgcagctcaaagcgacgttgagtctgggaaactgatcattaagaagtccaaggatggttctgaggacaagttctacagccacaagaaaatccttccctgctcacccctcactccttcttcatggccccagtggctctgcctttggtttatctgtggccagcattggtgacatcaaccaggatggatttcaggatattgctgtgggagctccgtttgaaggcttgggcaaagtgtacatctatcacagtagctctaaggggctccttagacagccccagcaggtaatccatggagagaagctgggactgcctgggttggccaccttcggctattccctcagtgggcagatggatgtggatgagaacttctacccagaccttctagtgggaagcctgtcagaccacattgtgctgctgcgggcccggcccgtcatcaacatcgtccacaagaccttggtgcccaggccagctgtgctggaccctgcactttgcacggccacctcttgtgtgcaagtggagctgtgctttgcttacaaccagagtgccgggaaccccaactacaggcgaaacatcaccctggcctacactctggaggctgacagggaccgccggccgccccggctccgctttgccagcagtgagtccgctgtcttccacggcttcttctccatgcccgagatgcgctgccagaagctggagctgctcctgatgacaacctccgtgacaactccaactcgtgcggaccagctca

SEQ ID NO: 13652 - DNA, 955 bp, Homo Sapiens
  misc_feature (272)..(272): n is a, c, g, or t
ccacgcgtccgaagaaaatgacccagaggcaaacatagatacaatctatgatcgatttgtacatcttgataatttaccggaagatggacttcagtgtgtactttgtgttggacttcagtttggaaaagtggatcaccatgtattcataagtaatagaaataaggcaattcttcagttagatagtcctgaatctgctcagtcaatgtatagcttttctgaaacaaaatccacaaaaatattgggtgaccatatgttgacctgctcattatctnccaaagatagacttaccagagggtgcaaattgagcatgacccagaattagaaaaagaaagccctggcttgaaaaacagtccaattgatgaaagtgaggtgcaaacagcaactgatagtccctctgttaaacctaatgagcttgaagaagaaagtactcccagcattcaaacagaaactttggtacagcaggaagagccttgtgaggaagaagctgaaaaagcaacatgtgattctgactttgctgttgaaactttggagcttgaaactcaaggagaggaggtcaaagaagaaattcctcttgtagcatccgcttcagtcagtattgaacaattcactgaaaatgccgaggagtgtgctttaaatcagcagatgtttaacagtgacttggagaagaaaggggcagaaattattaaccctaaaacagcattgttaccatctgacagtgtgtttgcagaagaaaggaacctcaaaggaattctagaagaatctccatctgaagcagaagatttcatttctggaattacacagactatggtagaagctgtagctgaagtagaaaaaaatgaaactgtttcggaaatattgccatcaacttgtattgtgacgttagtaccaggaattcccactggggatgagaagacagtggacaaaaagaatatttctgaaaaaaaaggtaacatgg

SEQ ID NO: 13653 - DNA, 256 bp, Homo Sapiens
cactgtgggaatacttgtgttgagcacttgctgtgtgttctgaataggacaaccagggtccaccccttctctctgggcttgttgagaagaggggtgcccagcctgacagtgatgggacagggaggcttcagtgccatttggccatgtgagcagtgttagtctgaggtacacatcatattgcctacagccttctttcctgtgtgtctgtaacatttccaaacctaaactccgaactcgtgcggtaccggagctgatt

SEQ ID NO: 13654 - DNA, 770 bp, Homo Sapiens
ccacgcgtccgcccacgcgtccggtggttcgaggaaattgcttctgctatggtcatgccagcgaatgtgcccctgtggatggattcaatgaagaagtggaaggaatggttcacggacactgcatgtgcaggcataacaccaagggcttaaactgtgaactctgcatggatttctaccatgatttaccttggagacctgctgaaggccgaaacagcaacgcctgtaaaaaatgtaactgcaatgaacattccatctcttgtcactttgacatggctgtttacctggccacggggaacgtcagcggaggcgtgtgtgatgactgtcagcacaacaccatggggcgcaactgtgagcagtgcaagccgttttactaccagcacccagagagggacatccgagatcctaatttctgtgaacgatgtacgtgtgacccagctggctctcaaaatgagggaatttgtgacagctatactgatttttctactggtctcattgctggccagtgtcggtgtaaattaaatgtggaaggagaacattgtgatgtttgcaaagaaggcttctatgatttaagcagtgaagatccatttggttgtaaatcttgtgcttgcaatcctctgggaacaattcctggaggaaatccttgtgattccgagacaggtcactgctactgcaagcgtctggtgacaggacagcattgtgaccatgtgcctgccagagcacctggggcttaagctatgagttggatggattcgccatgtactcgaccccgc

SEQ ID NO: 13655 - DNA, 401 bp, Homo Sapiens
  misc_feature (225)..(299): n is a, c, g, or t
gaggcagcaatgaaaaagcagtgagctataggaccgcaccactgcactttagtctgggcaagagagcaagatcctgcctctaaaacaaaattttaaaatgagaaataaaactggcattttgacatatcagctgtgaggtgcatcacaagaaatcctgacagtgttttttcttgtgagtgacatacttttaaaataaaatcacggccaggcagagtggctcacacnnnnnnnnnnnnnnnnnnnnnnnnnnnnnnnnnnnnnnnnnnnnnnnnnnnnnnnnnnnnnnnnnnnnnnnnnnnaacaacatcctgtctctactaagacttccaaaattagccaggcatggtggcgcacgccagtagtcccaagctattcaggtgctaaggaagaagaatcacttg

SEQ ID NO: 13656 - DNA, 1211 bp, Homo Sapiens
ccacgcgtccgggagacccgggcatcgaaggccccattggattcccaggacccaagggcgttcctggcttcaaaggagagaagggtgaatttggagccgacggtcgcaagggggcccctggcctggctggcaagaacgggaccgatggacagaagggcaagctggggcgcatcggacctcctggctgcaagggagaccctggaaaccggggccccgacggttacccgggggaagcagggagtccaggggagcgaggagaccaaggcggcaagggggaccctggccgcccaggacgcagagggcccccgggagaaatcggggccaagggaagcaaggggtatcaaggcaacaatggagccccaggaagtcctggtgtgaaaggagccaagggcgggcctgggccccgcggacccaaaggcgagccggggcgcaggggagaccccggcaccaagggcagcccaggcagcgatggccccaagggggagaagggggaccctggccctgaggggccccgcggcctggctggagaggttggcaacaaaggagccaagggagaccgaggcttgcctggacccagaggcccccagggagctcttggggagcccggaaagcagggatctcggggagaccccggtgatgcaggaccccgtggagactcaggacagccaggccccaagggagaccccggcaggcctggattcagctacccaggaccccgaggagcacccggagaaaaaggcgagcccggcccacgcggccccgagggaggccgaggcgactttggcttgaaaggagaacctgggaggaaaggagagaaaggagagcctgcggatcctggtccccctggtgagccaggccctcgggggccaagaggagtcccaggacccgagggtgagcccgggccccctggagaccccggtctcacggagtgtgacgtcatgacctacgtgagggagacctgcgggtgctgcgactgtgagaagcgctgtggcgccctggacgtggtcttcgtcatcgacagctccgagagcattgggtacaccaacttcacactggagaagaacttcgtcatcaaacgtggtcaaacaggctgggtgccatcgctaaggaccccaaagtccgagacagggacgcgtgtgggcgtggtgcagtacagccacgagggcacctttgagggcatccagctggacggacgaacgtatcgactccct

SEQ ID NO: 13657 - DNA, 531 bp, Homo Sapiens
tgcagtccagagcaacttaaatccagccactgctccagactgcaaatcggattcaatatttcctggatccaggtaggcgatgctcataagaaaacctggtccggtgaaagcccagagtttacgaaagctaaaacaagagtactgtacaagagaggaaaagagattaaactgaacatcaccattgaactactgatataattggtctgttatcacatatgaagcagacaaaatccagcctcacaagaaaaataggatttacaatgtcagatatagcatgtgtccaagtttcacctccatcttacccactttttattaagaagctggccacttctctgtccaagtcaaagctcttcccttacctgcaggttccatcagcctcttattctaaaaccagaataacagtatcagtacctctgtgcccaaacacttcccaaaaaggacaagagccaccattttaaaaaggaaacaagccaggtgtggtgctgtgtggtgtgtgcctatagtccaactacttgggacactgaggagagc

SEQ ID NO: 13658 - DNA, 573 bp, Homo Sapiens
agatctgcatatttcttgtacatatgcatgcaaatgaaagaagggagtttgtactggtgccatttctcccttcagttgctggttaatgggatttgctagaaaaaattctcccggttgaagggtgaaaacagacccttatgtgtatatctgtacagagatgtgtatatgggatgtggtggcactttgctgaatgtgaacttgccttgtcaatggaaagattgaaaagtattatgtttatttatacatttgtataaatctatatatacacgtatgtatatgtgtgtgtatagataaagctatatacatatatttcccttaaaaatgtgtgtgtataataggtaaacagcctttgttaagcaagattaatgtctatggaaagttctggattattctgtaagccagaggaggtgacagtctagagtacatcatcagaacatactaaaatggaagtcctttggattatagttttgtttatggatattacacaatgaatgcttgtctgaacagttcttacttgccagttccactattcttcatcttcaccaccttctactggtcagtctttcatcactt

SEQ ID NO: 13659 - DNA, 1052 bp, Homo Sapiens
gctttataatttctaagcatttaggcagaaaagaaagaggcattaaaaatacaactcagaaatatttaaattttgatgaaataagagtcttgttagttgcagtctcttttgaatactttccttgggagaaaatatgctgtgaaacagtgatctgccactacacagtggttggggacattaggtcatttctagaaagcaattatatacacctaatggcttattccctataaaatgaactattatggtgtcagaaaaggctagatactgtgatcatgctgaaagacaggttgctcagatgtatacaaatgaatttattctcttgacctctagttcagatgtcagaaatattttgtactaaaacagagataggttcctatattggaatatgttcaatatttactacctttctcttctattctctatccataaaactctgcctgattaaaatattttaaagtgtactttttacctgatactgttaatagcattgatgatcctggattttaaagatggctgctttagtctactttgattttgggaaagccattttaaacaaacaaatatgtggtatcatttaaagttttataaagaattaagagtaactgaatgacagctgaatttctcatgtatttattgactgcctcctaggttcaaagttctgtgctgcatgcagacatatcaaaatttcttatatctttggatcatgaatgtcagggtctttcagctcctggtcagaaaaaatactgtcatgtcagagtgaggaattcttagtatgaggtggtgctggggagtaccagtagcttcagttcaaaaattcattgctctgggtcccaacagctttgttccaagtctacatcttaacagtatgtggaaggattggttcaggcttcctttatattctacatagatcttgatttgggatttttaggaaccaatagcttaagctatgttagaacaatccaaaagctttaaaaattgtcagagcaaaccctatagcaaaccctatctagaccttaaaccttggcgttgataactgagaatttaaaggactc

SEQ ID NO: 13660 - DNA, 1021 bp, Homo Sapiens
ccacgcgtccgcccacgcgtccggaattgtagtccaacttcacaaattgataatataggagaggaagagatggatgcctctacaacccatcataaaagaaagacaatgaatgattttgactatttgaaactactaggtaaaggcacttttgggaaagttattttggttcgagagaaggcaagtggaaaatactatgctatgaagattctgaagaaagaagtcattattgcaaaggatgaagtggcacacactctaactgaaagcagagtattaaagaacactagacatccctttttaacatccttgaaatattccttccagacaaaagaccgtttgtgttttgtgatggaatatgttaatgggggcgagctgtttttccatttgtcgagagagcgggtgttctctgaggaccgcacacgtttctatggtgcagaaattgtctctgccttggactatctacattccggaaagattgtgtaccgtgatctcaagttggagaatctaatgctggacaaagatggccacataaaaattacagattttggactttgcaaagaagggatcacagatgcagccaccatgaagacattctgtggcactccagaatatctggcaccagaggtgttagaagataatgactatggccgagcagtagactggtggggcctaggggttgtcatgtatgaaatgatgtgtgggaggttacctttctacaaccaggaccatgagaaactttttgaattaatattaatggaagacattaaatttcctcgaacactctcttcagatgcaaaatcattgctttcagggctcttgataaaggatccaaataaacgccttggtggaggaccagatgatgcaaaagaaattatgagacacagtttcttctttggagtaaactggcaagatgtatatgataaaaagcttgtacctccttttaaacctcaagtaacatctgagacagatactagatattttgatgaagaatttacagctcagactattacaataacaccacctg

SEQ ID NO: 13661 - DNA, 474 bp, Homo Sapiens
aatcagacatcatgttcctcctgaaatgatgtaagagaaagtgtatagcatcacctatggagtattcttgggggaaaataaatgaaccaggatcaaatccagcttctaggtctaactggacacatctggggatactctcagtcaaatcctgagtggaggaaattccacaggacaaataaaagccgaaaagaactaaaacgcaggggtaaattttacagagtaaaggagacacatcaaccaaatgcaatgttggatctagatttcaacaaccaagaaaactgtatttttgagatagaaacaatacagactattatatgataattaaggaaatcttgtcaattttttgagtgtgacaatgatgctgtggttcagttaaaaagatttatctgctagagatacatttcaaagtacttacaagtgcaatgatgtaacacctgagatttactttaaaatatcccagtagggccggatata

SEQ ID NO: 13662 - DNA, 694 bp, Homo Sapiens
aatatactaaaagagtgtgtgtgtattcacgcagttactcgcttccatttttatgacctttcaactataggtaataactcttagagaaattaatttaatattagaatttctattatgaatcatgtgaaagcatgacattcgttcacaatagcactattttaaataaattataagctttaaggtacgaagtatttaatagatctaatcaaatatgttgattcatggctataataaagcaggagcaattataaaatcttcaatcaattgaacttttacaaaaccacttgagaatttcatgagcactttaaaatctgaactttcaaagcttgctattaaatcatttagaatgtttacatttactaaggtgtgctgggtcatgtaaaatattagacactaatattttcatagaaattaggctggagaaagaaggaagaaatggttttcttaaatacctacaaaaaagttactgtggtatctatgagttatcatcttagctgtgttaaaaatgaatttttactatggcagatatggtatggatcgtaaaattttaagcactaaaaattttttcataacctttcataataaagtttaataataggtttattaactgaatttcattagttttttaaaagtgtttttggtttgtgtatatatacatatacaaatacaacatttacaataaataaaatacttg

SEQ ID NO: 13663 - DNA, 570 bp, Homo Sapiens
ttgcagcatggcctggccacccagagggcccttgtgtccaagttcccggagctgctgttcgaggaggacacggagctgtgtgccgacctgtgcctgaggctcctacgacactgtggcagccgcatcagcaccatccgcacgcacgccagcgcctcgctgtacctgctcatgcgacagaacttcgagatcggccacaactttgcccgtgtgaagatgcaggtcaccatgtctctctcgtccctggtggggacgacgcagaacttcagtgaagagcacctgcgacgttcactcaaaaccatcctcacctatgctgaggaggacatggggctgcgggacagcaccttcgcagagcaggtccaggacctgatgttcaacctgcacatgatcctgacggacacggtgaagatgaaggaacaccaggaggaccctgagatgctcatcgacctcatgtacagaattgcccggggctaccagggctcaccggaccttcggctgacctggttgcagaacatggccgggaagcacgcggagctgggcaaccacgccgaggccgcccagtgcatggtgcac

SEQ ID NO: 13664 - DNA, 457 bp, Homo Sapiens
gccaggatttcaaaccccttgtagtcaacttcagaatcctcaactgtcatccccacactaccctcctgatacactggtgatctagactaatgaaaggaccttataccacttactcaagttaagtacatttagaccaaaaataaagaataaagtgctcatcccaatagaaccaatgtcttctgactgtggttacctgctcactatcgaccaacagaagaatgctacaagaaggctgtgatgcagatctgggggatgcagcctaaaactgtggagcgtgctatgcttgagaatgcacagtgattctcagcttgtcagagtatgaatgagttcaaagctgacctcagagagggtactgaaattatgttaacatcgttttcctcgtttgttttttaatgaatgtctgtttatatactatatatattttgaaattatatatctcaaaataaatatgaaagct

SEQ ID NO: 13665 - DNA, 375 bp, Homo Sapiens
  misc_feature (67)..(78): n is a, c, g, or t
  misc_feature (273)..(299): n is a, c, g, or t
caccgcgccgcggaagggggctccgagggggcgcagcctcaaaccctgcctttcctttacttttacnnnnnnnnnnnnctttggaagagagaagaacagagtgttcgattctgccctatttatgtttctactcgggaacaaacgttggttgtatgtgtgtgcgttttcttgtgttggtttttttaaagaaatgggaagaagaaaaggaaattctccgcccctttcctcgatctcgctccccccttcggttcattcgaccggtcccccctcccnnnnnnnnnnnnnnnnnnnnnnnnnnnctacgagtccacattcctgtttgtaatccttggttcgcccggttttctgttttcagtaaagtctcgttacgccata

SEQ ID NO: 13666 - DNA, 296 bp, Homo Sapiens
gtggctgtgaggaccctgtgagcggaccagacctgccctgctctgtgacagagcctgagacttaggaggtgccagaggccccccaccaaccagcccagccactgttgctggctgtgtcgtttgtgttgtgtgtatggtactagcacaccactgcatgtctctagaatgctgttgccacttacgggggctggagaaggcctggataaagacagaagggcggcaacacacaacccaagcccccacccccaccctctccttgaggttctgtgaattaaaatatttgcaaattcaaaaaa

SEQ ID NO: 13667 - DNA, 197 bp, Homo Sapiens
tgcggacttcggcctgcccctcacctcactcccgctgcttgcacctcccggatggtgctgactgctccctaagcggcggcggcggcgagtcgtgaggacgcgccgcggaggctgttcggggtcgaggcttcccgtcgccggcacttcctcttgcggcgcccgtgcgcggccggcccggcaggcgggatggcggtcgc

SEQ ID NO: 13668 - DNA, 605 bp, Homo Sapiens
tattcgactcctttaggaaattggcctcgggcccgggatcggcacgagcagaatgaccaccatgccagcccaagaggtgagtttctgttatacgacttgggcctaaaaaaaccgattttcagggggaataaaaaaccctagcattttagtaagactattttatatacttttttacattgatcaagtacattatttttaccaaacaacattgtttcccactacatccatggttatgtataaaaaaacgccattgtcaattaagatgttaaaaaattatttccataagagtattaaattctaatctatgattcacttaacttcctactttataaacactaggtaaagtaatctcacaagctgccaaagaacacatcccaagcagtaatcacagacgatgaagcaccttacaggacccctccaccctcaaacgcgcatgtccagagaagtattaatgccttaatagactactgaaggttaactatttacatcattctaaaaatattttaagctgtattacagtgctataaattctccttttaaggaaaaaagtaatagattgtttccttaccgtgtttgaaaggaaaaaaaataaatccatagtaact

SEQ ID NO: 13669 - DNA, 762 bp, Homo Sapiens
ttttcagtcccgatgggcccggttcttacaccggaccagaggaccgagatccgagtttactctgctttccagtgggactcccctgggcttgatcccgcaccttcacggtcatttcagcacttcacacccatcaggcagctggcatcctcgctacaccctcattttgtgggcgatacccagatcctaatttcaaaagtgtaccccttatgaatagaggacgatcgacgtgttcgatggaaactcagggaagatgatgtgtcagctctatgacccagaatcttctggcatcagttcgcttaatgaattcaatcccatgggggacacgctggcctctgcaatgggttaccacattctcatctggagccaggaggaagccaggacacggaagtgagagacactaaagaaggtgtgggccagacaaggccttggagcccacacatgggatcaagtcctgcaagcagaggtggcgatttgttaaagggccaaaagtatccaaggttagggttggagcaggggtgctgggacctggggcactgtgggactgggacacttttatgttaatgctctggacttgcctccagagactgctccagagttggtgacacagctgtcccaagggcccctctgtatctagcctggaaccaaggttatcttggaactaaatgacttttctcctctcagtgggtggtagcagagggatcaagcagttatttgatttgtgctcacttttgatatggccaataaaaccataccgactgagaa

SEQ ID NO: 13670 - DNA, 1105 bp, Homo Sapiens
ccccttgcccatgcgttgcaagaaaatgccacccagaaagaacagttgctcagggttcaacttgctacaagtattggcaaccctccagtttctttacttcaacagtgcaccaatattctttcacagggaagcaaaatacaaacaagagttggattattaatgttgctttgtacctggctaagcaattgtcccattgcagtaacgcattttcttcacaattcagccaatgttccattccttacaggacaaattgcagaaaatcttggagaagaagagcagttggtccaaggcttatgtgcccttttgttgggcatttcgatttatttcaatgataactcagcttgagagctacatgaaagagaagctaaaacaactgattgagaagaggattggcaaagagaatttcatagagaaactaggatttattagcaaacatgagttgtattccagagcatctcagaaaccccagccaaactttcccagtccagaatacatgatatttgatcatgagtttacgaagctggtaaaacaacttgaaggtgttataactaaggctatttataagtccagtgaagaagataaaaaagaagaagaggtgaaaaaaacattagaacagcatgacaatattgtgactcactacaaaaatatgattcgagagcaggatctccaacttgaggaattaaggcagcaggtttctacattaaaatgtcaaaatgaacagctccagacggcagtcacacagcaagtatcacagatccagcagcacaaagaccagtataatcttcttaaaatacagctaggaacaagacaatcagcatcaaggttcttacagtgagggggctcagatgaatggcattcagccagaagaaattggtagattgcgagaagagatagaagaattaaaacgtaatcaggaacttttacaaagccagctgactgaaaaggactctatgattgaacaatatgaaatcttcccaaacatctggcacaaatgaacagtcttcagcaatagtttcagctagagattctgaacaagttgcagaattaaaacaggaactggcaacttttaaagtctcagttaaactcacaatctgtggagatcacc

SEQ ID NO: 13671 - DNA, 469 bp, Homo Sapiens
cgacgaggtgatcgccgtggccagcatgaactacgatcccattgtgtccaaggtcgctgaggtgctggcctcaggccgtgccatccggaagcgggaggtggagactggcgacatgtcctggcttacggggaaaggatcctgagctcacatgcagtagacttgggcaggcaaagggggcaccaagggcacaggccaagccttgggggcaggtgccaatctccagtcccaggatcccccagggcagaacctgagccctcccagtgcttgccttcagccacctggctcccctcctgggaggcctctgctggatccagaagatgctcaaccctcaaggcctctgctgccactgacagctggcactggaggcaggacaagccctgcctcttctccctctattgggactggtcccctgaagaaccctgcaacatgttagacattaccgtaaaattaaaacgcacaaatttgcaga

SEQ ID NO: 13672 - DNA, 666 bp, Homo Sapiens
acttctgactggatacccctgggggtcaatagtcaaccgaggagacgatgtgactcaaggcgactccagaaacattcacagaagatccctaatctggtgaatgatccccgctacagatgaaacagttttggctgttttggctgatattgcaccttccacagatgacttggagtgctgggatgagaaatttacctgcacaaggctctactctgtgcatcggccggttaaacaatgcattcatcagttatgcttcaccagtttacgacgtatgtacatcgtcaacaaggagatctgctctcgtcttgtctgtaaggaacacgaagctatgaaagatgagctttgccgtcagatggctggtctgccccctaggagactccgtcgctccaattacttccgacttcctccctgtgaaaatgtggatttgcagagacccaatggtctgtgatcattgaaaaagaggaaagaagaaaaaatgtatgggtgagaggaaggaggatctccttcttctccaaccattgacagctaacccttagacagtatttcttaaaccaatccttttgcaatgtccagcttttacccctactctctactttttcacccaaactgataacatttatctcattttctagcacttaaaatacaaagtctatattattgcataaaaaa

SEQ ID NO: 13673 - DNA, 744 bp, Homo Sapiens
tgtcttgactctttcacagctggcatgaaggtcaggcagggaaatctcaaaaacacaacctgtgtattcccagactattaatcatagaaaatcacttcaactggattacggtcttgtacctggcagaaaggctgttatgaacattggaattggatttttacacttgatatgacacttccttgagtcagatcagattcgtgtttgatagactcttgccaaaaaattgctccagggtctgtgcagtagctaaagcctttttgttgttgttgttgttttaaaagcagcattaaatgttttcatgaagaccttcccagtcgtgattttattgggaatatggtctttatctctggtcctgaataactcacactgaggaaacctctaacaagtgttgtattggaagatgtctgatggatggttggttttaataacaaatctcttccctttttctgtcccctgtgttctattctcttttctctacacattattctgggaggattcacctattcccaaagtcctttcctctttatttccatttcagagctctctgtataactccaggctgacgaatccaacggcccagtttttatctccacttggctgtctttcttgcattgacctcatcttaccttgcctctcatgatttcctcttctgcctgggctcatcacatcagattcacaccacatccacccagcttccaaaacacctgggcctcctccttcattcctccctctgtctcagtcaag

SEQ ID NO: 13674 - DNA, 548 bp, Homo Sapiens
gtcggagctgtgactaatgatgtcaaacagtatatgcttgtcagcattgccaagtggcataaaaatacagttattgtagcaccgaatacagcaccttctcaaggtggaaaatccatggagtttagttactgttgatctgatggggccttttcatacaagcaacagaagtcatgtatatgctataatcatgacagatttgttcaccaaatggattgtgattttgcctctatgtgatgtttcagcatcagaagtttctaaagctattatcaatatatttttcttatatggacctcctcagaaaataataatggaccaaagagatgaattcattcaacagatcaatattgaactgtacagattgtttggcataaagcaaattgtaatttctcacacctctggaaactgttaaccaatggaaagtacacctaacaacaatcaaagcatttctctccaaaacactgtgctgaccaccaaacaatgggatgatccactttcagctgttccatttggcttcatgtaattcaattggaacctattaaaaataccct

SEQ ID NO: 13675 - DNA, 998 bp, Homo Sapiens
aggaaactgagcggtgagactcccagctgcctacatcaaggccccaggacatgcagaaccttcctctagaacccgacccaccaccatgaggtcctgcctgtggagatgcaggcacctgagccaaggcgtccagtggtccttgcttctggctgtcctggtcttctttctcttcgccttgccctcttttattaaggagcctcaaacaaagccttccaggcatcaacgcacagagaacattaaagaaaggtctctacagtccctggcaaagcctaagtcccaggcacccacaagggcaaggaggacaaccatctatgcagagccagtgccagagaacaatgccctcaacacacaaacccagcccaaggcccacaccaccggagacagaggaaaggaggccaaccaggcaccgccggaggagcaggacaaggtgccccacacagcacagagggcagcatggaagagcccagaaaaagagaaaaccatggtgaacacactgtcacccagagggcaagatgcagggatggcctctggcaggacagaggcacaatcatggaagagccaggacacaaagacgacccaaggaaatgggggccagaccaggaagctgacggcctccaggacggtgtcagagaagcaccagggcaaagcggcaaccacagccaagacgctcattcccaaaagtcagcacagaatgctggctcccacaggagcagtgtcaacaaggacgagacagaaaggagtgaccacagcagtcatcccacctaaggagaagaaacctcaggccaccccaccccctgcccctttccagagccccacgacgcagagaaaccaaagactgaaggccgccaacttcaaatctgagcctcggtgggattttgaggaaaaatacagcttcgaaataggaggccttcagacgacttgccctgactctgtgaagatcaaagcctccaagtcgctgtggctccagaaactctttttgcccaacctcactctcttcc

SEQ ID NO: 13676 - DNA, 247 bp, Homo Sapiens
  misc_feature (213)..(213): n is a, c, g, or t
tacgtgagccatctccctgcctgctagagggaccagcctcggggtggagggagcattccaccctgcttagatcccacatccagcttgccatcaacacagcctagggttgtggccaccccgcatcccgccagatggtcctctggccaccagacgcctgtagacagaggttctaggagggggtgacagtcttgccaactaatacctccccctatncctttggttccacatccaagggtagggccctgaa

SEQ ID NO: 13677 - DNA, 1223 bp, Homo Sapiens
  misc_feature (643)..(653): n is a, c, g, or t
  misc_feature (1072)..(1073): n is a, c, g, or t
gtggcgctgcaaagatctgtagaacctcccagtgtgtagacgcttctgttcggaattatgactgtgatgttcagaaaaagtgtcatgcacatggggtatgtaatagcaataagaattgtcaccgtgaaaatggctggctcccccaaattgtgagactaaaggatacggaggaagtctggacagtggaccgacatacaatgaaatgaatactgcattgagggacggacttctggtcttcttcttcctaattgttccccttattgtctgtgctaattttatcttcatcaagagggatcaactgtggagaagctacttcagaaagaagagatcacaaacatatgagtcagatggcaaaaatcaagcaaacccttctagacagccggggagtgttcctcgacatgtttctccagtgacacctcccagagaagttcctatatatgcaaacagatttgcagtaccaacctatgcagccaagcaacctcagcagttcccatcaaggccacctccaccacaaccgaaagtatcatctcagggaaacttaattcctgcccgtcccgctcctgcacctcctttatatagtatccctcacttgatttttttaaccttctttttgcaaatgtcttcagggaactgagctaatacnnnnnnnnnnncttgatgttttcttgaaaagcctttctgttgcaactatgaatgaaaacaaaacaccacaaaacagacttcactaacacagaaaaacagaaactgagtgtgagagttgtgaaatacaaggaaatgcagtaaagccagggaatttacaataacatttccgtttccatcattgaataagtcttattcagtcatcggtgaggttaatgcactaatcatggattttttgaacatgttattgcagtgattctcaaattaactgtattggtgtaagatttttgtcattaagtgtttaagtgttattctgaattttctaccttagttatcattaatgtagttcctcattgaacatgtgataatctaatacctgtgaaaactgactaatcagctgccaataatatctaatatttttcatcatgcacgnnttaataatcatcatactctagaatcttgtctgtcactcactacatgaataagcaaatattgtcttcaaaagaatgcacaagaaccacaattaagatgtcatattattttgaaagtacaaaatatactaaaagagtgtgtgtgtattcacg

SEQ ID NO: 13678 - DNA, 733 bp, Homo Sapiens
  misc_feature (315)..(316): n is a, c, g, or t
  misc_feature (485)..(485): n is a, c, g, or t
ttgaagggagaagaccacttacatgatttgccatgtggtgcctcagtgattctcggtaacaacggcttcatctggatttacccaacacctgagcacaaagaagaggaagcagggggcttcattgcaaacctggagcctgtctctcttgctgatcgagaggtgatatcccggcttcggaactgcatcatctcgctggtaactcagaggatgatgctgtatgataccagcatcctgtactgctatgaagcatcccttccacatcagatcaaagacatcttaaagccagaaataatggaggagattgtgatggaaacnnacgccagaggcttttggaacaggagggataaggaggtgctccagaagcacgggactgtggaccttgcaggagtgaagactgtgatgtgtggtccccatatgtggctcagcaaagactcgagagatcatccctttgtctgcattgacggccctgtgaccgcctccagccncacaggcctgctttctcctgtcctaacaccaagcctgggtggcagatgaacagtgcttccttgggttgccagctgagtcccggtattagggaatagtttcagctctttcaaagtgcacagtgttacagtcgaatgggctcccatcctggaataatatggagaatcctttgtcttccactcactgtcattcacaaggcacagtgccccatgaaattgccccaatagaaaacatggcatccctgacctcc

SEQ ID NO: 13679 - DNA, 534 bp, Homo Sapiens
cgtgttctgcctcttctcggcaagagtgacttgaagacctgccgctttttccatgagttctgggccttctggctgtacgcccgcttgtcccgcagctcctcctgctctgacctgtacatgcaggtcttctttagggagcaccaccggttcagctccttatcgtcagcagcgaggatctcctcagtgctgaggccaaagtcacagggcaccactgtgcggtacttgaagcgacagggcaggtcgtcgatgatgtcctcgtagtccagccggtaatactcatccaggtactcctcgaacgtcttgtccccgggttcaaacacgggcttctcctgccccacggccgcggcgaagggcgacttgcgcttcttcttgcccgtcaagggggcctcgcgctttttcttcctcggctggctggggtcgtagtcggcgtccatgttgaagttggggtcctcacagtgcagctcctgctggctccagtctccctcctgctcaggcccgtcccacgtgtcccagttccagtcgtcttcaagccct

SEQ ID NO: 13680 - DNA, 528 bp, Homo Sapiens
ccacgcgtccggttaactcatgaaaaataaatgcttttgttttatctatatgttgagtatcctttgcttgcatatggtttgtctaccagtagtataagttggttatgtttagactgaagtagatcacgatgtggttcttggactagttcatagaaacctgatcttataactgtattaccttaatatctgcaatgaaaaacacttgagaacaaactatacgtgttgttagcattgctgaccctcagctccatgttaaagaaatcctatttcatggattcaaaaattaaataaacttgagggactaaggtatgcaatgctgttcagtaggggagaaataaaatgtcaaaaaacataaattgagcagctgcaaagtatattattacacacagtgctagaaatgaatgaagtggcttgatccttacctttcatgagcctataatcggaaggggaacctgagaagtaaagcaacagttatgcaacagggttatttatggtatgatcaatttcacttatcgcctgccttgttac

SEQ ID NO: 13681 - DNA, 891 bp, Homo Sapiens
tctatcatgccgcaacaatgtggggcactttcatcagcgccctcccgtctactccatcatcggcccataccagagccagctgcgctctcccgtgcgcctagctgaccacccctctgagcggagctttgagctacctccctacacgccgtcccccatcctcagccctgtgcgggaaggctctggcctctacttcaatgccatcatatcaaccagcaccatccctgcccctcctcccatcacgcctaagagtgcccatcgcacgctgctccggactaacagtgctgaagtaaccccgcctgtcctctctgtgatgggggaggccaccccagtgagcatcgagccacggatcaacgtgggctcccggttccaggcagaaatccccttgatgagggaccgtgccctggcagctgcagatccccacaaggctgacttggtgtggcagccatgggaggacctagagagcagccgggagaagcagaggcaagtggaagacctgctgacagccgcctgctccagcattttccctggtgctggcaccaaccaggagctggccctgcactgtctgcacgaatccagaggagacatcctggaaacgctgaataagctgctgctgaagaagcccctgcggccccacaaccatccgctggcaacttatcactacacaggctctgaccagtggaagatggccgcagaggaagctgttcaacaaaggcattgccatctacaagaaggatttcttcctggtgcagaagctgatccagaccaagaccgtggcccagtgcgtggagttctactacacctacaagaagcaggtgaaaatcggccgcaatgggactctaacctttggggatgtggatacgagcgatgagaagtcggcccaggaagaggttg

SEQ ID NO: 13682 - DNA, 593 bp, Homo Sapiens
ctagatctccacatttggatgattgttcaaagactgatcacagagctaaaagtgatgtttctaaagatgtacatcatagcacttcactgccaaatctggaaaaggaaggaaaaccacattctgataaaaggagtacttcacatttacctacatctgttgagaaacactgcactaatggtgtttggtcacgttctcattatcaggttggcgagggtagctcaaatgaggatagtagaagaggaagaaaagatattagacatagccagtttaacagaggaactgaaagagtacgaaaagacttaagtactggctgtggtgatggtgaaccaaggatattggaggctagtcaaaggctacaaggacatcctgagaaatatggtaaaggtgaaccaaagactgaaagcaaaagttcgaagtttaaacagtaactcaagattctgactataaaggtgaacgcattaactcttcttgggagaaagagacccctggagaaaggtcacacagtcgagtagactctcaaagtgacaaaaaaactagaaagacaaagtgaaagatcacaaaatataaataggaaagaagttaaatcacaagac

SEQ ID NO: 13683 - DNA, 537 bp, Homo Sapiens
gatgacgagactgtgtacgcgcacggtgtaaagtgcggcactggtcgttgctcccccagctgtggacctcgctgtcctcagtcagagccaggcagtgggtggagcctgcagccacatcaatcaccttcttccccttgcaagccttctaagagttttggataacgaacatgttcctctgttccatgtccaagtctctggttgtcaccttctccccatgaataaactgggccatctctcgtcaaagcaatggaaaactgacttccacagcggacttggaccacatccaagtcttgaagcttttcaatcagctttggggttttgcagccatcactaccacctctgcccaatttccgcatagtcaccatctcacccaagaccacacttgcccgttctctagtgacagcctagggtttgagcatccccactcccacacgccacatcgatgaccttcagtcctttaagcccggctaccagatcggaatgcctcgtcctcactggagccatggccagacgccgtagttccgccgtcccaaagca

SEQ ID NO: 13684 - DNA, 731 bp, Homo Sapiens
atgggaaggacaaactgtgagcgctatgggccttggtatggagaagaccccataacgttggcaccatttaaaatttctggtgagagatgaacaagcaagaacagactacttcatcaggacactcttactggaatttcaaaatgaatctcgtaggctgtatcagtttcattatgtgaacgggccagaccatgatgttccttcatcattggattctattctggacatgataagcttaatgaggacatatcaagaacatgaagatgttcctattggtattcatggcagtgcaggcggtggaagaacaggtgccatttgtgccatagataatacgtggaatttactaaaagcggggaaaataccagaggaatttaacggtatttaatttaatacaagaaatgagaacacaaaggcattctgcagtacaaacaaaggagcaatatgaacttgttcatagagctatggcccaactgtttgaaaaacagctacaactatatgaaattcatggagctcagaaaattgctgatggagtgaatgaaattaacactgaaaacactgatcagctccatagagcctgaaaaacaagattctcctcctccaaaaccaccaaggacccgcagttgccttgttgaaggggatgctaaagaagaaatactgcagccaccggaacctcatccagtgccacccatcttgacaccttctcccccttcagcttttccaacagtcactactgt

SEQ ID NO: 13685 - DNA, 605 bp, Homo Sapiens
tttgacataagaaaaataatcagtttaataattacaacagtgtagcatcaacattgtagtagtcaacactaggacattgtctgtgacatttaaattaggagtttctccacacttgtcaacaggcgccctgggtgtcccagagaagtgaagaaatgattggcattaaggagtccacacaaccagggcaggcattcaaggtcccagacgcccagtgcatgtggacaagcacagacgccactgagtgtgaaggaacgagcttctgatgctacattccaacatcgctgaaaactgaaagtgcttcacatctacaggataagaaatggcttcatctcctcatccatacaaggtgagagcaaaggagtaaccctcgggcaaatcgtggcccctttaaacgtttatatcaagttcccacccccttgggaggtcacacggtgaaacagacacagttatatacaacagggcaggtttttaaaaagagttgctctcagacgcatttttcctgctccctaaaaagccgaggaagatactggatccacagaaagaaaaggcaatgccgtaacatgaggccctcatggccgcaccgtccaggggaagggctgttaaaa

SEQ ID NO: 13686 - DNA, 652 bp, Homo Sapiens
  misc_feature (544)..(561): n is a, c, g, or t
ccacgcgtccgcggacgcgtgggcggacgcgtgggtttttcctaccgtttcatagtctttgtctaactgctagtaaccctaccgagttttatatatgagtgggatactcaatctggccttaaaaagatacacaaagatgggctgtgggtccctggaaagggggagagttgccctttacagaatcactcgagccctttccagcactgttggtctgatgaacaaggttgttttaccttattttctcttggaacatatctgaaaaccttccccacaaataacttgtcacaccttttgtttcattctgagtctttagttttagtcatgggctttcttcacctgctctaggtgcaaaggcatgttgggaaagagatggatgttggggaggaagagaggagatggatttcagttgggagttaggaggagagtaggtgagatgatcagacaccggagttcaacgtcccagcagtcttggtaaaaggagggagcctactgagccaggagggagaaaagaagattgaccagcttgctagaaaaatacttagcnnnnnnnnnnnnnnnnnngtggaggggggacggagaggaacaaggatggggaggtaggaatgaggtatagaaaagagatagcatcttctttggcacaagactagtggct

SEQ ID NO: 13687 - DNA, 719 bp, Homo Sapiens
ccacgcgtccgcccacgcgtccgcccacgcgtccggattaatagcacatttcttcacaaaattagataaagttggtcaaagaccagatattctggaatggaaattgtaaagcttaatcaaaaagaatagccagtacagcatacaatctcagaaacttagaagcaagtagaaaataattggttgatgtaaacgaaagtgccattttagtaaaggcaggaaaaaaatagcaatatttgagttatgtaaggataaaaaatccactgacttgtatttttgcacaagaggctggtctgaatatgattgttcacattaagagtgtttattcgtcggttcattttggggattttcccccttgatgttttgacagattgaagtgagctttagtgagcaaaaggatcagaatgcagggaacactaagctgtgatgaagaaagtgtggtaaaaagccagagtagttttatacagacaaaaccagtgtcaggcctttgcagtaggcttgagtgaacttctgatctagatttgaaagtaaattttatgaagacattgcccatttttacttcctcattcattattgtaccagcatcatagctttattactctaatcccaggtaagtcaagcctacaatgccctagaggaagagtaaaaccagaaattcatgctggcttaaataatctatttttgtttcttttcatttgaatatttaaattttatggtttatt

SEQ ID NO: 13688 - DNA, 837 bp, Homo Sapiens
  misc_feature (140)..(207): n is a, c, g, or t
  misc_feature (210)..(243): n is a, c, g, or t
  misc_feature (722)..(781): n is a, c, g, or t
aagaagtcctcacttggggtcattgacaggctcttggaaattgtgactttcagctaaatgatgtacaacaaaaccaatttataactcatcattgttataataaaacaattttgaacaagatgatgttatttgaggacctnnnnnnnnnnnnnnnnnnnnnnnnnnnnnnnnnnnnnnnnnnnnnnnnnnnnnnnnnnnnnnnnnnnncannnnnnnnnnnnnnnnnnnnnnnnnnnnnnnnnncttaccaaatgcctcatattaacatgaatagttttagaagagaaaaaaatgaagatatactgtgcttgggcagtgatggaatgcagtgctcacagaattgcgtacttcctaggatggcaagggaaggtcattcttgttattgataaacctgagtggtgggggcagctatgcggggaaaagggaataagtccaaagtccaggccaatgggatattatcaaatactatctaattagagactctcatattggagtagatcagaagtcacaaattcaaatacgagggctgagtatgtaacatgaatgagcaatgggcttgtcttctctttttctttttggaacactgagattattatgtgaagaagcctgggcaagcctactggaggatgagagattgcatggaacagaggcaaattctccagctgagacttagaccaaacagcctgctcacacaaggcataagagtgaggccatcatgatcnnnnnnnnnnnnnnnnnnnnnnnnnnnnnnnnnnnnnnnnnnnnnnnnnnnnnnnnnnnncttgtgtttagaagtttgagtccagcctggacaatggtgtgataccttgtctcttt

SEQ ID NO: 13689 - DNA, 1066 bp, Homo Sapiens
  misc_feature (666)..(902): n is a, c, g, or t
  misc_feature (925)..(942): n is a, c, g, or t
aaaagtcttcaacacattcatttgtatacaagcaaaaaataagcatcagtctcaaaaagtcaaaaaactacagaaaacaaaataataagcctaaattgagaaattaacatattttaaaacaaaatcacaatagataagccaataaaaacactagttttctgaacagaaaatgtatacccttaacaagtctagtcaagtaaaaagtggtagaattaagagaaggtaaatttcctataacttagaaatggcaaagttaatagaaaagaaattgctattagaattttctgctaacaacagatgtttaaatttgaacaaaataaaaatatttcttaaaaagtatacattacctaaatttactaaataaacataaaaggaagaatatattttaaaaacaatttttttaatttaaagttgcttaaatttaaaaataggtaacataatagtcacaaaagaaactgacagttataaagaaattatttccagaaagcactgtgaactcaaaagttctgtaagtacagactttcaacctttcatgaacaaatcattcccatgttataactgcttaatgcacagaaaaagatatacagttatcctatttactttagagagctagcaaaatcccaatatcaaaatacaataaccaggctgggcatggtggctcacacnnnnnnnnnnnnnnnnnnnnnnnnnnnnnnnnnnnnnnnnnnnnnnnnnnnnnnnnnnnnnnnnnnnnnnnnnnnnnnnnnnnnnnnnnnnnnnnnnnnnnnnnnnnnnnnnnnnnnnnnnnnnnnnnnnnnnnnnnnnnnnnnnnnnnnnnnnnnnnnnnnnnnnnnnnnnnnnnnnnnnnnnnnnnnnnnnnnnnnnnnnnnnnnnnnnnnnnnnnnnnnnnnnnnnnnnnnnnntgagagagcaagactccatctcnnnnnnnnnnnnnnnnnngtacaatagcccaaaagaccaatctcactaatgtaaaaatgtaaatttcctaaataaaagattagtaaatcaaattcaaatgcatttctagggaggatgcatggttggccaaccggacgcgtgg

SEQ ID NO: 13690 - DNA, 456 bp, Homo Sapiens
aaacttgaactgagaccttgatgagtctttattttaggaagcatattattagcttttgattttaagaggaatttactccttgctttccctgttttggggaaaatgaggagagctgcctccaaatcagggaattatattgacacaggtagacatagggaatggaactgaatgaacccaaggtgttacattttgtttcactacacatgagggagaagaataagccctgctatagtgttggccagagcactgcgactgacgccacaggctgggttaccagttaaagtctcagtgtgactacttggacacctatttttgtttagacacactattcaaagggctgcatgggaaccagaagcttggcctcttctgataaatgcctggtacctgctatgtaaaagagctggaggtttctgttctttttgaactgacagaggaaagaggaagacaaggctggtg

SEQ ID NO: 13691 - DNA, 297 bp, Homo Sapiens
ccatggtcacaaatatttggctcagaataaatcccttcaaatattttagagtgtgactcttcgtcaacaccctcttcaaacaaacctagggatggtctttctgcctggatgcctcagctgcgaccagaaagtccacaaaggagcagtgaagcagggcttggtgcagaggccatgcggaaggcacggatttttggagactggagaacccaagcgcaaatccctaccccactgctcaccagcaggttcttaagcaaatcactctgcttcgctgaatttactgtcctcagctataaaatg

SEQ ID NO: 13692 - DNA, 657 bp, Homo Sapiens
gcggccgccggcaccccgcgcgggttcggcgtccagcaacggtggggcgagggcctcgttcttcctttgtcgcccattgctgctccagaggacgaagccgcaggcggccaccacgagcgtcaggattagcaccttccgtttgtagatgcggaacctcatggtctccagggccgggagcgcaggcgggcgggcgcggaaaggagcagctgcttctgcacggaaggggcgggcgggcggcggccgtcgccttggcctgtcacggtcggaactggcccccgcggctgccctcgctaactcatcccgggccccgggggtcctggggcccgagacctctcatttaccccgcgccgcctgcgctccacacatcctcgcctggcagctacagctcgagcatcggcgccgccgctaggagccgcggctcggcttcgtctccgtcctctccattcagcaccacgggtcccggaaaaagctcagccgcggtcccaaccgcaccctagcttcgttacctgcgcctccagcggccctgcgtcctctgcgctctcatccttacaggggccctagacggccagaactgagcgacgcggcctcgcctcactccggcggggaccgttatgacaacccgcaactgccccgcggcacaccgcggccctccggccc

SEQ ID NO: 13693 - DNA, 813 bp, Homo Sapiens
gtactgcttgatgacacctcggatgtcccggccgcgctcactgatgtcccggcgcagccgccgtaccaggcggatgtcggagtctgtgtccacaaagatcttcatgtccaggagctccaacagtgtcttgtcagcaaaggccatgatgccctcaaagatgatgacgtttgcaccatacagtgttttccagtccttcttccggctgtgcgtggtgaagtcataaatgggcaccttgacactcttcccctgcttcagcttcttgagggtggaaatgatgaggtcgaagtcaaaggcatctgggtggtcgaagttgaagttgttgtgtgcggcctgttcctgctgctgctcagtcagcaccttgtagaaggagtccatggacagcaagaccacccagggcacatccagggcctcgatgatcattctggccacagtggtcttcccagaggcactgccgcctcccaagccgatggcgaaggcctctttggattgcgtgccgtgttcattgtaccagggcggccgcccggcggtgtagatggtacgcttgcttgtacgcagcaggggaggctctgacttgcactggctggtggtccgcttccggggagagcgcccagtgcccacaggtggcaggagcctgtccagggactctgcattgctgcggtcctcgcacgcggtctcgcttttctcagcctgccggcctggtgtgtctcgggccgtaggtggcgacgtgggcgaaggatcagcgtccgcgcgggccgggggcgcagccatggcgctcctcgtgccgattaaccacccggcctcgtacctagccta

SEQ ID NO: 13694 - DNA, 534 bp, Homo Sapiens
agttagctgtgtaaaaacagccaagcctatgtactttaatcaaaatcagtgcagtctcagtgtggtctttactgccatgagaaatcgccagcagtgcttacaaaacaccacggatttcttggccccacccaggcccactgaatcatctctaggggtgaggtcagtatcttatttttaagcagctttgaaaagcgacaggctggttctaataaaccagcttcttcaatctgcaggattttgatagaaaactccctcctagtgtatggaatctaactggaaactcaagttccagttgatcagaatttgactgacatgtcaccctatttttcagtaggaaaatgcttgtggtttcttcccttcctccaggtatcatgttctcttattccaccaccacttccctatcctgtagctggtagtttgtttacccttgaaaattgtaacctgattagcccaggtgggaagaagagacttccaggtaaacgctgaatatgctcaccttggaaaagctttgctccagtcttaaccttcccatga

SEQ ID NO: 13695 - DNA, 920 bp, Homo Sapiens
  misc_feature (805)..(805): n is a, c, g, or t
ggggggaaattccccagcgccgttgttccttgccccaggattttccctatgggaaacccagttatgggcccctgtttcccttttccctttctgtggccccgcggcccccaaaccgaattgtctaggaaaagctttttcaagggccggaggcggcccgaacaggaattccacgggggtgcttgggggaagcgaaccggttctttttctattttaagggctgagggggtttctatttagtctacaagtgtcagtctgagcaacgtgagaagtcccctcctgaagatttccttttgcacggctggctcaacactgcgggtagctcggcattaacaaaagcgaaaacggtggtcagaccttcacagggtcccaccctcacgacgacactggtctacgtactccagacaggcctcagttcttcttgctgtccttctgaggctcactttttgtggtccctaggttgttccacacctctgtgtacattaaggtcccaatgaagacaaacaaggtgcccagccagtgccacagggtgaaggggttcagacttattgaatagaactgcatggtcataaatatcagaagccaagaagacgaaacccggaagtggaagggcgtgattataaaacaaagcctccttggagtgtttcccaaatcgtttgtagagagtctctttgaatatccgcatccttgctgacatcagaagagcaaaagtcaatgccccaatacctagtaaccaccacacaaatgcctggaatgcatcattctcactcaagctggacatggaagtcacctgctgtgctgacataanagtgcaaataaatattctcacatacacccagggcaatggaggtatatgtgaatatactgtatcttttctttaaattgataatttcgtagatcatgttggcaattagagaaccggg

SEQ ID NO: 13696 - DNA, 1396 bp, Homo Sapiens
  misc_feature (591)..(604): n is a, c, g, or t
  misc_feature (1104)..(1265): n is a, c, g, or t
  misc_feature (1310)..(1321): n is a, c, g, or t
gcccggcgcgcccgccgcccggggggatgtcttacaaaccgaacttggccgcgcacatgcccgccgccgccctcaacgccgctgggagtgtccactcgccttccaccagcatggcaacgtcttcacagtaccgccagctgctcagtgactacgggccaccgtccctaggctacacccagggaactgggaacagccaggtgccccaaagcaaatacgcggagctgctggccatcattgaagagctggggaaggagatcagacccacgtacgcagggagcaagagtgccatggagaggctgaagcgcggcatcattcacgctagaggactggttcgggagtgcttggcagaaacggaacggaatgccagatcctagctgccttgttggttttgaaggatttccatctttttacaagatgagaagttacagttcatctcccctgttcagatgaaacccttgttttcaaaatggttacagtttcgtttttcctcccatggttcacttggctctgaacctacagtctcaaagattgagaaaagattttgcagttaattaggatttgcattttaagtagttaggaactgcccaggcnnnnnnnnnnnnnnaagcattgatttaaaagatgcacggaaagttatcttacagcaaactgtagtttgcctccaagacaccattgtctccctttaatcttctcttttgtatacatttgttacccatggtgttctttgttccttttcataagctaataccactgtagggattttgttttgaacgcatattgacagcacgctttacttagtagccggttcccatttgccatacaatgtaggttctgcttaatgtaacttcttttttgcttaagcatttgcatgactattagtgcttcaaagtcaatttttaaaaatgcacaagttataaatacagaagaaagagcaacccaccaaacctaacaaggacccccgaacactttcatactaagactgtaagtagatctcagttctgcgtttattgtaagttgataaaaacatctggaagaaaatgactaaaactgtttgcatctttgtatgtatttattacttgatgtaataaagcttattttcattannnnnnnnnnnnnnnnnnnnnnnnnnnnnnnnnnnnnnnnnnnnnnnnnnnnnnnnnnnnnnnnnnnnnnnnnnnnnnnnnnnnnnnnnnnnnnnnnnnnnnnnnnnnnnnnnnnnnnnnnnnnnnnnnnnnnnnnnnnnnnnnnnnnnnnnnnnnnnnnnntggggggcccccccccccccaaaaaatttttaaaaaacttttgtnnnnnnnnnnnncccaaagggaaaggaaagggggcaaaagtgtttcccgagaaaaaccggggaaaaaaaggggggtggtttcccccc

SEQ ID NO: 13697 - DNA, 510 bp, Homo Sapiens
tactgatagaaatgtgagattaaaaatagggtcctccctgctgctccaaacaaatgcctaaacacagtatgtatctcagtcctctgttcccagagattcccaccctagcccaagaaaaaaactggcctgtgtaaagcaaaacccaagtcatccccctccagaaatttctctggcagccaagcctgaccctaagggttccactttgctttaaaagctaggagtggcctctagagccaggaacacattaatacaacagttcaacctcagcaccaagtcaggtacgaagcgcttgatacgtggaatttttctctatatcaagtttaaatttctggaaatagactttggttgctaatgacaattacagttataccatagtctgtaatttgagaaaaggtgaaatgtatttaatatatatttagttttaataaaaagataaaattattacagaaataattgagagagagaaaatctattataatttatttgaaaaataaaacatttaatccagta

SEQ ID NO: 13698 - DNA, 671 bp, Homo Sapiens
cacgtcgatgcagccgccttgactggaaagggtctgaatccaccctggccattgcttggtggagactgagatacccgtgctccgctcgcctccttggttgaagatttctccttccctcacgtgatttgagccccgtttttattttctgtgagccacgtcctcatcgagcggggtcaatctggcaaaaggagtgatgcgcttcgcctggaccgtgctcctgctcgggcctttgcagctctgcgcgctagtgcactgcgcccctcccgccgccggccaacagcagcccccgcgcgagccgccggcggctccgggcgcctggcgccagcagatccaatgggagaacaacgggcaggtgttcagcttgctgagcctgggctcacagtaccagcctcagcgccgccgggacccgggcgccgccgtccctggtgcagccaacgcctccgcccagcagccccgcactccgatcctgctgatccgcgacaaccgcaccgccgcggcgcgaacgcggacggccggctcatctggagtcaccgctggccgccccaggcccaccgcccgtcactggttccaagctggctactcgacatctagagcccgcgaagctggcgcctcgcgcgcggagaaccagacagcgccgggagaagttcctgcgctcagtaacctgcggccgc

SEQ ID NO: 13699 - DNA, 493 bp, Homo Sapiens
ggtggttctggtggagcacgagggagcccgggtggtgccctgagcctcgagctgctctctgtcactgtcttgaatcagactcagaaatggcttcttcccagccctgcctacaagtttttctctggggtcctctttcaaggatgtccacggtacctccctcctgaaacttgaggaagtcttttgtcttccagctgctcagggttctctggtccaagaccctgctttaaagagagtctttggcgtgctcagactccagcgctccgttcttcaaggaggttgacttgcctctcgggccccgtaggtaccaagagactgtttacctcccagaatgtttgggcttgaagttacattaaagtgaagttatttgaaagaaagaaaacctcatcatttctaaggatgacttaattactgtgccttttcctttctttttacacatcctactgtcccttagggtaaaattttcagcattaaataaaacatttcaaatatattg

SEQ ID NO: 13700 - DNA, 1217 bp, Homo Sapiens
  misc_feature (956)..(1141): n is a, c, g, or t
tcggtaacctctgccaaagtggctgtgaatggcgttcagctgcattaccagcagactggagagggagatcacgcagtcctgctacttcctgggatgttaggaagtggagagactgattttggacctcagctcaagaacctcaataagaagctcttcacggtggtcgcctgggatcctcgaggctatggacattccaggcccccagatcgcgatttcccagcagacttttttgaaagggatgcaaaagatgctgttgatttgatgaaggcgctgaagtttaagaagctttctctgctggggtggagtgatgggggcataaccgcactcattgctgctgcaaaatatccatcttacatccacaagatggtgatctggggcgccaacgcctacgtcactgacgaagacagcatgatatatgagggcatccgagatgtttccaaatggagtgagagaacaagaaagcctctagaagccctctatgggtatgactactttgccagaacctgtgaaaagtgggtggatggcataagacagtttaaacatctcccagatggtaacatctgccggcacctgctgccccgggtccagtgccccgccttgattgtgcacggtgagaaggatcctctggtcccacggtttcatgccgacttcattcataagcacgtgaaaggctcacggctgcatttgatgccagaaggcaaacacaacctgcatttgcgttttgcagatgaattcaacaagttagcagaagacttcctacaatgagaatgcacactccagtcttggtggttccttcgtgtggggcttgatcgtgttgctgcctgttaacatgatgcctttgaaactctccgcctttgaaactttctacccctcccttcaatcttatcctaaccaaatgagaataatgacatattgaaaacagcctctagcttcaggctgggcacggtggctcacannnnnnnnnnnnnnnnnnnnnnnnnnnnnnnnnnnnnnnnnnnnnnnnnnnnnnnnnnnnnnnnnnnnnnnnnnnnnnnnnnnnnnnnnnnnnnnnnnnnnnnnnnnnnnnnnnnnnnnnnnnnnnnnnnnnnnnnnnnnnnnnnnnnnnnnnnnnnnnnnnnnnnnnnnnnnnnnnnnnnnnnnnagcccaattcaaagctgcagtgagctgtaattgatcactgcactccaacctgggcaacagagtaagaccttgtctt

SEQ ID NO: 13701 - DNA, 1893 bp, Homo Sapiens
  misc_feature (1726)..(1734): n is a, c, g, or t
  misc_feature (1831)..(1839): n is a, c, g, or t
cgcgccggagctgggttgctcctgctcccgtctccaagtcctggtacctccttcaagctgggagagggctctagtccctggttctgaacactctggggttctcgggtgcaggccgccatgagcaaacggaaggcgccgcaggagactctcaacgggggaatcaccgacatgctcacagaactcgcaaactttgagaagaacgtgagccaagctatccacaagtacaatgcttacagaaaagcagcatctgttatagcaaaatacccacacaaaataaagagtggagctgaagctaagaaattgcctggagtaggaacaaaaattgctgaaaagattgatgagtttttagcaactggaaaattacgtaaactggaaaagattcggcaggatgatacgagttcatccatcaatttcctgactcgagttagtggcattggtccatctgctgcaaggaagtttgtagatgaaggaattaaaaaactagaagatctcagaaaaaatgaagataaattgaaccatcatcagcgaattgggctgaaatatttggggactttgaaaaaagaattcctcgtgaagagatgttacaaatgcaagatattgtactaaatgaagttaaaaaagtggattctgaatacattgctacagtctgtggcagtttcagaagaggtgcagagtccagtggtgacatggatgttctcctgacccatcccagcttcacttcagaatcaaccaaaacagccaaaactgttacatcaggttgtggagcagttacaaaaggttcatttgaccacagataccctgtcaaagggtgagaccaaagttcatgggtgtttgccagcttcccagtaaaaatgatgaaaaagaatatccacacagaagaattgatatcaggttgatacccaaagatcagtattactgtggtgttctctatttcactgggagtgatattttcaataagaatatgagggctcatgccctagaaaagggtttcacaatcaatgagtacaccatccgtcccttgggagtcactggagttgcaggagaacccctgccagtggatagtgaaaaagacatctttgattacatccagtggaaataccgggaacccaaggaccggagcgaatgaggcctgtatcctccctggcagacacaacccaataggagtcttaatttatttcttaacctttgctatgtaagggtctttggtgtttttaaatgattgtttcttcttcatgcttttgcttgcaatgtagtcaataaaacctcatgtactattaaaccaaccgcactacagcaatgggcgaataaacattgcggccgccctcgggccctcgagaaactttctaaaaccatttcgttttggcccccccggggcccctgttagggtaaaggggaaacatggggcccataagcctgtgtttccctaacgaaaaactccctggggcccttggaactaagcggctcttgggaatctctcccgcccgacattaagaataaagcccccccgcggcccgcgccaaacccgagagtgggatcttccttgagaacaaaaaatcccccaaaaatgggaaggtttctcttgagagggtcctatttacttgggggggtgccaattacaaaccggggcaaattccccccgggggggaagcgcttcccataatttctaaagatttaaggggcacccacgggcgcgctggggggagcttacatatgggacggatacccnnnnnnnnnaaaagttccaatttaaaagcaatttctgtcgcccccaccattgaaaacacccgcaccacaacaaaacgggcccttgcatgggaaccccctgaaaatnnnnnnnnnggggggttcattcacccacaccccatgggggggccgcttgtggcagtgaaaaaa

SEQ ID NO: 13702 - DNA, 974 bp, Homo Sapiens
  misc_feature (473)..(473): n is a, c, g, or t
aattgtaaagtattggcaccaaattaaaaatccccggtatataatgaaaatcctggtgaaaaatgttcagatgcctaaatattttggattaaggaaaggtaaaaccaaggatttggttcaggtacaaaacaaaggcatccttatcagtcactagcagtacttttttgcaaaatcaacagctttttatttatcagtgacattatctccccctccaaaaaccctccccaaatatcaaacaattatataccaaaataattttaatttcaaataaaaggattttcaataaatatataagcattcccatcctccatatacaaaatttcttaaaaccattcaaaacggaggctagatagaaattttcataactgtgcttaccaaccccacaactggcccttaaaggtggtgccttttcaggcaatgtcaactggccagttctgttggtgagccccctacccccaccccacccatcccangtactgttgaatgctcatgttaatgatttgccaggtgtgtgcataaagttgtaaaatggggacacttctggaacaccaacaacaaactcaacaatatggatgatcatggcattgatttgaaaggcagcatttccaaattgatattttccagagaggaacatagcaggtagaaaattccaatggttaaaagctgaaaagaagtcccacatggaagcagtaagaggtcaaaactgagtatcactagagtttctgggtgggagcttttttatttttaagaatggcaagttatgtttagctgagtaacagtggcaaggagaggtcaatgctgacattcctgaaagtcaacttctttacatgatgactacttaggctgctattttaggatacttaaagatctctaagacttggattagacttaacttgaataccttattctgtgaccaaattacatgaaaagaagatacatagttattatttccattccccctgctgcaaatgctg

SEQ ID NO: 13703 - DNA, 624 bp, Homo Sapiens
tcaaatatacctctttgaaagataaatttctgctcaaagggacaatattcttgctggatgcgtttctgtaaatgcttcacagtttgaagacaaaggaatgcaacttcccaaaatgtgcccgaggtggaagtacttcctggctagtcggtgtaaacgttgcaaaaccagtctgtgggtctaagagctaatgcgggcatggctgttgggatggaggacctgctgtggcttggtcctgggtatcgaaagagtctggatttttagggctcatactatcctccgtggtcatgctccaataaattcactgctttgtggcgcgacccttaggtattctgcattttcagctgtggagcccttaaagatgccatttggcttggcttccttgggaaagaagtcctgctggtagtcagggttgtccaggctaatttggtggctgcctttctgggcccagtggcgagggctgtcgaatgtgctgttgacacaggtgggctggacagtgttgagatactcggggttgcccactgcagtgctgtgggggtcctggtagtgtgggtctctgctgggcgcggggttcagaggctgattgtgatagacaggattctgcacagagccagcggccttttggga

SEQ ID NO: 13704 - DNA, 943 bp, Homo Sapiens
tcctgcctcatcatcatgtgtgaaccaatccagcacccatcccacatggacatccccctggatagcaagaccttcctgagccgccacagcatggacatgaagttcacctactgtgatgacagaatcacagaactgattggttaccaccctgaggagctgcttggccgctcagcctatgaattctaccatgcgctagactccgagaacatgaccaagagtcaccagagacttgtgcaccaagggtcaggtagtaagtggccagtaccggatgctcgcaaagcatgggggctacgtgtggctggagacccaggggacggtcatctacaaccctcgcaacctgcagccccagtgcatcatgtgtgtcaactacgtcctgagtgagattgagaagaatgacgtggtgttctacatggaccagactgaatccctgttcaagccccacctgatggccatgaacagcatctttgatagcagtggcaagggggctgtgtctgaaaagagtaacttcctattcaccaagctaaaggaggagcccgaggagctggcccagctggctcccaccccaggagacgccatcatctctctggatttcgggaatcagaacttcgaggagtcctcagcctatggcaaggccatcctgcccccgagccagccatgggccacggagttgaggagccacagcacccagagcgaggctgggagcctgcctgccttcaccgtgccccaggcagctgccccgggcagcaccacccccagtgccaccagcagcagcagcagctgctccacgcccaatagccctgaagactattacacatctttggataacgacctgaagattgaagtgattgagaagctcttcgccatggacacagaggccaaggaccaatgcagtacccagacggatttcaatgagctggacttggagacactggcgagctaggac

SEQ ID NO: 13705 - DNA, 655 bp, Homo Sapiens
ccacgcgtccgcccacgcgtccgtccacccttcatggggccagagccctctctccagaatctgagcagcaatgccgtttgctgaagacaagacctataagtatatctgccgcaatttcagcaatttttgcaatgtggatgttgtagagattctgccttacctgccctgcctcacagcaagagaccaggatcgactgcgggccacctgcacactctcagggaaccgggacaccctctggcatctcttcaatacccttcagcggcggcccggctgggtggagtacttcattgcggcactgaggggctgtgagctagttgatctcgcggacgaagtggcctctgtctaccagagctaccagcctcggacctcggaccgtcccccagacccactggagccaccgtcacttcctgctgagaggccagggccccccacacctgctgcggcccacagcatcccctacaacagctgcagagagaaggagccaagttaccccatgcctgtccaggagacccaggcgccagagtccccaggagagaattcagagcaagccctgcagacgctcagccccagagccatcccaaggaatccagatggtggccccctggagtcctcctctgatctggcagccctcagccctctgacctccagcgggcat

SEQ ID NO: 13706 - DNA, 908 bp, Homo Sapiens
  misc_feature (55)..(65): n is a, c, g, or t
gtttacctgctgtatgtaagggaagattttaggtcttttctctcagtctggggcnnnnnnnnnnncactctaacaaattgtttttaaacacaggtaattgtaaaacttaaaaaaattttctattacggtacaaatgtaagatgttatttaatataaaaattttacagatgaatctgattatttataagatatattaatcatagtatatttaatgtcagtttcagatactgtatattaagatagaattgttttgatataattttattcctaaaaattctagtattgggcaaattatagcatataatgtattgtaaaaattctagaagatgcatttgacatattgttgacatacagatttggtaatcaaatgtattgttgccatatcatcactaaaaatctgtcttaacataagaatattgctgataattttatgtcgtgctcaaggtaaataattgatcaaatgtgaactacattttcacatttatcacatgatttttattttatcacatgataaaatgtgaactaaaggaatacatatcctttaataggaaagaagtttatttgtcacctatgccctagtttctcaatgttgtacaatcacaaagagaataagagagagaaatggagtagagttatcagaaatcagtaagagtgtgttagaattaaaggagtgcacttgggtactctactgatgaaacatctcttttccacaaagtcaagtcagaaatcactcagacttgagagacataaggaaagactggagcttaaatagaaaatccacttcactcaaatcctgattttacaattgttctgctgttaagagaggaatctgggcttccagatgtcagctgatggtgataatatttctcacctaaaatgaatcctcattcaccttttcggacgcgtgg

SEQ ID NO: 13707 - DNA, 543 bp, Homo Sapiens
gtggtaaggctgctggctcaccttcgtcatctgatcaagatgaaaagctccctggccaggatgaaagcacagctggaacatcagagcaaaatgatatcctcaaagtggtggaaaagaggatagcttgtggtcctccacaggctaaactgaatggacagcaggctgctctcgcttcccagtatagagctatgatgcctccttatatgttccaacagtatccgaggatgacatatcctcctctacatggtcccatgagattcccaccttctttatctgaaacaaacaaaggccttcgaggaagaggcccacctccttcatgggcctctgagcctgaacgcccatccattcttagtgcatcagaactgaaggagcttgataaatttgataacctagatgctgaagctgatgaaggttgggcaggtgctcagatggaagtagattatacagagcaactgaatttcagtgatgatgatgaacaaggaagtaacagtcctaaagagaataacagtgaggatcaaggttcaaaagcctctgaaaacaacg

SEQ ID NO: 13708 - DNA, 835 bp, Homo Sapiens
ccacgcgtccgatggaaatgcacaacaaattggccagtatatgcctaatggttggcaagttcctgcatatggaatgtatggccaggcatggaaccagcaaggatttaatcagacacagtcttctgcaccatggatgggaccaaattatggagtgcaaccgcctcaagggcaaaatggcagcatgttgcccaatcagccttctgggtatcgagtggcagggtatgaaacccagtgaataaggactccagaatctaaagccagtggcttgaggctacagggagtgtagtaaagccgttgtttacttaaagatttatcaaatcagtcagtgcaaatgtcagatacaatgtatttatttaaaagattcatttttaatcatgaaattacttatcatccacattgttttaaaaagaaacaagatgctggatgtctgccaatttttgccttcattaccttttttgataaagtttctcagatccttgtttcaaacacaaatgcagggattgctgccactttttaactattaagaggcagaaaattgcacaatattgaacttttttccactgaagtagtgtgcagttctagtttgcattcctgatatgatttaaaacatgtaatataaagatgttaaaaaataaaccaaaactgtgcagagtctagaagttgtttgtcatcttcagcttgtgcacaattctgttttaggttaaaaaaaggcattgttcgagctgtcccatctccactgttatccctttggggtttttttaatataaattattagtttacatcattttgtatctacatcttttttcacaaattgtctgccaaccatcgttcggac

SEQ ID NO: 13709 - DNA, 924 bp, Homo Sapiens
  misc_feature (586)..(586): n is a, c, g, or t
acactagaggatccccagtcacacagagatgagcacgtcaatcagtcagttagacgcccctgaacagagagttgcaagagagaagtcgaattttagagaattctaagtcacagacagacaaagattattaccagctgcaagctatattagaagctgaacgaagagacagaggtcatgattctgagatgattggagaccttcaagctcgaattacatctttacaagaggaggtgacgcatctcaaacataatctcgaaaaagtggaaggagaaagaaaagaggctcaagacatgcttaatcactcagaaaaggaaaagaataatttagagatagatttaaactacaaacttaaatcattacaacaacggttagaacaagaggtaaatgaacacaaagtaaccaaagctcgtttaactgacaaacatcaatctattgaagaggcaaagtctgtggcaatgtgtgagatggaaaaaaagctgaaagaagaaagagaagctcgagagaaggctgaaaatcgggttgttcagattgagaaacagtgttccatgctagacgttgatctgaagcaatctcagcagaaactagnacatttgactggaaataaagaaaggatggaggatgaagttaagaatctaaccctgcaactggagcaggaatcaaataagcggctgttgttacaaaatgaattgaagactcaagcatttgaggcagacaatttaaaaggtttagaaaagcagatgaaacaggaaataaatactttattggaagcaaagagattattagaatttgagttagctcagcttacgaaacagtatagaggaaatgaaggacagatgcgggagctacaagatcagcttgaagctgagcaatatttctcgacactttataaaacccaggtaaaggaacttaaagaagaaattgaag

SEQ ID NO: 13710 - DNA, 894 bp, Homo Sapiens
ccacgcgtccgcccacgcgtccgcttccctgtgatgtcttcatgccgttgtcttcttatgcaagaataaggtacgtctttccatccactcacgtctatttaatttgactttgcattacacagaaagctggtcttggtctgtctacctcggcatctagttgtcctcactgccccctagccgaccccaccccatctgactgactaccccatcacagagtacttttatttacgttttgctctgcctaatggttacttgatactgtcacgccgacagtgtccagttcagtggtctttgcagttgaaatgctcccgtacacactgtcttgttaaaaatgccagtaagttcatacaaacccagcttgcacccaaggtcacattcagagagcgtagggctgggatgggttgttttccaagcttctgccactgtgtggctagctcttcccactgggaagttctgtgtacccggaatgtcggagtggagtcctgttctagtgtccagcacctgaccctgtgcccaacccctcaacagcctattcctgctgtccacagcctgctggaactttttacaaaatatgttgccatgctggaccctgagcactggacataagccccctggcagcctttttcatgtcacccaaaggggtaattgtcctactggtggtctgtaagatgagttagggtgacttgctaatagacattgtaaatcttaatatttatgtatgtattttattattaccggttttccatttatgatggtaatattgtttcttctaagaatatttatttttccttctaaatattgagataaaattcatgcttttgaaatgttctattcagtggcttttagtatatttgctatgttgtgcaaccatcgtaccagccactcccgtaccag

SEQ ID NO: 13711 - DNA, 494 bp, Homo Sapiens
ggagaatggtgggcagggtatagccccgctgaatgacagcaacctcgaattgacttcagttgccaagagcattgggcacttcccccacaaggtgaaaagatcatcctgtgtccactgctctgtggcttggcatgcctcgatgctggcttctcagacaggccctgcacgggtggctcttcttgccaactttaccccattctctgaagggcactgggagatggaggggaagaggttggtgcttgaaaaagaaaagattgggaggccagatgtgcaccccaaaataggacttcccaggaaatgggtctcagtgagcatattaacatccagcatcttcatctactccatgctcacctaagacctctggggtcaggggaaggggctatggagtcagtgggaagtgggccagtagcagacaggagagttgcctggcataggcagtaggtgtgaatgcaagctgtgatatttcagcagagacctggaattcagtcataaac

SEQ ID NO: 13712 - DNA, 524 bp, Homo Sapiens
cagaatgtggttgttattaaggcattgacagggcttttctttgataagatcgccttgtcctgcattgttagcggctgtgttggcctttcagcggctcgggggagctccctctgatcaggcctgtatcttcccagaacgcttttgttgtggtttgcaaagggttttacctgaaacaaagtcagcctggcggggcattaaacacctccaggcaactcccaggcccttcagatctttctgtgggattgggcactgggcgattgaacctgttcagctgcaagaagacccaaaagtgggacggagccagagagaaacagcttctggccagggctctgccaagggatgagccaagacagacctggtggagacgccaggctcgggcctgctccaacattgtggacactatttgtcaaggcccttcagtaaaacaatcaatctgggatttaatatgttgactcaatccaatgagcatagatcactggtcaggataactctggccggatttgcagcaggaataaatggaggat

SEQ ID NO: 13713 - DNA, 563 bp, Homo Sapiens
cctgactgtgctgggggctgggtttacgttttctcagggaaccacaatgcacgaaagaggaactggggttgctaaccaggatgctgggaacaaaggcctcttgaagcccagccacagcccagctgagcatgaggcccagcccatagacggcacaggccacctggcccattccctgggcattccctgctttgcattgctgcttctcttcaccccatgaaggcttatgtcaccctaactatcctggaatgtgttgagagggattctgaatgatcaatatagcttggtgagacactgccgagatagatagccatgtctgccttgggcacgggagagggaagtgccagcatgcatgctgtttcttggccttttctgttagaatacttggtgctttccaacacactttcacatgtgttgtaacttgtgttgagccacccccttccctgaaaatccctgggaggttttattcctgccatctgacatccgaggcaatagtggttctcaaggtctgtgtcagtgccaaacaactgatcgctgccctccgttacctcaagaacagcaaccct

SEQ ID NO: 13714 - DNA, 514 bp, Homo Sapiens
agctgcctccctgggagcctaccctgcccagcctgagagtggaggctaccagcatcacgcttcccctagtgaaatccatctgtcctgaagggaaccctgggacggggtcaaggaaaccctgttcacccccaccacggggtcaggtcttcaccaaagggaggccgcacggattcccagtcgcaaacccaaagccttgctgcctttgcctctgcttccatagttgtttcaatgtcttttttaaaaatcacatacactcgagtaagactgagtctcctcaccgaagagatctggctgtatcccgagtctctgaaacctttgctccagtcccgtgggagcgtgccgtcccgaggatgtggagccgcaagggctcgccagagggatctcaggagctaggcctcaaggagcgctgttgagtgacaggtctgatgcagtagcttttactattggtggaaatcgatgttttttccttgaaagtctacctttctaagttcagtaaaccaaattagatcatgta

SEQ ID NO: 13715 - DNA, 156 bp, Homo Sapiens
ggagccagcgccgccctccagctgttgcgcgtcggaagccggaagcagggactgagcgacagactaggaaacgccggtttctccggggctccccagcgccccacctttaccccggaggccgccctcttccatttgctcttgggcgtcagggcggta

SEQ ID NO: 13716 - DNA, 472 bp, Homo Sapiens
cggatcagaggctgggggagccgacagtctgccttgcagtgaaggaggcatgtgatcaccatcaaagtcttctgctctgggaaggatcacacagtcgtccttcagcctgcctggggcgcagtgttttctttcctcagaccgaaactgcatgaagagagattccagcaaggaagatagagcatgccccgtacactcctctctggttttcttcctcaaaggaaatttatgcatgtaatccacaagccgaagaacccatgtttttctttggaaaaggctacgccctttcagggtttccttttctcggctgtgttgccttcccatcagaagctgtctcttgccctccccattatgggatgtgcgaaatgaaggaaaacagagacactgctgggcatttgtctccatgagttgatccaatcagaaatctttgacttttcacacatgtgtccaaaaatgagtgaaggctcctcacagg

SEQ ID NO: 13717 - DNA, 543 bp, Homo Sapiens
gcggccgctgatgtgcaggtcctgggaccactcctcgcccaccgtcaggtgcctctgggtggccaggcggatgatgagtctttctgggttttctgttgcgaggtcatcaggagaatctgtgtggagagcttcaataatcagagagaaggtgcccggccaggtgaagccgaaggggaagcggatggggttgctgaacgcggagtcggcgcccccgccgtcgggcagactgaaggagtcgacgcccagcacgggggtgacggcgctgccgtaggtgcagggcggctcgggggacacgctggcctggtagtgcttgaggcacacgcggaagaaggtccggcaggcgcacggcggtggccccgcgcccccgcggcagcagttgcggttccccagcagccccttcttgttgacgaactcctgcagcttcagttcgaacaccccagagctccagacctgacacagcaaggccgagagcaccgccagggccagcgcgcaccgactgaccatgctgcttcgctccacgcgcgagcctggggggcccccact

SEQ ID NO: 13718 - DNA, 1143 bp, Homo Sapiens
  misc_feature (495)..(503): n is a, c, g, or t
  misc_feature (561)..(610): n is a, c, g, or t
  misc_feature (746)..(771): n is a, c, g, or t
  misc_feature (916)..(930): n is a, c, g, or t
  misc_feature (963)..(972): n is a, c, g, or t
gggattgacctgggtcagagtatagatatgaaactttttccaaaaggaactatattcacagcaaagtgtgaaacatctggttttcagtgtgttgagatgctcagcaacaaaccatggaactaccagatcgattactttggggttgctgcaacagtatattgcatgctctttggcacttacatgaaagtgaaaaatgaaggaggagagtgcaagcctgaaggtctttttaaaaggcttcctcatttggatatgtggaatgaattttttcatgttatggtgaatattccagattgccatcatcttccatcttttggatttgttaaggcaaaagctgaaaaaagtatttcaacaacactatactaacaagattagggccctacgtaataggctaattgtactgctcttaaaatgtaagcgttcacgaaaataaaatttggatatagacagtccttaaaaatcacactgtaaatatgaatctgctcactttaaacctgnnnnnnnnncatttattgtttatgtaaatgtttgttaaaaataaatcccatggaatatttccatgtnnnnnnnnnnnnnnnnnnnnnnnnnnnnnnnnnnnnnnnnnnnnnnnnnnccttgtcgggccgccccggcccctgaaaaagtttccaaaacatttctttgggcgcccgggcccccaaggaagggaacctgggcccaaaccgggttcccaaggaaaaaccgggtcctggaacaaggggttgggaatnnnnnnnnnnnnnnnnnnnnnnnnnnggggggggaaacccggaccgtttccggaaaaccaaccccccaaaggggaagtcccccggaagggccccctttaccgtggggtcctttttcccaaccggagaatgcccccaaggcgaagggctcccaaatatacccaaaatttaannnnnnnnnnnnnnnttgtggcgcacttctcattccgaaagaaaaccnnnnnnnnnnaaactttcctttttaaaggcccttttctgggcccccacaaatgggggaaaaaccccattatcaccacaaagacggggcactgtgaataaaaaacgcctctgaaaatttccggccacggggggggtctattcactcgccaccccttttgtggcctccccccctgtgagggag

SEQ ID NO: 13719 - DNA, 613 bp, Homo Sapiens
gcggccgccatgagccaagcagccatgcagagtccaagggccaggcgccggccacgcagggcgcgggcccgcagcgggtgcaccagggccaggtagcgatccaggctgacggcggccagcagcagcactgagccatacatgtgaccatagagtgcggccgtggccaggcggcaggcggcctccccgaagggccagcgctggccacgcaggtggtaggcgatccgcgggggcagcgccagggccagcaggaggtcagcagtcgcgaggttcatcagcagcatggtggagggcagccgaggtgcctgcgtggccagcacccacagcgccagcccattggccggcagccccaccaccaggaccagcccatagagggcgggcaccagcctggtgggcacccagcccagaagcagtgcccgtgagctgtccgggagctccagggtgtcactgtcattggcacagacttggcctgggtagccgcggggggcaggcaggattgagggcgtgcatcaccacctccggtgctcccgctctcgtcgtagacgctgggggtctgggtgccgccagacaggctgaaccccagcaccaggggccacaggagcagtcgcccccacat

SEQ ID NO: 13720 - DNA, 717 bp, Homo Sapiens
  misc_feature (31)..(31): n is a, c, g, or t
aaagcagagcttgtcactagcaagctgctgnagtcatgacagaggacgatctgaggggtcagcggtcatggcatttatgcaacagggctgtgccagtgcaaggtgtactggtctggccaatgtgccccatcacttgttgctcccaaacctgattgagagacaaaagaaggtcaagctatttggtctggaacaattccttagcgatctcattgcccaccagaaaggacagatagagaagcagccaccgtttgagatctacttatgctttggggaagaatggccagatgggaaaccattggaaaggaaactcatcttggttcaggtcattccagtagtggctcggatgatctacgagatgttttctggtgatttcacacgatcctttgatagtggcagtgtccgcctgcagatctcaaccccagacatcaaggataacatcgttgctcagctgaagcagctgtaccgcatccttcaaacccaggagagctggcagcccatgcagcccacccccagcatgcaactgccccctgccctgcctccccagtaattgtgaatgccatcttcttccttctcttttttataatattgtacatatggatttttttattgtttagatttaaccagcttttaaatctctcttttctctaacagtgttagaagtttgtgattctccaaatatgcctagatttaaagctgatttaatttatggaaaagtcc

SEQ ID NO: 13721 - DNA, 707 bp, Homo Sapiens
  misc_feature (24)..(24): n is a, c, g, or t
  misc_feature (30)..(30): n is a, c, g, or t
ctacgctcgcggcttccatgacanagacanagagtgcagttgtagggagtctggttaccgtgccagcagaagccaaagaaagagtcaacggcaattcttgagaaaccaggggactccaaagtacaagcccagatttgtccatactcggcagacacgttccttgtccgtcgaatttgaaggtgaaatatatgacataaatctggaagaagaagaagaattgcaagtgttgcaaccaagaaacattgctaagcgtcatgatgaaggccacaaggggccaagagatctccaggcttccagtggtggcaacaggggcaggatgctggcagatagcagcaacgccgtgggcccacctaccactgtccgagtgacacacaagtgttttattcttcccaatgactctatccattgtgagagagaactgtaccaatcggccagagcgtggaaggaccataaggcatacattgacaaagagattgaagctctgcaagataaaattaagaatttaagagaagtgagaggacatctgaagagaaggaagcctgaggaatgtagctgcagtaaacaaagctattacaataaagagaaaggtgtaaaaaagcaagagaaattaaagagccatcttcacccattcaaggaggctgctcaggaagtaaaaagcaaactgcaacttttcaaggagaacaacggtaggtatgatggaggacggt

SEQ ID NO: 13722 - DNA, 567 bp, Homo Sapiens
ggggtctaaagccccaggaaaaatggtggaaaattcaccgtcgccattgccagaaagagcgatttatggctttgttcttttcttaagctcccaatttggcttcaatattgggcagttgcattacctgtctacctccttattgctatagtaattggctacgtgctcttgtttgggattaacatgatgagtacctctccactcgactccatccatacaatcacagataactatgcaaaaaatcaacagcagaagaaataccaagaggaggccattccagccttaagagatatttctattagtgaagtaaaccaaatgttctttcttgcagccaaagaactttacaccaaaaactgaactgtgtgtaaccatagtaacaccaagcacgtatttatttataagtttttgccattataattttgaccataaattaatttgaccatctctcttattaatagagaagtaaaaaatgtaacttgaccttctcttagattatgttcaatgaatattgtaaatgttcaagtattgttaaccaatagaataaatactgttttgcatacataaaaaaaa

SEQ ID NO: 13723 - DNA, 1058 bp, Homo Sapiens
ggggtaggaaggcgccggccgtggaggcgccacgtcccttgcggcggcgggagagaaatcgcttggacttcggggcggcctcggacggccatggcctttaccctgtactcactgctgcaggcagccctgctctgcgtcaacgccatcgcagtgctgcacgaggagcgattcctcaagaacattggctggggaacagaccagggaattggtggatttggagaagagccgggaattaaatcacagctaatgaaccttattcgatctgtaagaaccgtgatgagagtgccattgataatagtaaactcaattgcaattgtgttacttttattatttggatgaatatcagtggagaaaatggagactcagaagaggacatgccagtagaagttattactttggtcattattggaatatttatatcttagctggctgaccttgcacttgtcaaaaatgtaaagctgaaaataaaaccagggtttctatttatctgtgagggcggggaatgttgcacttgtagtttcattacaaaagatcagatcatgaaaggcagtaactctccaggactggaatatctgattgctcagggttaatagtagttcatgctgtggtgagattgttaaaagggtgcaagactgtggcttctcttattttagatattttctatctctcacttctcagggatgaaattctttttcaaagtttcgaagttcctgcaacttagccatgatgtgagtggttatccctagataaaattaaaaggatttttacaaagtaattacgccacataaatatgataaataggtaattggaataattttatttgaagctccctggtttaattattttgtctattgtctcacctataaatccaaattaatacatactattgagtataaatattctctgatttcagggagaattctgtcagtcacatgcatgcacaggcacatgcatgcacccaggcctgggtgcatgcttgtcccatggctccctcttcccagaatctgcggggaactggggcaaggcccatctgtctgcaaggctggtagctctctccc

SEQ ID NO: 13724 - DNA, 1264 bp, Homo Sapiens
  misc_feature (722)..(722): n is a, c, g, or t
caggctggtaccggtcgcggatttatggatcggcgcgggtggccgaggcgtagcgctgcgacccccgcacccctgcgaacatggcgctgcgagtggtgcggagcgtgcgggccctgctctgcaccctgcgcgcggtcccgttacccgccgcgccctgcccgccgaggccctggcagctgggggtgggcgccgtccgtacgctgcgcactggacccgctctgctctcggtgcgtaaattcacagagaaacacgaatgggtaacaacagaaaatggcattggaacagtgggaatcagcaattttgcacaggaagcgttgggagatgttgtttattgtagtctccctgaagttgggacaaaattgaacaaacaagatgagtttggtgctttggaaagtgtgaaagctgctagtgaactctattctcctttatcaggagaagtaactgaaattaatgaagctcttgcagaaaatccaggacttgtaaacaaatcttgttatgaagatggttggctgatcaagatgacactgagtaacccttcagaactagatgaacttatgagtgaagaagcatatgagaaatacataaaatctattgaggagtgaaaatggaactcctaaataaactagtatgaaataacgcaagccagcagagttgtcttaaattagtggtggatagaagacttagaatagcaacttttagtattaccgatggggaaaaaaaanctactgttaacactgctaatgaaagaaaatgccctttaactttctaatgattatagataaatataatatgtgtctttttcacaatatcctatgatttttagactaggctctagtgttcagaattcatgaaattatccatggtaaaaactagttataaaaattacataattcaaagataacattgttattcttaagccttatataatattgtaacttgcatgtatccatacctggatttgggatgaaatacttaatgatctttccattggaaataactggaagtgaagaggttttgttgcttgtacagtgtcagatgaggaacaccactatcttaattttgcgatacactgcatttgctggtgctatttttatacagtgaagcaacagctttgcagcaaaataataaaatactctcttcgtcctcgccccaccaccccctgcactttaaacgcccaactagccataaaggggggaccaacagcaccgtatctccaccccttgaacacccttggtggcccgcggtccctcccgcggcctctgtc

SEQ ID NO: 13725 - DNA, 1023 bp, Homo Sapiens
aactccgatgtgattcggtgatttctcgttttcccaaaccgtaaacttgcatcgactaccgttcggattccccaaacaggcacgtcctcacgtgtcgccagctacccgggtttcccaaaagctacttggctatgaggttataatgatgatccctgcttttgggcacggaagaaaattcgtcggaatccagcatatcacagggttaacagtaaagactgcagaattgtgtgacaggctgcaaattatcgagttgggtatgatcatgtatgaaccgcacttcgacttctctaggcgaccttttgacagtcggcctccatacatgagtgggaataggttatcgacgtttcttaactacatgagtgatgtagaagctggtggtgccaccgtcttccctgatctgggcggctgcaatttggcctaagaagggtacagctgtgttctggtacaacctcttgcggagcggggaaggtgactaccgaacaagacatgctgcctgccctgtgcttgtgggctgcaagtgggtctccaataagtggttccatgaacgaggacaggagttcttgagaccttgtggatcaacagaagttgactgacatccttttctgtccttccccttcctggtccttcagcccatgtcaacgtgacagacacctttgtatgttcctttgtatgttcctatcaggctgatttttggagaaatgaatgtttgtctggagcagagggagaccatactagggcgactcctgtgtgactgaagtcccagcccttccattcagcctgtgccatccctggccccaaggctaggatcaaagtggctgcagcagagttagctgtctagcgcctagcaaggtgcctttgtacctcaggtgttttaggtgtgagatgtttcagtgaaccaaagttctgataccttgtttacatgtttgtttttatggcatttctatctattgtggctttaccaaaaaataaaatgtccctaccagaagccgaaaatctaaataggctacccaacaatatatcttg

SEQ ID NO: 13726 - DNA, 658 bp, Homo Sapiens
acccgaccccgccgtagcccgcagagaacaaatgaggggcatagctctaactcggctcagctgaccccaggattgggaaagtggcgcacggccccccaacgctgctcgtgtcattcactccgcgtcccctccatgccctggggaatgaatagggagcttcgacggctccagcagaatccagtgccaacttgcggggccagtggggcaccgcgggagggaaggggcatgcaactctcgcctctgttccagccctcctgcctcccgagtgtcccaggggacggatggcctgggcgcacgtcggggtccgagcggcgcctctgctccttcatgtggctcagggaaggtgcggcgcgggggcttgaatctcgaggtgtccgccccccacccggcccggctcgcggcagcggctcggggctctggccgttcctgcgccgttatcccaggctctgcgccccgcgccccgacgccggccgccctttcctacctgcggccggggctgcgctgcccgggacaggcgctgctccgggcggctcggccgctccgatgcgctcgggacgcggggccgctcgggctcgggctcgggctgcgctgcgctcccgactcctcggctcctgggctcagcgcagctcacccgcaacctctccgctcggacgcgtgg

SEQ ID NO: 13727 - DNA, 780 bp, Homo Sapiens
ggcggaacctgccctggccatcactgtttctttgacgtgtacatcccatcctgagatgcagctgggctgggagccgccacctgggtggatctgattcctggatttccccatcctgggacaggtgacccatcctgttctcctccttaggtccatgtgaaatctgaggtccttgctgtcaagttgtcacaagaaataaactacgcaaagagcctctactatgaacagcagcttatgttaagactcagcgaaaaccgagagcagctggagctggactcctgaagccccgctgctgagatgggcgctcccgacacagcgcagacccaccaggaggaaagaggcccagctctcagctgacgatggaggcagaaccggagtcgggtttggggaagttgtcaaggaatgagggaaagtaaatcctcatgaggaaaagtacaaatggaaatcgtattaatttgtgaggcagggagttattttagattatgggaaataatttttaaaggtattggttaaataacgtttaaaaacatgtactgagatgaatctaatttttagattgccctgtattttgtcaacatgtatatatgtacaacagtgtgtttgtaaatatataggaacgtttctgaacagggtctgtgctatgtgtaaaggtttgttaactgcaaaggaatataaagttatattggatcttctattgcactaattctagatgtctaattcaggatactgtctatagaaaggcattcttaaaagttaaagatgttacgtcttagatttggagac

SEQ ID NO: 13728 - DNA, 703 bp, Homo Sapiens
gtcctcacgcagggagcccctgggcactgctcatgtgctgcctgggccctgctgctcagaacaccaaagggctcccaatgagggcctggggaattgcctgggcacactggggccaggcacagggtctgttctgaattcagggaaggtgaagagaccccacctctatccagctcaagcccaagaacaaggcagacagagctgtggacagcacccgaccacagacacggttctgcctgctgctggagtgagaggcctggtttctgaggctgcagcatggcactggcattgcctgtgctacagatggggactcctgcgagtctcacaaatacagggagaatttcagttcacacaacccaagggccctgtgtgcagagcggccctcacacgcgcacagcagcattcaacagagctgggcaagggaaggggagagagagtcaaggattgaaatgaagggacttcaaaaagaaggaacaaactaaaaacccaacccacacacaatactgttaataagccagcgactctacacacacactccttaaataataaagtgacaggtcccggctggccccgcaagaccaccgcaagagggggtcccgccaccagagggggtcccgcctgccactgcacggctttcctccctctatctacaggacaaacaaaacacgggagaggggaaaaagcccacattttctcggacgcgtgg

SEQ ID NO: 13729 - DNA, 614 bp, Homo Sapiens
agaggatccactacgcctgggcgcaaggcaggtaagggttaaatgggtgcggtgagtcctgcccgcagtgtagaggcgaggccttggagcactcgttactgtgtgagaaaccttatccacttcctcttgtaccgaagtgattggggagagaatcctttgtactggcttaaatcattttttgttagaagcagaaataaccagagagcgtttctgagatcctaagggaaaaatcagtaatttagagacctgacgaaaataatgccgtcataaaggttaaatagtttacgtattgagccagtaccttgcatccaaagtggttaattatttgtttaaaatgtggcgacctgttctctcatttggttaaaaaaatattgtgggatttccctgggaaggtaaaagatgattaatattcgggagccagctgccaaggtggactcttctgttcaccttctaacttaaaagtgcacttcattcagggtgtgtattttcctctgaagtcatttattctgtggtgtcactgtgtggattagtatctttgtgctgttcggcaacttgcaaaagggtatctttccagaaaaatgtagctgaggtaaatcgaaaaggtccaggaaact

SEQ ID NO: 13730 - DNA, 464 bp, Homo Sapiens
  misc_feature (12)..(12): n is a, c, g, or t
caaaggcccatncgtttgcctcggaccgagccccagcttaggcgagggaagtcaaggctggcttcggccctcggttttcattcaggccaccctgctcaatggcccttcctggccgcctgccacaccgcaagctcgctggggggacactagaagcaccgtggcctgggattccatctggagctgtccgcaggcaccagccccagcctcccaccacgctcactgcctggcttggaaaagttaagaagcccctcaggaagagaatcgaggccaagttcctctgcgccgagggccccgagcatatcccccaaggctcagctgcagtgccaggcggaggaggaagatccagaaattgtgaacaatgtttgatttagtagcgtgacttgcctttccctttaaaaacatcttttacaaatctgtcttggaataaagtctattttctgccttttggtttttaagctctgaaa

SEQ ID NO: 13731 - DNA, 660 bp, Homo Sapiens
ccacgcgtccgggcggctcctgccaaccctccctgctaaccccttctccgccaggtgggctccagggcgggaggcaagcccccttgcctttcaaactggaaaccccagagaaaacggtgcccccacctgtcgcccctatggactccccactctcccctccgcccgggttccctactcccctcgggtcagcggctgcggcctggccctgggagggatttcagatgcccctgccctcttgtctgccacggggcgagtctggcacctctttcttctgacctcagacggctctgagccttatttctctggaagcggctaagggacggttgggggctgggagccctgggcgtgtagtgtaactggaatcttttgcctctcccagccacctcctcccagccccccaggagagctgggcacatgtcccaagcctgtcagtggccctccctggtgcactgtccccgaaacccctgcttgggaagggaagctgtcgggtgggctaggactgacccttgtggtgtttttttgggtggtggctggaaacagcccctctcccacgtggcagaggctcagcctggctcccttccctggagcggcagggcgtgacggccacagggtctgcccgctgcacgttctgccaaggtggtggtggcgggcgggtagggg

SEQ ID NO: 13732 - DNA, 649 bp, Homo Sapiens
ccacgcgtccggaacaaagcaggagctgtgatgcattctgggatgcagataaacatgcaagccaagcagaattcttccaaaaccacatctaagagaagggggaagaaagtcaacatggctctggggttcagtgattttgaccttgtcaagaaggtgacgatgtatgatgatgatgacggtgaggaggaggataatgacatggataatagtgaatgaaagcagaaagcaaagtaataaaatcacaaatgtttggaaaacacaaaagtaacttgtttatctcagtctgtacaaaaacagtaaggaggcagaaagccaagcactgcatttttaggccaatcacatttacatgaccgtaatttcttatcaattctacttttatttttgcttacagaaaaacggggggagaattaagccaaagaagtatatttatgaatcagcaaatgtggtgcctgattatagaaatttgtgatcctatatacaatataggacttttaaagttgtgacattctggctttttcttttaatgaatactttttagtttgtatttgactttatttcctttattcaaatcatttttaaaaacttacattttgaacaaacactcttaactcctaattgttctttgacacgtagtaattctgtgacatac

SEQ ID NO: 13733 - DNA, 496 bp, Homo Sapiens
caggactggcatgcctgatgtattagcctggaagattcacccctgtcctaggggaaacacagaagggaggagcatgtgcaatgaggatggtggtgagaatgaccccctcctggctcaggtgcaggtgagtccctcttccctcagatgcttcacagcccttcagattggactcaagttctctcctcctggaagcctccactccagctttgatttttcccttctcaagttggctctgactttctagaagatcctaagtaggcttcctgttagggttccagaaccctaattgccaatactattcaaataggcacttattatacactttatcacttatgtgtttcctgtacaaattcttttgactttttagaaaaaaatatcgcataaattctttaggcatggagaatgcctaccctaaaatttgctgggttattttgttttggacccttgccctgtgagccttaatcagttctacaaataaatggcatttcgatttgcc

SEQ ID NO: 13734 - DNA, 242 bp, Homo Sapiens
agcttggagaagctgctgttgatgcaagggagatggtctcaagtcagagggaagcagagacgcgcgtctcaagcctgcccttcctagacggccacctgcaggaccccacactcactgcactggcagcgtgcactggcgtatttgtaacaggcttatcggtgctcctcacccgtgtgctgttttccaaacaccacctttttgcctcaaggtctctgtaaatgaaataaacaataatttactaa

SEQ ID NO: 13735 - DNA, 851 bp, Homo Sapiens
aggaggcccagggacagctgtagtcacgggagacggggaggaaagtgagtccagactgctggtaggggtgtcctccttggaagggtaaggattgtcaccatcttccagctccagacaaagattgtagacggccacgggcctcttggttctctggccttgtctcttcgactgccttggtggcgcatttgggggtgacgctgacaggcaggtgggctcagggaatgtagtatcgggcggcgtccgaaaaatcttttcatggttttcaattaagatttccacaacaatattctgaaacttcaagtccatgagggcagcgacagtttcttcctgtggcctcatcagagttggtccaaacaccactcctaagtttgccacagtcatcaggttctgcttggagtgatttgaaacatttgttaagtgtttcaccaaaatatccaacatctctttattcttctctggcagtttgtgtaccaagaaatggatcgcattaacacgagattctgggctgccgcttttggctggaacaatgaaatctccatgtaactcataggtcatgagaggctctggaagactcctcaaatactgtttcaaggcacttgttattgtcttcacttcccaatctgcagaattctccaggtccacctcattgcatgtttttacatccatcaacatactcagaagtctctggacctttgaactcacccccacaactctgtacaatccttggtcatttatacctcgtgtttcaacggcactgatgcattttctgataattgtgaaccccatcttatccaactgtgcatttccttctggtcttgggatgatggctgtattaaaactcggacgcgtgg

SEQ ID NO: 13736 - DNA, 798 bp, Homo Sapiens
ggtgataaggggatcctttcagatgatcatgggctggccgctgccctctggagaaccttcttcaaccggaaatgtgaagaccctcgacatcttgaattgctggtagagtatgtgaggaaacagatacagtacctggactccatgaacggggaggatctgcttctgccaggggaggtgagctggcgccctctagtggagaagaatcctcagagcatcctgaagccccattctccgacttacaacgacgagggactttgatgggctgggccctccgcacggcccgccagctggcttcgaggaacctccaggagagaagtgcctgttggtccaggaccctgcagaaagtggcctgaactgacctctgaacagcatctgtcaaatacctggccccatttgtgttgagtttcctcttagtgtgcccaggagtctgatctgctggggtacagggctgggagaacccctagctctcccggggtgtcctctcccttaggggaagccccgagtgagagtcccccagcacacactccccaaccccctccagcaactacatgtgactgatagcttttcccaaaggccaaggaagggatggtgtaggttcaaaagggaaaccccccagggcctgctgtggcctaggagcagattgtaatgctgccgagtccggtcggtgaccacgcgttgtccctcggctttcagccatggggttgagttggccattaaaagaaacagagacttctctctgccatggcccttctttattccagggacttagaaactttgcctgagatggtggacgcagta

SEQ ID NO: 13737 - DNA, 1905 bp, Homo Sapiens
  misc_feature (1802)..(1802): n is a, c, g, or t
ggggccccagcccggccgcggcacctccgcctcgccgccgctaggtcggccggctccgcccggtctgccgcctaggatgaatatcatggacttcaacgtgaagaagctggcggccgacgcaggcaccttcctcagtcgcgccgtgcagttcacagaagaaaagcttggccaggctgagaagacagaattggatgctcacttagagaacctccttagcaaagctgaatgtaccaaaatatggacagaaaaaataatgaaacaaactgaagtgttattgcagccaaatccaaatgccaggatagaagaatttgtttatgagaaactggatagaaaagctccaagtcgtataaacaacccagaacttttgggacaatatatgattgatgcaggactgagtttggcccaggaacagcttatggtaatgcccttattaaatgtggagaaacccaaaaaagaattggaacagcagacagagaactgattcaaacgtcagccttaaattttcttactcctttaagaaactttatagaaggagattacaaaacaattgctaaagaaaggaaactattgcaaaataagagactggatttggatgccgcaaaaacgagactaaaaaaggcaaaagctgcagaaactagaaattcatctgaacaggaattaagaataactcaaagtgaatttgatcgtcaagcagagattaccagacttctgctagagggaatcagcagtacacatgcccatcaccttcgctgtctgaatgactttgtagaagcccagatgacttactatgcacagtgttaccagtatatgttggacctccagaaacaactgggaagttttccatccaattatcttagtaacaacaatcagacttctgtgacacctgtaccatcagttttaccaaatgcgattggttcttctgccatggcttcaacaagtggcctagtaatcacctctccttccaacctcagtgaccttaaggagtgtagtggcagcagaaaggccagggttctctatgattatgatgcagcaaacagtactgaattatcacttctggcagatgaggtgatcactgtgttcagtgttgttggaatggattcagactggctaatgggggaaaggggaaaccagaagggcaaggtgccaattacctacttagaactgctcaattaagtaggtggactatggaaaggttgcccatcatgactttgtatttatatacaattaactctaaataaagcaggttaagtatcttccatgttaatgtgttaagagactgaaaataccagccatcagaaactggcctttctgccaataaagttgcatggtaaatatttcattacagaatttatgttagagctttcatgccaagaatgttttcttacaaaattctctttttattgaggtttcactaataagcagcttctacttttgagcctcaacttaaagcagaactgttttctactggatttttcattaacagcaagctttttcttttatgtaaaataaatctattgtgaattgatatcagcgactcatttattaggtataaataatagccaaagaataaaattaaaatttattttaaactttcggtcttaaaaagagctgtaggatataaacctcttttgtgaaaactagaattttctgaatgctttcatagacaaaaacgcatttaaactatgtttacctggttttccaacagaaatcaaatgattttaatattatgttttgatgggttattttcagagttgtttggttttttaaacactactgaatggtttcttttaaatttaagaacnactagttcttgaaaagcataccgtatttctctgataaatttgtagttaaggttctagaaaatctaggacaatttacttcattaaacataaagtttttaagatt

SEQ ID NO: 13738 - DNA, 1002 bp, Homo Sapiens
ggaacaacaaaagcgcttacaaatttggggggcgtgattttagtacctttatttgaagtgtaatcattttaaattattattattttaactggggcagttatcagtggtttaaacaggaactttagtggcttcaatttgtttaagaaacatattaagtttgagggaaaaatttcccatgaaatatttggaacgtaagagtagtattgattagagaaaattaaataagaaacatagtatggtagccaaattttttaaaaaatcttgaacttttctgtaggtcagttttagaactgctgtgaaaagtgaaggttgccctgtggagattaaaattagagttgttttcataactgacagcatggtgaatccatttgagtcaaagtgaagaatttcctcatcaagtgactatacatttgtttttgtgtgctcaaaagaaatactcaaacacagactgatattaaccagccaggtaaattgaacgacaatgtggcattaggtatttggctgtttattggtcgttaaatactatggttttgcaatatgattgatggtaaaagagtgatgtcatattgatactagagtagcttgtttttttagtaggtgtgggaccatctcttttacaagtgcaactcagtctaggacagccatggatgcagtgtctggagttggaccctctgagcccgctggctgccccagtagcatctgcattggtgaccaaggacactgcactttgaagaggtcgccactgggttatttagtgtcttcactgcttttgttaaaaattgtaaaattttgtacacaaaaagttgtgtttttgaatatcaattgtttagacacacctacaatgataaataagtgcctttaaaggcccctctttccatgaaatacatctgtggtttagcaaggaaagtacaaaatagtttatggagtggggataatttttatttgtgtcttcatgtagaaaagaatgaatgtcataataaaatataaaaccttacgtaaggg

SEQ ID NO: 13739 - DNA, 1086 bp, Homo Sapiens
ggggtaaggattgactcaagagacagtattagtaaatttattgtgtatggatcaaaagtgaataatgtatgaatgagagctgtaagaaggatttttattttgttataatttagttaccattttcagtgttatttcaaaggttctttgaagaattttggggcagggcatcagattagagttttaaaatttgagtattttggatatcagtgttcctcatgaagatatacatggatattcaattttgatggcttccagatttgtaagattgtatgttgtatataccattctattaagaaacatgtccactgtgctttcaaacatagataaagcatgataaagattattatttaagatatacttgtatttatacctcagatattcttttgggttttgtacctcaaggcttttttcttcttattgtaaatacactttacgtgaatacagtctaagtgaagaaaataaataaaaggaagaggtttataacttgctctatatctgtacagattataatcaataagtgcactattattaaatgtttaaagtaagggaaaagtctgggctgccttccttaatattgcatctcactcccacccttaaaaccacagattgcaaagcatagcattttagcatcaactacaatcaaaagagcgatttgctgaaggaaaaatcggactgcaaatcattccaaggcccaaactgcaactgagccacccactcccaaacaggaaaccctggtgaaggttcaggaagcacggagattctctccaacaaaggtccagctaggaaacgacgctgagaggatgacgacaacgtgcaacagcagaaagatgcttgccagcagaagtcaggggcccccagtggaatgcccacaaaagtttctccttttcccaactggtttaattttgaccaaggaaaaagaaattttgaaagggattatgaaacctttttttccaaagaaaacttcttgggttggaggggtcaccctttaagaaagggggcccattcccccaaaccttaaatttgtggggggcggaccctaaaatttgggcccctcaaaaaaattgtgggaaaagaggccttcccttc

SEQ ID NO: 13740 - DNA, 416 bp, Homo Sapiens
  misc_feature (284)..(284): n is a, c, g, or t
  misc_feature (299)..(299): n is a, c, g, or t
ttacagggagaggaaattctgttaattccacgtttattaatcacacagctctctgcagactagacactaaaacacacaattgtcaaaaactagaaaaatgagttatgtccacgttttaaaagcaaaactttataaatttcttaccacactcattcccaagttttatcccacaaagtatagcatgaaacaatgacaacatacatattattcaagtaaaatgctatttaaaatagctgcacacaggtaattaaaacacctaggatccagtttttagaggaaaaagncatgtggcacaattncaagttcataaattgagttaacagtaaaacagatttgctcacatttgcttctgatctttatttctgtgtctctccttagtagaataaagaaatggacttcacataaaatcatattta

SEQ ID NO: 13741 - DNA, 605 bp, Homo Sapiens
ggtcatcgggctgagcaatctgacccacgtgctgtatcctgtccccctggagagttatgaggacatccatggtaccctccacctggagaggcttgcctatctgcatgccaggctcagggagttgctgtgtgagttggggcggcccagcatggtctggcttagtgccaacccctgtcctcactgtggggacagaaccttctatgacccggagcccatcctgtgcccctgtttcatgcctaactagctgggtgcacatatcaaatgcttcattctgcatacttggacactaaagccaggatgtgcatgcatcttgaagcaacaaagcagccacagtttcagacaaatgttcagtgtgagtgaggaaaacatgttcagtgaggaaaaaacattcagacaaatgttcagtgaggaaaaaaaggggaagttggggataggcagatgttgacttgaggagttaatgtgatctttggggagatacatcttatagagttagaaatagaatctgaatttctaaagggagattctggcttgggaagtacatgtaggagttaatccctgtgtagactgttgtaaagaaactgttgaaaataaagagaagcaatgtg

SEQ ID NO: 13742 - DNA, 524 bp, Homo Sapiens
gagggcagatattgggtccttgtaacttcaactgactcttccaaattgtatgaatttatcaatgtattacacaaatccagtttcagaatgataaaaaatgttagaccaaataatgcggctaattaacagtcgtatgatttctagcccatgggtttaaaactgtatcttaaagagtcattttaaaataatataaatattaaaaaatgtaactgctatcttaatgttctgaaataaaacattttaaaatataaatcctgtagtttaaaaggaagaaatggtgggaaggaaaagtagagaaagaaatgccaattacaggccaaagcgttatttgccaagttttcttagaatgaattttaccaatgtatgagttcttgttaacagaatgtgtaacggaaatactgaaagacttttgcttaaagtggcattattgactgctgatgtgatgctactgtaatgcaataaatttttaaattgttgcaaagtgctgtttttgccttaaaattttattttgtgtgctaagtggg

SEQ ID NO: 13743 - DNA, 1235 bp, Homo Sapiens
  misc_feature (701)..(710): n is a, c, g, or t
  misc_feature (964)..(1075): n is a, c, g, or t
  misc_feature (1077)..(1077): n is a, c, g, or t
  misc_feature (1080)..(1081): n is a, c, g, or t
  misc_feature (1091)..(1106): n is a, c, g, or t
  misc_feature (1150)..(1167): n is a, c, g, or t
gggaggtttcgggcttcaggacaattcgtgatggcgggggctggttccgccgctgtatcgggggtagggaccccggtggcggggcccacaggccgcgaccttttcgccgaagggctgctggagttcctgcgacccgctgtgcagcagctcgactctcacgtacacgccgtcagagagagccaggtagagctccgggaacaaattgacaacctagccacagaactgtgccgcataaatgaggatcagaaggtggccctggatcttgacccctatgttaagaagctacttaatgcccggcgacgcgttgtcttggttaacaacattctacagaatgctcaggaacgactgagacggctaaaccacagtgttgccaaggaaacagcccgcaggagagcaatgctggattcgggaatttacccccctggctccccaggcaaataacagatgagcctatggactcagtagcacaagtactgttccccagctgccttgtttcaacagacatgcaaagatcctaggagacagtccccatagaccttcagacattaaaaagggagccgtacagtttgtttgaagcacttcgtcttacccatttatgtaggggccccaggaaacctacacacagccagaatgaggttcccaaaggacttacattaattatggctcttgcttcctttcacaaatgagctgaggcctctacnnnnnnnnnnaagctgcatacttgaggcttaccttcttcaggactagttaaccagaggggcttcctttgtatgttacatgcctggttacatgggcctggacagcatgtcctctacctgtgacttctcattttcctgtttacactggggatttggagggggcaggcaaagtcaaagtgaatgacctctgtccacccacttttttattgcactggcttgaatacagtagcagtgttgatagaatcattttattcaataaatacttnnnnnnnnnnnnnnnnnnnnnnnnnnnnnnnnnnnnnnnnnnnnnnnnnnnnnnnnnnnnnnnnnnnnnnnnnnnnnnnnnnnnnnnnnnnnnnnnnnnnnnnnnnnnnnnncnaanntttttgcggnnnnnnnnnnnnnnnnaagaaattttttaaaacctttttttgttggcccgcccggccccnnnnnnnnnnnnnnnnnnggggccaaaacttttttttccaaagaacacaccgcggcaaaaaacaaggggcttgggattctcccccc

SEQ ID NO: 13744 - DNA, 429 bp, Homo Sapiens
catgaagagctcattatcaaatgaagtgaatgagaaagcaaaaaaaatagtagaaatggaaagagaacatgaaaaatcacttagtgaaattagacagttaaaagagagaacttgagaatgttaaggccaagcttgctcagcacgtcaaaccagaggaacatgaacaggttaagagcagattagaacagaaatcaggagaacttgggaagaagatcactgagttaacattgaaaaatcagacactacaaaaggaaattgaaaaagtttatttggataataagctcctcaaggagcaagcacataacttaacaattgaaatgaaaaatcattatgttcctttaaaagtaagtgaagacatgaaaaagtcacatgatgcaattattgatgatcttaatagaaagcttttagatgtaacacaaaaatatacag

SEQ ID NO: 13745 - DNA, 1086 bp, Homo Sapiens
tagcaggacccgtgagttgaaatgtgtttgggaggaggcatgcacgcctggtgcatgttgaagagcctcacacggagaccgtacgaaagtacttccctgagacatggatctgggatttggtggtggtaaactcagcaggtgtggctgaggtaggagtaacagtccctgacaccatcaccgagtggaaggcaggggccttctgcctgtctgaagatgctggacttggtatctcttccactgcctctctccgagccttccagcccttctttgtggagctcacaatgccttactctgtgattcgtggagaggccttcacactcaaggccacggtccaaaactaccttcccaaatgcatccgggtcagtgtgcagctggaagcctctcccgccttcctagctgtcccagtggagaaggaacaagcgcctcactgcatctgtgcaaacgggcggcaaactgtgtcctgggcagtaaccccaaagtcattaggaaatgtgaatttcactgtgagcgcagaggcactagagtctcaagagctgtgtgggactgaggtgccttcagttcctgaacacggaaggaaagacacagtcatcaagcctctgttggttgaacctgaaggactagagaaggaaacaacattcaactccctactttgtccatcaggtggtgaggtttctgaagaattatccctgaaactgccaccaaatgtggtagaagaatatgcccgagcatctgtctcacttctgggagacataataggctctgccatgcaaaacacacaaaatcttctccagatgccctatggctgtggagagcagaatatggtcctctttgctcctaacatctatgtactggattatctaaatgaaacacagcagcttactccagaggtcaagtccaaggccattggctatctcaacactggttaccagagacagttgaactacaaacactatgatggctcctacagcacctttggggagcgatatggcaggaaccaggccaacacctggctcacagcctttgttctgaagacttttgcccaagctcgagcctacatcttcatcgatgaagcacacattacccaag

SEQ ID NO: 13746 - DNA, 667 bp, Homo Sapiens
agttacatctggtgtgtgaaccttggtggaactagggtgaagggtggagtaaagacacaaaatgctaccactaaaatgggagaggcatggaaacctcagggtggttcttttcacccctgttgatcaaggtcagggcaaagacaaggaggaaggaaaaccataaagccaaagtctgagtgtgaaccactcaactgagcacaggctgtagcttctccaagaaggatgcaagggtgaaacattctttccttccttctgcagggaaatcattgccctggtgtgccagccagtggtaggcacaacctttcaaaagttcaagggatgctggctagaaaaggaggtattctggattgctgcctcctctcagaaccctctcctaccccacagcctgcctcctggtgtcttttttcctccaaactctctttacctaacctctcttcatcagaaggcaagcgggaatctgttccgggtttcagtagagtgggagaaaggacaggcaaaggcacagatatttaggcgagagtcaagctacttctggcccttgcatgtcccttattcaggaatagtgggccccgacgactggcactccgactctcaactctggttttgggagaacattagaggctcttaagaggctccccaacatcagtgtgcctttcctgaattcttg

SEQ ID NO: 13747 - DNA, 519 bp, Homo Sapiens
  misc_feature (135)..(175): n is a, c, g, or t
tgtttcagcaaagtaaacagcactccccaccccaccctcctttttttactcatcttggaaaaggttagtctttcagtacacgttactggtaagtagtttccaagttacgtgttgtcactgggttgaagtatattnnnnnnnnnnnnnnnnnnnnnnnnnnnnnnnnnnnnnnnnnaaccataaactatattcatatctgtttcatttggaggattttcttctttgtaatgtaaagaaattcaaagttatcaaagttccttaaatgtgttagtttagattctttatgtgcctttcatgaaagatatgttttcattaattttactggtggacctgtaatatccacattgtgaagctgtgtatgaaattcaactataatatgaataaatttgaatcatgagaattatgggttaaaaagccacaaagaagcacatattggtgaccatcattaatgaaatcctgaactttattctgtgtaattgtgttaataaatcctaataaatttaaatttttaaaatttta

SEQ ID NO: 13748 - DNA, 649 bp, Homo Sapiens
  misc_feature (588)..(588): n is a, c, g, or t
ccacgcgtccgccggcgggagtgcagcggccactgtacccagagattcaaaaccccaaacccgggacttgggggcgctgagccgggccgggaagcagagcctggtcgtgaggaacagccgcccgttgctgtctgcccctttgcggacagcgtctccctcgactccgcttaggaagtggtgggggcggcgtggcccccgtcgggaggcgttcgaacgcccgctaggagagagaaaggattcccctgtgcttggagcccgcactcgggcgcggagggagcggcggcaggctctcgctttcggcaccatgggctgcacgctgagcgccgaggacaaggcggcggtggagcggagtaagatgatcgaccgcaacctccgtgaggacggcgagaaggcggcgcgcgaggtcaagctgctgctgctcggtgctggtgaatctggtaaaagtacaattgtgaagcagatgaaaattatccatgaagctggttattcagaagaggagtgtaaacaatacaaagcagtggtctacagtaacaccatccagtcaattattgctatcattagggctatggggaggttgaagatagactntggtgactcagcccgggcggatgatgcacgccaactctttgtgctagctggagctgctgaa

SEQ ID NO: 13749 - DNA, 606 bp, Homo Sapiens
  misc_feature (71)..(98): n is a, c, g, or t
ccacgcgtccgcccacgcgtccgggcctgaggagcgcggaccccggcgctcggctcccggcgccatgtgannnnnnnnnnnnnnnnnnnnnnnnnnnncgctccccgccggagatgaggaaactgaggctcagagaggtcacatggcttgctcgaggccccccagccagtgtgaacccacatccctgcccccagggccacctgcaggacgccgacacctacccctcagcagacgccggagagaaatgagtagcaacaaagagcagcggtcagcagtgtacgtgatccgtctttgccctcatcaccatcctcatcctctacagctccaacagtgccaatgaggtcttccattacggctccctgcggggccgtagccgccgacctgtcaacctcaagaagtggagcatcactgacggctatgtccccattctcggcaacaagacactgccctctcggtgccaccagtgtgtgattgtcagcagctccagccacctgctgggcaccaagctgggccctgagatcgagcgggctgagtgtacaatccgcatgaatgatgcacccaccactggctactcagctgatgtgggcaacaagaccacctaccgcg

SEQ ID NO: 13750 - DNA, 1103 bp, Homo Sapiens
ccacgcgtccgctgaaattgttggggcagtggctctatctccgagaatgcagctagatctcagaatgcatccccaacgttgcagcgtgcgcaggcccttcctcctgagggcacccaccttggtgaatgggattttctgtatccagttgtctctgctccagttgatgtggcagacacagggtcagacagaagcttgctggacatcgtccctcccctgaggccaaggccggacgaggggtctcttcagctgcacatcggggcaggtgaggggtgtcagccacgtcccggggaatagtagcctgcccacctcagcagaatggcgaactcgctttcccgtggcctttggcatctgtagcgtggatgccatggagtgtggcgcgtgacacctcaatgtggcacactgagactgtaaagaacagaagacaccagtactttaacccgcggctgagggctcatcgctttgaatacgccggggtgtgcagagcacaggtcagctattgtgtaggagagacactgagccgcatctgcagcctgttgttctggggtcgccttggttacagccacctctgtcacaatgtgcagtgtgtcggagtctccttccagaggagcactcgcccacagccagggcccccaccgagggccgctcttttcaccagggtttctgaacaggccacatgggagcccggaacgcaggaagggcaacacctcatcccaactcaccacactgggccccggggagccaggggctgggcggtctcaactttgagctccactgccggaagctctgctgccttggggcgtcctgtcgaagatgctccctgcctcccaccctcccttcctgcgccatgtcatttgttgggggctctgacagcggagcccactcacgtctggggcagccttgggtactgcgtgctgccctggtgcggctcaaacactggacggtggccttcatccctttaggcctggcttagcctcttgcaggtctgagcccaggtgcaggagaattcggggagactgtggggcatgactggaatggggtgagttctgacctgttgctgggatgaccatttacacagcttgagacataaatgcagtccctcaccc

SEQ ID NO: 13751 - DNA, 794 bp, Homo Sapiens
aagagagccttgtccccagtggggagaatctagcatctgagacgaaaacggaatctgccaagacggaaggtcctagcccagccttattggaggagacgccccttgagcccgctgtggggcctaaagctgcctgccctctggactcagagagtgcagaaggggttgtccccccggcttctggaggtggcagagtgcagaactcaccccctgtcgggaggaaaacgctgcctcttaccacggccccggaggcaggggaggtaaccccatcggatagcggggggcaagaggactctccagccaaagggctctccgtaaggctggagtttgactattctgaggacaagagtagttgggacaaccagcaggaaaacccccctcctaccaaaaagataggcaaaaagccagttgccaaaatgcccctgaggaggccaaagatgaaaaagacacccgagaaacttgacaacactcctgcctcacctcccagatcccctgctgaacccaatgacatccccattgctaaaggtacttacacctttgatattgacaagtgggatgaccccaattttaaccctttttcttccacctcaaaaatgcaggagtctcccaaactgccccaacaatcatacaactttgacccagacacctgtgatgagtccgttgacccctttaagacatcctctaagacccccagctcaccttctaaatccccagcctcctttgagatcccagccagtgctatggaagccaatgcagtgggacggggatgggctaaacaagcccgccaagaaggagga

SEQ ID NO: 13752 - DNA, 126 bp, Homo Sapiens
gtaagggaaaatcaatatgtacattctgaaatcattttctctgtaaatggttggatttcatttcacccttaaagggatgcttaaaggagaagataatattaataataaaaacagctacaaagtttg

SEQ ID NO: 13753 - DNA, 1031 bp, Homo Sapiens
  misc_feature (788)..(788): n is a, c, g, or t
gggcacgatgtgaccttctacaagacgtggtaccgcagctcgaggggcgaggtgcagacctgctcagagcgccggcccatccgcaacctcacgttccaggaccttcacctgcaccatggaggccaccaggctgccaacaccagccacgacctggctcagcgccacgggctggagtcggcctccgaccaccatggcaacttctccatcaccatgcgcaacctgaccctgctggatagcggcctctacttgctgcctggtggttggagatcaggcaccaccactcggagcacagggtccatggtgccatggagctgcaggtgcagacaggcaaagatgcaccatccaactgtgtggtgtacccatcctcctcccaggagagtgaaaacatcacggctgcagccctggctacgggtgcctgcatcgtaggaatcctctgcctccccctcatcctgctcctggtctacaagcaaaggcaggcagcctccaaccgccgtgcccaggagctggtgcggatggacagcaacattcaagggattgaaaaccccggctttgaagcctcaccacctgcccaggggatacccgaggccaaaagtcaggcaccccctgtcctatgtggcccagcggcagccttctgagttctgggcggcatctgctttcggagcccagcacccccctgtctcctccaggccccggagacgtcttcttcccatccctggaccctgtccctgactctccaaactttgaggtcatctagcccagctgggggacagtgggctgttgtggctggntctggggcaggtgcatttgagccagggctggctctgtgagtggcctccttggcctcggccctggttccctccctcctgctctgggctcagatactgtgacatcccagaagcccagcccctcaacccctctggatgctacatggggatgctggacggctcagcccctgttccaaggattttgggtgctgagattctcccctagagacctgaaattcaccagctacggatgcacaaaccccggaa

SEQ ID NO: 13754 - DNA, 531 bp, Homo Sapiens
  misc_feature (474)..(475): n is a, c, g, or t
gggtaagaaaagagacatggccatttctaaactatataaggtgagtgtgtctattcccagcagatataaaggaaaaaggaaacttttttgattctcaccttcccagcctcacctagccatcttccagcctcaaatatagagatgttagtgcaaggtcctgggctctaggtgatcatttcataagtcctttacagataaagaaaaagtagtgtttgtatgtttgtttttaagtaaccccaaaacaaatttatattgtattcagcaaaattggaattcaggtgtttaattttagaacatgaagtgcctgctgttttaagcattgacttgtataaaaagaattgcatgtctccagtaagcttatgggttttctcatttttaggtatatggcttttaatcatgtaaagtgaaacattagttttgttgcattttattacaggttctttgttgcaataaagatgctgctgaaataaaaannaaactgcccgccaatacttgcgcaaagatcgacgatgtcacgcacaggtgtggacc

SEQ ID NO: 13755 - DNA, 415 bp, Homo Sapiens
acgggctgcggggagagccaggcctggagcagcccttctggatatcgtcggtggcagccctcctcaaacacagaccttgtggccacaggctcccacagctcctgtgtgcggctttggcagtgtggggaaggcttccggcagcttgaccttctctgtgacaatccccctggtgggttttatcaacagcctcaagttctccagctctggggacttcctggtggctggggtagggcaggagcacaggcttggccgatggtggagaatcaaagaggctcggaattctgtctgcatcatcccactccgcagggtccctgtacccccagctgctggttcctgacactcttatcctccttatttaagtccttcccaggctatgccccaccctctttgtattaaaagcctcctcttttgggca

SEQ ID NO: 13756 - DNA, 980 bp, Homo Sapiens
ggggcaggcggacggggcgcggcgggggacacggcggccgccgcggggctcgatcgggcaacggcggcgacggcggcagcgacggatcctcctcctcccttattcccttgctcctctttcttccttttcttttcctttccggccgggcctcgtccactttccctaacggcggcctcgatcctacgtaaaggcatgacttcctggcaccacagggaaaatcgggtgcaagcccagaaactatttccccaccaccacttgttgaaaaactgatttgaaggcatctccggggttgaacaaacggaaagtgccaggatttgatgcgtctctggtttcgctctggagaccattccctgctaagtatcaagacgaaaaaaactggaaactaatccgaaccatatttatttagagtcagaatggagcgatttgtagtaacagcaccacctgctcgaaaccgttctaagactgctttgtatgtgactcccctggatcgagtcactgagtttggaggtgagctgcatgaagatggaggaaaactcttctgcacttcttgcaatgtggttctgaatcatgttcgcaagtctgccattagtgaccacctcaagtcaaagactcataccaagaggaaggcagaattttgaagagcagaatggtgagaaagaagcagaaggcccctaactgcatctcttcagtgcaacaggactgcgcaaacagagaaagtcagtggtatccaggacttttgggaaaatgtggccgggaagccaacatcccacttgagaaggctgatcacccagcagtccgtgctttcctatctcgccatgtgaagaatggaggctccatacctaagtcagaccagctacggagggcatatcttcctgatggatatgagaatgagaatcaactcctcaactcacaagattgttgactaggaggttaccaccattgtgatcaagataaatgtggagtattaaagtaatgtgttg

SEQ ID NO: 13757 - DNA, 775 bp, Homo Sapiens
  misc_feature (536)..(539): n is a, c, g, or t
  misc_feature (542)..(693): n is a, c, g, or t
  misc_feature (696)..(698): n is a, c, g, or t
  misc_feature (700)..(706): n is a, c, g, or t
  misc_feature (711)..(730): n is a, c, g, or t
tagccagagaaggagaagctcccatccaaatcctactaggaagagagtgggctgcagatgaatctgtgactcatgtttccctgtttcaaagggatcctggggaaggaggggaacatgcttgcagtatctctccctgtctgtctgctcacataagcattccgtccatctgagctcatcgtgctactggtatgtgtatgtgcagttacacagttttctgtatcatagattctagtgtgtttatacaaggagacatctgtggtttccccaaccgttccaaaaggctatttcaaaggaaccagccaacgtatgagaaatgaatgtaacactgtggacattgacttcccgcataaggcaggtgaccccctgaactccagatgtctgcacagtatcttatgtgttgttttccgttgtgacgaatgtgattggaacatttggggagcacccagagggatttctcagtgggaagcattacactttgctaaatcatgtatttattcctgattaaaacaaacctaataaatatttaacccttggcnnnnaannnnnnnnnnnnnnnnnnnnnnnnnnnnnnnnnnnnnnnnnnnnnnnnnnnnnnnnnnnnnnnnnnnnnnnnnnnnnnnnnnnnnnnnnnnnnnnnnnnnnnnnnnnnnnnnnnnnnnnnnnnnnnnnnnnnnnnnnnnnnnnnnnnnnnnnaannnannnnnnnttttnnnnnnnnnnnnnnnnnnnnaaaaaaatttttataaaaatttttttttgggggggggcgcccccc

SEQ ID NO: 13758 - DNA, 599 bp, Homo Sapiens
ggaagcatggtatcaacgcagagtggccatacggccggggaaaggccagcggcgcaaaatggcggcggcgatgaccttctgccggctgctgaaccggtgtggcgaggcggcgcggagcctgcccctgggcgccaggtgtttcggggtgcgggtctcgccgaccggggagaaggtcacgcacactggccaggtttatgatgataaagactacaggagaattcggtttgtaggtcgtcagaaagaggtgaatgaaaactttgccattgatttgatagcagagcagcccgtgagcgaggtggagactcgggtgatagcgtgcgatggcggcgggggagctcttggccacccaaaagtgtatataaacttggacaaagaaacaaaaaccggcacatgcggttactgtgggctccagttcagacagcaccaccactagagcgtgtggcacgccgggggtcccgcagcatcctgtgagcatttccgcggggaagctgagcacgtgaagctcgctggttctgtgcgaagggtattcctggtgctgaataaagggtgttgctgtcaaggccaaaaccctttacatgaaccccaaaaaaataacttgt

SEQ ID NO: 13759 - DNA, 987 bp, Homo Sapiens
  misc_feature (25)..(25): n is a, c, g, or t
  misc_feature (48)..(48): n is a, c, g, or t
atttcatataaggttcatatttganatatattggatagataagggacngttagatgttcaaagacaacctttcagttcatgaagacaaaaaccgagttccctatgtaaaggggtgcacagagcgtttgtatgtagtccagatgaagttatggataccatagatgaaggaaaatccaacagacatgtagcagttacaaatatgaatgaacatagctctaggagtcacagtatatttcttattaatgtcaaacaagagaacacacaaacggaacaaaagctgagtggaaaactttatctggttgatttagctggtagtgaaaaggttagtaaaactggagctgaaggtgctgtgctggatgaagctaaaaacatcaacaagtcactttctgctcttggaaatgttatttctgctttggctgagggtagtacatatgttccatatcgagatagtaaaatgacaagaatccttcaagattcattaggtggcaactgtagaaccactattgtaatttgctgctctccatcatcatacaatgagtctgaaacaaaatctacactcttatttggccaaagggccaaaacaattaagaacacagtttgtgtcaatgtggagttaactgcagaacagtacccaccagaaaaccaggctaccccccgaaaaaaatgtcgggcccccctcggcccctcaacacccctttccaaaacattcggtttgggcgcgcgggcccccagtagggaaaggggaacagggccctaccctgttctccctagggaaaccccggggccggggttaaggggtcggggttttgcgaaaaaaccaaaaacccccaccggggggaacccgaagatgtttgggccaaattcccccccggtaattttttgggcgccctgtaccggggcccctttttaaaatggaaggtccccgaggcacgattcatgaccgccggagtggcaggccccccgccctgttgtcccagcccccccaga

SEQ ID NO: 13760 - DNA, 973 bp, Homo Sapiens
  misc_feature (539)..(552): n is a, c, g, or t
aaagatataaaagcggccatcccctcggggtactacccgctgatacattactatttggaaaacaaaaagggttggaccaaacacgcaatctggccaggtataacccctcgctggtgatccttcccccaacaactttatctaacccgcatccgaagctgcttctcgaacctgaccccacccgcaaccgtgtgtaattcgtatccataagtataatctactatgtactcaaccgctttacccatttgattactcagagtactctgaaactataatgacaccagttatacctatggaagatgttactgacatcagaatctaatatttacattagatgagattaagttaaattacaagtcacaaagagtttgtaaccaaacatttatagccatgattccacagatgtggtgagtaaaccaacagccattcctaaataaaatacaagaatttccatcaagccatagtttacaggcttggtaagaaacggtctctttaggggccagatgcttaagaaatattccaccaaccatgaaatcttggcnnnnnnnnnnnnnnacacaatgtttggttatttagccacactagtgataaaacatattcatattctaactgcaagtggaataaacattgcaacaaaatgcaacccatcaaaatcattagtaataactattactccctcttagcagtaagaaccattattcttggatttcaaacattttattttctgtgcatagcttatagcactgtattataggaatcagagtgtataagcaaaaaatgaaaaataaaacttcttggagaccatttccattatttatgattaaatcaatgaaactatacatttccacattaaatacaattagtagaagaattcctccaagtagtattgcatataagctacactttacccgacgcgtggtcacatatcccgggattccggaccgtaccacctgcttttgaccacttgttctatatc

SEQ ID NO: 13761 - DNA, 420 bp, Homo Sapiens
aatgtcaagaatggggaactaatggtattaagttttatatagaagggcatgagggaagtgtattaaaatttgttcaaatttatgactgagagggctaagaaggtacttaatttcctcagatgatactttgcgaacatgtggtctatttggttgacctttgcaaatagttgaacaaccacaccgtgtattcccataccccctagactgcctgtccaggccaagccttagtaccacgagtccacagtgaagtccactccaggttatctgcataggtagcccaggcacctttcctcttttcctttaggtgcctcccctctacccacaacctcttatttcatctcaaacacagctattacaacatgttttaatttcactggaaaattctgtaaagaactaaatctgggttcccttgaagaaaac

SEQ ID NO: 13762 - DNA, 754 bp, Homo Sapiens
  misc_feature (201)..(245): n is a, c, g, or t
ctgttttagaatatcactggcctaatttatttaggtgtgtacatgttgctcatacatacacacacatataggattacaaatgtggaaaatgttataatgtcatattctagcattggactaaatatcaatttctgactcttaaagtagttctgtgtataaattcaacatgatgaatcaaggcaataatttctcaaatgttcnnnnnnnnnnnnnnnnnnnnnnnnnnnnnnnnnnnnnnnnnnnnnctagtacgcaaatagtgtaaaattgttttaatgcctggactttgaaacaagtaacaagtgtttgaaagtatataatctacgagcgaatttgccctccttggactaaccacatacaaatatgaatctggctgcaagaacaggatatccaggtaactagagagtgggcattgataaaaatatctggtggagaagcctaggatttcaactttttgtcagaggattcctgttgggacagctttaccagaaaagaataatagcggatatgttcatccaaactaagaactttcatgcatcttgcattgttacatagcctgtggaatgaattcattttttctcccttgagtccaggaatgacttccctggaaaaactcaatctatatacagctgtgccaaaatgaaggatacctgcctctccgaaactttcactgctgcttctgtcattgttcacttgtcagataaaattttattatctcaggatgcaaatttaaaataaagtgtaaatctatgtt

SEQ ID NO: 13763 - DNA, 621 bp, Homo Sapiens
taaatgaaatttaggtatttatccgtctcaaagtaccattatggtttccatatggtaattacattggaaagttctgcaataagattctagttctctcttttctttaagcttatggttgaaggttaaccttgtttgtgcagattaccaaattactgctgatgtagtatgataaagtcagcttcttggatacagacacacccagggcagctgccaatcagaaatgcaaattgctaaattccaaacagaaccagtgactttgctgctacatatttactaaattgaccactttgattcttgcttgtttgtctcagttatagggagttttgtacatggtgcctcttgttttccatcttcatggccttttctgttgagaaacatctaaagtgtattaacagtgcatgcttttactttgtaaatgtggtgccaaatccctgtttgccatcgtttttactgtaccgatgttaactgtagtaatccttagccagtatgttcttttgctgaaactgttgcattttgggacttttttccactttgtcatgtgtacatttttaatctgttatagttggcggcagtattaaaatggtgagtaaagagcccaggtttgctcctgtttgtaactag

SEQ ID NO: 13764 - DNA, 709 bp, Homo Sapiens
acaagatttaggtttgctcttctgcctctcactaactgtttgagcttgattacttttgtaaacttcaaatgcagacttctggttatcatcttcatggaaattcactttattcaaatgagaattcagagttccctgatattcttctgggtttttgtttaagtgtattcttggtttgaagccatgagttaaaaagtcacaagtatctgtgtatataaattgtaaaaggtattcaaacatgtcaggatgaaccttctctaccacaaagagatggcaccctgcagaatcttcatctttctggtaaatatctgtaaattctgaagtattaccatctgaaagaaacaatttctgaaaaaaatcagaatgcactgccaaaatatatttatgtgcagggaagagtctattgccaacttgaaatgtcacatcatgaatgctgtccatttcatctgcttccctcaacagtttgccaaactcttcaaaaaaggatgatgaggacacagctggaatttcataaaggcttgttttaggatctgactgcaggattgcaaagttgcatccacttggatctgtgctgacactaacagctctatgtgcaaaggtaagtttctcaagtcgaattctttcatacacactatttatatcagagacataagacacatctgatgaggaattgtgaaggtttgataaaatctctttcttttcggacgcgtgg

SEQ ID NO: 13765 - DNA, 715 bp, Homo Sapiens
  misc_feature (293)..(348): n is a, c, g, or t
ccacgcgtccggctgggacgggggaaaggagacgcttcttcctcttgctgctcttctcgttcccgagatcagcggcggcggtgaccgcgagtgggtcggcaccgtctccggctccgggtgcgaacaatgctgactgatagcggaggcggcggcacctcctttgaggaggacctggactctgtggctccgcgatccgccccagctggggcctcggagccgcctccgccgggaggggtcggtctggggatccgcaccgtgaggctctttggggaggccgggccagcgtcgggagnnnnnnnnnnnnnnnnnnnnnnnnnnnnnnnnnnnnnnnnnnnnnnnnnnnnnnnnctggatttcaagttggcggctgccgtgctgaggaccgggggtggaggtggtgcctctggcagtgacgaggacgaagtgtccgaggttgaatcatttattttggaccaagaagatctggataacccagtgcttaaaacaacatcagagatattcttatcaagtactgcagaaggagcagacttacgcactgtggatccagagacacaggcacgactagaagcattgctagaagcagcaggaattggcaaattgtcaactgctgatggtaaagcttttgcagatcctgaggtactccggagactgacatcctcagttagttgtgcactggatgaagctgctgctgcactgacacggatgaaagcagaaa

SEQ ID NO: 13766 - DNA, 748 bp, Homo Sapiens
ctgttgtgtatacaattgtgatgtgcatgtcaattcccatctttcttaggtaatgtgcgatagttcagtcttcattgtccttggagaataagatgcatcatgtaaggtggcagtctgctaagattgctactttaaggaagaggtgctgttgcaaaagaaacgttgaagttaaaaacaactaatgatcaattgattgggcttggacacagaccctagcacttgagtaccttacactttttaacttgcactccagctttgatcaagcttttcctgtcattgtatagccaggaaatcataattctcttggcttcgctcttggttgacatttgggaaatggctgccctttagaacttggctctgatctcttcggtatttgcctgatgtcttgagactccattcttctgagctcctggtgtcttagattctccctgaagttaagaacactatcaatcctccaaacctccaatcctcttatactatgacaactcataatgtactaaattcaaatgaaaatcttaggcaagtccctttagggtctcctactcttcatatgaaactgcatttttatcagtataacaaatataattttcaaaagtcacataaattctactagtttgaaagtaaaaggggtacaaatgctttgcatcatgtttctagggtttcttaggaattttatatgaaaagcactttttacttcctggccagccaagaactccaactgatttcagctgctgctatttggtgtgtg

SEQ ID NO: 13767 - DNA, 555 bp, Homo Sapiens
ccacgcgtccgcccacgcgtgcgtggactcgtgggtgggtccgcagggggtggctctggagctgacccgggaagtcggcgtctccttcgccttctgcctttatgcggcctactagcaggatagtgcaggggaaactcaatggagaggaagatatatatcccacttaaataaaacagctccctgtgtccgcctgctcaacaccactcatcagattggctgccaggcttaaattaggggagacacaggggttatccacgaagaagacaaagaggaggacctacagggggtattgactgatggccacaaccccccttacatgagtctgctggagagcaagcattttaccagggatttaatggagaagctgaaagggagaaccagccgaattgctggtcttgcagtgtccttgaccaagcccagtcctgcctcaggcttctctcctagtgtacagtgcccaaatgatgggtttggtgtttactccaattcctatgggccagagtttgctcactgcagagaaatacagtggaattcgctgggcaatggtttggcttatga

SEQ ID NO: 13768 - DNA, 1116 bp, Homo Sapiens
  misc_feature (76)..(319): n is a, c, g, or t
  misc_feature (328)..(340): n is a, c, g, or t
  misc_feature (537)..(654): n is a, c, g, or t
  misc_feature (765)..(774): n is a, c, g, or t
  misc_feature (800)..(808): n is a, c, g, or t
  misc_feature (880)..(888): n is a, c, g, or t
  misc_feature (971)..(979): n is a, c, g, or t
  misc_feature (1032)..(1051): n is a, c, g, or t
agttctcactgttccctctgctcctggagcctttgaataaaaatgcacgtagctgaggccggatgcggtggctcannnnnnnnnnnnnnnnnnnnnnnnnnnnnnnnnnnnnnnnnnnnnnnnnnnnnnnnnnnnnnnnnnnnnnnnnnnnnnnnnnnnnnnnnnnnnnnnnnnnnnnnnnnnnnnnnnnnnnnnnnnnnnnnnnnnnnnnnnnnnnnnnnnnnnnnnnnnnnnnnnnnnnnnnnnnnnnnnnnnnnnnnnnnnnnnnnnnnnnnnnnnnnnnnnnnnnnnnnnnnnnnnnnnnnnnnnnnnnnnnnnntccgtctcnnnnnnnnnnnnntgcacatagctatcgagtgtgctttagcttgaaaaggtgaccttgcaacttcatgtcaacttctggctcctcaaacagtaggttggcagtaaggcagggtcccatttctcactgagaagattgtgaatatttccatatggattttctattgttactctggttctttgttttaaaataaaaattctgaatgtacacgnnnnnnnnnnnnnnnnnnnnnnnnnnnnnnnnnnnnnnnnnnnnnnnnnnnnnnnnnnnnnnnnnnnnnnnnnnnnnnnnnnnnnnnnnnnnnnnnnnnnnnnnnnnnnnnnnnnnnntttttaaaacaattacttttgccccgagaaccccttaaggaaaaagaactgggcaaaaaggggttcccaagaaaattcggggcccagaacaagggcctggaaattaaaccnnnnnnnnnnccccggggcggaaaccgacccctttnnnnnnnnncccggggggaaatccggagggccttaaaaggaattcttataaaaaagaggggccaggggaaacctccaaatnnnnnnnnncccgcccgccccagagaacacctctctccaaaaaaatgggtcgacaattcctttaaagccttttttgcgccaactggggaaannnnnnnnnaaaaaagggggaatgcggaaaccccttgaaatgggttaggggggcccttccgnnnnnnnnnnnnnnnnnnnntttagggggaagaagaggaatttctccgccccactgggaggagaaacacccgcgcgcgcggaaag

SEQ ID NO: 13769 - DNA, 934 bp, Homo Sapiens
catttcaacaatgacacgtgtgcttcctatcctggatatcttttaaaggccaatgtaattaataaacaggaacatgatattattaaacaaaaaacacagataccattacaagcgagagaagcgatgataccatttcggttaaagggaaatgctgcggccaacatcttcaaaaactgtctaaaagaaattgactctacattgtataagaacttatttgtggataagaatatgaagtatattccaacagaagatgtttcaggtctgtcactggaagaacaattgaggaggttgcaagaagaacgaacttgtaaagtgtgtatggacaaagaagtttctgttgtatttattccttgtggtcatctggtagtatgccaggaatgtgccccttctctaagaaaatgccctatttgcaggggtataatcaagggtactgttcgtacatttctctcttaaagaaaaatagtctatattttaacctgcataaaaaggtctttaaaatattgttgaacacttgaagccatctaaagtaaaaagggaattatgagtttttcaattagtaacattcatgttctagtctgctttggtactaataatcttgtttctgaaaagatggtatcatatatttaatcttaatctgtttatttacaagggaagatttatgtttggtgaactatattagtatgtatgtgtacctaagggagtagtgtcactgcttgttatgcatcatttcaggagttactggatttgttgttctttcagaaagctttgaatactaaattatagtgtagaaaagaactggaaaccaggaactctggagttcatcagagttatggtgccgaattgtctttggtgcttttcacttgtgttttaaaataaggatttttctcttatttctccccctagtttgtgagaaacatctcaataaagtgcttta

SEQ ID NO: 13770 - DNA, 657 bp, Homo Sapiens
tttttgacaggtagtgatagcattcatattcttggtatgaagagtctgaacatagtcatccagtccacagaaggtggtgaggagtatctcccagtatcccatacttgttttaatcttctggatcttcctaaatatacagaaaaagaaactctacgctctaaactgatccaagctattgatcacaatgaaggcttcagtttaatataactttggagttataactattcagtttagtgcaaaagcattaaactatttgtgtttttcttgtggtgatgaattcagcaaggtgacagaggtactattataattcttacttgcagaatgttcaatctacgagtgttcatggaagccaaaaaatattaaaggaaaatgaacaaactgttaatattattgtacagaaccatggattttttttgaccatcttctaataaacatagcaagtattatgaatacattaaagttttactaacatgaattttaagagtttgcatatttcagaaatgatctggtgtgagtgcatggaaatattgcttaatttttcttcaatcattgagtgaaaaacctttaactttggcctgcaatagtcatttgattattttttcattttgtaaataatgttaagttttgtaataaaatagttatgttctgataccaaaa

SEQ ID NO: 13771 - DNA, 744 bp, Homo Sapiens
ggaaatagagctgatgattataatatttttttcctaatgttaacatttttaaaaatacatatttgggactcttattatcaaggttctacctatgttaatttacaattcatgtttcaagacatttgccaaatgtattaccgatgcctctgaaaagggggtcactgggtctcatagactgatatgaagtcgacatatttatagtgcttagagaccaaactaatggaaggcagactatttacagcttagtatatgtgtacttaagtctatgtgaacagagaaatgcctcccgtagtgtttgaaagcgttaagctgataatgtaattaacaactgctgagagatcaaagattcaacttgccatacacctcaaattcggagaaacagttaatttgggcaaatctacagttctgtttttgctactctattgtcattcctgtttaatactcactgtacttgtatttgagacaaataggtgatactgaattttatactgttttctacttttccattaaaacattggcacctcaatgataaagaaatttaaggtataaaattaaatgtaaaaattaatttcagcttcatttcgtatttcgaagcaatctagactgttgtgatgagtgtatgtctgaacctgtaattcttaaaagacttcttaatcttctagaagaaaaatctccgaagagctctctctagaagtccaaaatggctagccattatgcttcttggcaaggacatgataatgggac

SEQ ID NO: 13772 - DNA, 1004 bp, Homo Sapiens
  misc_feature (386)..(386): n is a, c, g, or t
  misc_feature (388)..(389): n is a, c, g, or t
  misc_feature (419)..(419): n is a, c, g, or t
aagacaggcgcagcgcgccgcactacaatccatgagttataacttggacattcctgggagatgacgactaattttagtataattacactggcgcgctccgtatatctggtgggggagcatagagggtgaaattatgaggtctcggccgggaacgaaggaactcccaacaaattctcgtaggcttcgtcgacaatttggctcgtcagacacgcttggctcgccgtggcacccgacccccgcgcactatatttttgtatatcaggtggggggaattctcccaagtgtcataggtggttatcgggccaaggaatttccccttaggggaaaccagaccttcgctgccgatggttcagcctttccctgcgcgggggccccccggccggccngnngggccctttgttttgagaaaaggtttctcnggcagggccgcgaagggcgggacggaccagggggactatggtaatgagggggcaaaagagggtttcggccccatacccggaaaggagaggattttcctatttgttcctgcccttaccagaagttctttcttgggaattaagttcaattatccatggttagggggtcacatgtttttgccaagaggacatttgtgaactaattctgtcaaacagggggatctggatttgtcctctcccacaattagaccttgggtgaaacatgaaaccggctttgagctctcctccctgcctttcctgggctgccaaaccccaagccaaggttgccactcctctgcttttctggagtaaaacctcaggccccgtgatgatcctggctctcacaccattgacagcctcaaaaatgaggggaaacacacttgttttagagggaacgggagagacacatgaagaagggtcaagtacaaacccaaaggaagtgaaccttgaacttcagctccaacatgaagctctcagggcagcccgtgttctatcccccagagtctaatgctcattactggtaactgctgccaccaccatgaaagagtg

SEQ ID NO: 13773 - DNA, 699 bp, Homo Sapiens
ccacgcgtccgctgtattctgcggtcagaatgagagagtcaagctgggcagaatctctcgccaagagttcaggtaaggtaatgtttattcactgggaatgctttccacagccagacagctatgctaacagtctcaagttttcttccagtttgtttagatttaaatgatacatttgtaactttttaaaaactaaattttggttggatttttcatgaaaacctcttttttctttatcccctaaaaaatggtttgaaatgtcattgttatttaaaaacccgatgtgttggaacttctttaatctgctgtttcctctttttccccccctttgaaagtttcgcatagtgtaaacattcactatgtcttttaccttccctgctcctcccatctgggaggcgctgatgctattacccagtgctgaaaaatggcactctaaaggtatgggaaggaaggagcccaaggcaaccacctgctgtcctttcagccttcctttggagactgctccatcagtgccgaggtgtgtgggaacaggcttcactgcaccgccatcttactgagttgcttcacgtgaggaaaagggggctttggccctgtgactcagttccacattttggattgcatactggaaaagaagccaatcttcttgctagtaaaccagcacccgtctgtatacagtgtgacccagcatggatataacctaga

SEQ ID NO: 13774 - DNA, 425 bp, Homo Sapiens
cagccttacaagagatccttaagggtgttctaaacatggaaatgtaagaacaatacccactaccacaaaaacacacataagtacatggcccacagattctgtaaaggcactatacaaatagaaactataatgcaaccaagtaacaacttcatgataggctcaaaatgctatatatcaatattaactttgaatataaactgactaaacctcacacttttaaagggcatagaattgtaagttggattaaggaaagaaaaacaagacctatctctctgctgttttcaggagacccatctcacatgtgattacacaagtaggctcaaagtaaagggttggagaaagatctatcactcaaatggaaaacaaacaagagcaggggtcactatttttatatcagataaaacagactttaagccaacaacaat

SEQ ID NO: 13775 - DNA, 383 bp, Homo Sapiens
gggatatcgtcgacccacgcgtccgggtgaacactgcttgtgtgtgtgcactaatacttatgtaaaataaattcagaaaacaaaacaactatttactaaaaactccatctcattactaaaaccattataacaaaagtcagggtaacaaaagaatttgagttggaatttatcattacactggaactgctagtccttaatgtcatgtgaaatgctgtagatccataatgagccaattggaaaatatgttgacttctaaaatttgctttcttaaaggagtttaaaacctagaacattcatcttctgagggtttttcttaggaatatattatatgacttgaaggcaacttaaaacttcatatattggccaggtgtggtggctcacac

SEQ ID NO: 13776 - DNA, 1205 bp, Homo Sapiens
atagtcaaacatcaacctctatctttgccagtcccacctctccacctgtcctaggggagtctgtcctgcaagataacagctttgacctgaataatggtagtgacgctgaacaggaagaaatggaaactcaatcttcagacttcccaccatccctgacccagccagctcctgagtcagtcatccactattcagctacatccagcaacctcaccagcagtctcgccaacaacctccccagcagtctccctagtggtttctccagcagcctccccagaaatctctccagaagtttgtcccgcagcttctacagttgtctctccagcagtcttctcagtggtctctccagcttcctcagcagtcctcccagcagtctccttagaagtcccgttgacggcttcagtgacatccccaaaagcctctcccgtaacttccccagcagctgcctttccaacagcctccccagcaaataaggatgtcagcagctttctagaaaccactgctgacgtggaagagatcactggagaaggactcactgcttctggtagtggtgatgtcatgaggagacgtattgctaccccagaagaagttcgtcttcccctccaacatgggtggcggagagaggtgcgcatcaagaagggcagccaccgatggcagggggagacctggtattatggcccctgtgggaagaggatgaagcaatttccagaagtgattaagtacctgagccgcaacgtggtacacagtgtccgccgagagcacttcagcttcagtccccgtatgcctgttggagatttctttgaagaaagagacacgccagagggcttgcagtgggtgcagctctcagcagtagtgagatcccgtcgaggattcaggcaatcactggcaaacggggtcgacctcgaaacactgagaaggctaagactaaggaagtccccaaggtgaaacggggtcgaggtcggcaacctaaggtcaaaatcactgagctattgaacaagacagacaaccgccccctaaagaaactggaggcccaagaaacattgaatgaggaggataaagcaaagattgctaaaagcaagaagaagatgaggcagaaggttcaacggggagagtgtcagactactatccaagggcaggccagaaataagcggaaacaagagaccaagagcttaaagcagaaggaagctaagaagaaatccaaggctgag

SEQ ID NO: 13777 - DNA, 487 bp, Homo Sapiens
tagtcccagtgttgtccccgcagctgtggtatcagcagctcacatccagacaagtcctcaggctaaggtcttgttgcacatgacggggcaaatgacagtcaaccaggcccgcaatgctgtgaggacagttgcagcgcacaaccaggaacgccccacggcagcagtgacacccatccaggtacagaatcccgccggcctcagccctgcatctgtgggcctgtcccatcactcgctggcctccccacaacctgcgcctctgatgccaggctcagccacgcacactgctgccatcagtatcagtcgagccagtgcccctctggcctgtgcagcagctgctccactgacttccccaagcatcaccagtgcttctctggaggctgagcccagtggccggatagtgaccgttctccctggactccccacatctcctgacagtgcttcatcagcttgtgggaacagttcagcaaccaaaccagacaaggatagc

SEQ ID NO: 13778 - DNA, 782 bp, Homo Sapiens
caagtatttcccctccacccagccactaacttgggagaagcctccacattcagaagtggaaagttgaattgcacattttaaggcatttagcccagatcctgcacacttaatatcaagcctgtccattgcttacagcttctctaactttgactgttacctgtctttttttccaaataagctgtgggaaaacatgctgtatactggttattgtaagtgtttttcactgggtttaatctgaccgagcaatgttctggttttgagaagcaggtagaagagtactaccaccccacccctttttcattttctttctcatcaaacacatatccaatgcctttccctttgggaattgctaggatttatctgaactgagtggatttttcttctttcctggattcatggaaaagatgtcacttttgagcttgtgtctttgctgataacactaaatatgatgatgcttatcaaaatcatatagaaattcctggaaagaaataatggcaataataatcgtataagtagaagctggaagggaaaaaaagatggtcatccaggaacctagaatggcactttatataattttaatgaagtcaacagtgtatatatagactaaggcgacaaggagataaaacgtgtaaagcagtgtgtgtgttttaaaggctggtcaagaacgtgagttagaagacaatgctatgtacatttaataaaaagcaaaggagaaggaggcagttgaagaaaaataaatgtacaaagagagaaacaagtatctgaaatacaaccttccagat

SEQ ID NO: 13779 - DNA, 766 bp, Homo Sapiens
ccacgcgtccgctcagagaggagcccagcggccgtgcagatgggaaggcagctgctcagaaaacagggcgtctttatttgttcccgactttcctaggcaacaaattaccagaggccgccgactcgtttggggaaattgcttctgggaacagtgttatttttacctccgtcttgcaatcctctcacccacctggcaccccaccgcccagcgcacgcaagccaagtcccggagctgccatgctcgtctgtgaggaaacgctggagctgggtgcccagggctgctgggggtccacgagcccccggggccaggccgtgagcttggtcggtgggcccacggccggaggctccaggctggtgaggaccctgggcagcaggagcccccattgccttctgggatctgggctgatgctgcaacgctggcccggtggccccaggtggccttacggcctcaaggacaagtgggtgccagagcccaggtctccctggaggtcccagttacagaggagtcgccgagaccaacggcagggccttcacccacaccccgtgcaggcatttgttcacaggtccccctgctagtcctgataaagggcgacgtgtgtgcacacgcgtgcacggtgtgtgagtaaagtggcagaaagagtgtcatgaggcggtgacgctaccgtccccacagccagcctcatctcactgacgcctccctgtacgcattgctaaaagataacagctgtgatttcttcaaaaattagcaataaaattcctgtttgatc

SEQ ID NO: 13780 - DNA, 734 bp, Homo Sapiens
  misc_feature (568)..(581): n is a, c, g, or t
ttgatttgaatgattaagagagaacttaagtcacccttgttaaaactgcacttaaacgttgggacaagctggaacatttatcttccactcatcttagactccattatcaccaagcgaaaatttgaattggtgacttatagaatgatctgacggaaaaaattcacctccaggattggatggaagcatgaagaaaataatgcctcatttatctaaatgattaaatgaatttgctagaaatgatcactataccttttttcaattcacaaaatgtcttacttaggccagcccacagttccaacacattatcttctggcagacaccctgtgaagctgtcccacattactttctactgcaataccctgggacaaagtgtcataaaagtaacaagtgtcaagtctccttgtcttttatgtaggtcttttaaaaatgaggcacagcgccttttccttcactttgaagagcacagcaacagtatttccaaaatgaatctgctctcaacaggccctccccgccccaaattaaaatgttaaagagtacaacaaaatcatcataatattctttgaacttnnnnnnnnnnnnnnccaactatttcaaggcacattaaatttaatatcaagagtgcaatacaaaaggcccaaatacaatgaaggaacacattcccccattaacaccaacgacaaagctcttttaaacatgtgcctgttgaatggaacggggatttcataaaattcact

SEQ ID NO: 13781 - DNA, 618 bp, Homo Sapiens
ccacgcgtccggctcgagcgcgggcagcgcggagctgaccattgagatctgctcggaggcggggcttccggccgaggtgtacatccaggaccacggtgatggcacgcacaccattacctacattcccctctgccccggggcatacaccgtcaccatcaagtacggcggccagcccgtgcccaacttccccagcaagctgcaggtggaacctgcggtggacacttccggtgtccagtgctatgggcctggtattgagggccagggtgtcttccgtgaggccaccactgagttcagtgtggacgcccgggctctgacacagaccggagggccgcacgtcaaggcccgtgtggccaacccctcaggcaacctgacggagacctacgttcaggaccgtggcgatggcatgtacaaagtggagtacacgccttacgaggagggactgcactccgtggacgtgacctatgacggcagtcccgtgcccagcagccccttccaggtgcccgtgaccgagggctgcgacccctcccgggtgcgtgtccacgggccaggcatccaaagtggcaccaccaacaagcccaacaagttcactgtggagaccaggggagctggcacgggcgg

SEQ ID NO: 13782 - DNA, 437 bp, Homo Sapiens
agaaatcaatgacagttgacaggaagagaggacgcatacaacaggcaaaagaggaatgcccagcagtcttggtccttgcggtgcaatactggccttgaggccaagtcagcaggggattcgtagtcactaacttctaactgaggcagggaagtaccatgttctggaaaaggtccaaagaaacaggaatagaggcagtgtagcaagaggcagatttttggtgccaaatagatttgaatcctggttctgcttcttcctttgtagagtatgatattggttctttcctcccaaagctattataaagactaaatatgtacaaatctttgggatgtctgacatataaatgcttaacaataggtatttgctggtattattacaaatgaatttgcttatttttgagccacttctatgtctgtccattaaaccaaaatgtgttctgc

SEQ ID NO: 13783 - DNA, 897 bp, Homo Sapiens
  misc_feature (48)..(56): n is a, c, g, or t
gactctagagatccccctgatatgtctggttacttttttatttgaagnnnnnnnnngtatgttttaataaatactgcggaaacattgaccaaacaaacatacacagtgacttcaatagttaccaaaaatacaaagcaaaaggactattattttgggttgaagctccaaaactgacagcatctgataatctgttggtttatttcacttttcattaaatgaacattgatgagagaagatgccacttacccaagctttagagaatccctagtggaagattatatgataaactttcagtcctgacataacactagggcatttctagagtgtcattgctaaaacctcactgaacagacgcagccaaggtctgtgttcagcacttggtctctgttgttacgtaaaataataagcatttaaaatagtttacagatatttttgacacagttccttttagagattctttcagagaagaaaccagatctgacctgtttattgttggcgcttgttgaaaacgagctttctttcccatgatagtgcttcgtttttgaagtgttgaagctgtgctccccttaaatcgtggcaggagagattaaggtaattacaacactcagttctatgtcttacaagcactttgtcttgtctctgcaagaaaattcgattccagtcatttcccataaaatacagacattttaccaacataatatgctttgattgatgcagcattatgctttgggcagtattacaaaatagctggcgagtgctttctgtatttaaatattgtaaaaagaaaataagttataactgttataaagcagaacttttgttgcattttttaaactgttgaagtcactgggtatgtttgtttgggcaatgtttcccgcagtatttattaaaacatac

SEQ ID NO: 13784 - DNA, 522 bp, Homo Sapiens
  misc_feature (136)..(136): n is a, c, g, or t
aattggtttacccaaatgtgccttggagtaaatcacattcacaagaaacgtgtgctacacagagatatcaagtccaagaatatcttcctcactcagaatggaaaagtgaaattgggagactttggatctgcccgtnttctctccaatccgatggcatttgcttgtacctatgtgggaactccttattatgtgcctccagaaatttgggaaaacctgccttataacaataaaagtgacatctggtccttgggttgcatcctgtatgaactctgtacccttaagcatccatttcaggcaaatagttggaaaaatcttatcctcaaagtatgtcaagggtgcatcagtccactgccgtctcattactcctatgaacttcagttcctagtcaagcagatgtttaaaaggaatccctcacatcgcccctcggctacaacgcttctctctcgaggcatcgtagctcggctagtccagaagtgcttaccccccgagatcatcatggaatatggtgaggaagtattagaa

SEQ ID NO: 13785 - DNA, 1144 bp, Homo Sapiens
  misc_feature (671)..(702): n is a, c, g, or t
ggggaaatgtgcttctactttgccagttatttcagacagcactaccaagaggaggtggtcagcacttgttattggcctatgaactaaaagcaaatcaaagctcataaatcaaagctcatcagttcccataaatgcagttgtcaaagaaaagatttggttgccatagtcataagcaatgatacatgaaaccaatgaaagacagtacatgtaataatattttcctcagtacaattttgctggccttaactggtatcaaacgctgtcattgagatgttttcaaagaacattgagttgtatttaatcagcgtgtactccatttgcattgaagcattaaaaattatttttcttaaaatctctttaaggccttcttgttgctgttagaatagtgctatatatcaggtatgtgaccatttatttcagaaggctgaacataagaggtttctactcagcaatacttagatgtctaactgtttaattgctacagagctttatagatatttagagaaaagacttaatcaattagtaaataaaattgcctatggcaggattctttcttgaattaatattaatcccttaattgattttttctgggattatacaaattccctttttatataaaagtatattggtttaaaacagtagctatagcccataacccaaaggaccgatgnnnnnnnnnnnnnnnnnnnnnnnnnnnnnnnnagttcttttttagctgtacctacgtacttatatcagcaccatgtatgtaggtgtgatagtactttcaaacagcgcctccaacctggcctactctgttatttccaacctgtttgggtagggccatttaacttccattatgccaaacttgggatgggattttcgaagcagacaacactatttcatcgtgtttcaaattggaaccttgaggctagttagtatcacactcaggccacactcagcacttgcccactcttgtttactgccttgtattctagttatttgtgtatttgtctccctcaactagattatacgctccttgtgggcagggactgtgtcttttttcatctttgtatctttcatgcacctagcataggctttgcacatagtagtcactcagtgtttgttaaataaagctattagtgtcattaaaattcaaaaaaaa

SEQ ID NO: 13786 - DNA, 904 bp, Homo Sapiens
ggggggatctcggactccctggaccctccctccagcccagcctcgctagctccgcctgcggtacgtgctcccgcctccgactcaaaatgcctgtctggggaggtggaaacaagtgtggggcctgtgggaggaccgtgtaccacgcagaagaggtgcagtgtgatggcaggagcttccaccgctgctgctttctctgcatggtttgcaggaaaaatttagatagcacaacagtggcaattcacgatgaagagatctactgcaaatcctgctacggaaagaagtatgggccaaaaggctacggttatggccagggcgctggcacgcttaacatggaccgtggcgagaggctgggcatcaaaccagagagtgttcagcctcacaggcctacaacaaatccaaacacttctaaatttgctcagaaatatggaggtgctgagaagtgttccagatgtggggattctgtatatgctgccgagaagataattggagctggaaagccctggcacaaaaactgtttccgatgtgcaaagtgtgggaagagtcttgaatcaacaactctgactgaaaaagaaggtgaaatctattgtaaaggatgctatgcaaagaactttgggcccaagggatttggctatggccaaggagcaggggctcttgttcatgcccagtaagatgtaaaccctgaactaaacatcacacactgagaatctcttcataatctagagcacagataatctttaacactaaaactactgtggaaattctaccagcattaagtactgtatatcgccctgtacttggataggccggctaactcgtaggaagagagcactgtatggtatctttttgctttatcaccagcatttgggggaccattctttttaccatttaaataaaacttcagttg

SEQ ID NO: 13787 - DNA, 845 bp, Homo Sapiens
ggggcagtgagttcgacacaccatgccgactgtcagcgtgaagcgtgatctgctcttccaagccctgggccgcacctacactgacgaagaatttgatgaactatgttttgaatttggtctggagcttgatgaaattacatctgagaaggaaataataagtaaagaacaaggtaatgtaaaggcagcaggagcctctgatgttgttctttacaaaattgacgtccctgccaatagatatgatctcctgtgtctggaaggattggttcgaggacttcaggtcttcaaagaaaggataaaggctccagtgtataaacgggtaatgcctgatggaaaaatccagaaattgattatcacagaagagacagctaagatacgtccttttgcggtagcagcagttctccgtaatataaagtttactaaagatcgatatgacagcttcattgaacttcaggagaaattacatcagaatatttgcaggaaaagagcactggttgccattggtacccatgatttggacactttgtcgggcccatttacttatactgcaaagcgtccttcagatatcaaattcaagcctctaaataagaccaaagagtatacagccctgtgaactgatgaacatatacaagactgacaatcacctgaaacattatttacatatcattgaaaacaaacccctgtatccagttatctatgatagccaatggtggtcgtccctttcaatgcctcccatcatcaatgggggatctttcccagaattaaccgtaaatactagaaattattttttattgaaatgccacggggaactggacctttactaagggcaaaaataaatccttggatat

SEQ ID NO: 13788 - DNA, 1338 bp, Homo Sapiens
  misc_feature (946)..(1096): n is a, c, g, or t
  misc_feature (1107)..(1123): n is a, c, g, or t
  misc_feature (1164)..(1227): n is a, c, g, or t
  misc_feature (1237)..(1245): n is a, c, g, or t
ggtacaaaattcaaactgtgaaggtttatgcttcattaattatgaccatactttttcattttctgacgatccctgatttccttatggactcaataagaatcttttatatcaagtaaaatgaaagttgatgatagaatatcaaatagtgaatttgatatgaaatctaagagtgtgagtcacttgcatatgtaatgctttgggtttttgcatattttcttaggtcacagtgacaggtttctgagttgtttcccttttcaagtctctgggaggccagtggcagcagcaggtctgtgtttcaccttcttcccatgtgagcttggaaaactttggcatcttaattagtcttgaatcatacacctgatccccaaacattgcctgctctcaatgaaacatgctttggaaatggaagggactcagaaagtcgaaatcccaagaactccaagccaaaagtgttaggttttagtgaaatttgtgtcaggtataagcatacctgtttgggccagaattattatcacagcctttctgacccaaactttcaaaagcaaataaacagcatataaaacgttaattatctttccattgtaattgtgatgatctactctgtatgggtaccaaaatcaccttctctcttcaagtcaaagttgaatttagaactttgaatacaggtcaaaaaatgtagaaaatatcattttatattccctaatctatatagctgaaaaagggttgtattttcttagctgaatatgaatacctcttaaacataaattagttcctctccagtgaagtatcttattttaccaatccatttcaggaaagaggttctgctgccgtaaaggcagaaattttatttttatcccttttatttgaatgagagatttgaaaatcgaattatgtaaatatttcaatgcatctgctattattttgtggagtttattaaactactttnnnnnnnnnnnnnnnnnnnnnnnnnnnnnnnnnnnnnnnnnnnnnnnnnnnnnnnnnnnnnnnnnnnnnnnnnnnnnnnnnnnnnnnnnnnnnnnnnnnnnnnnnnnnnnnnnnnnnnnnnnnnnnnnnnnnnnnnnnnnnnnnnnnnnnncttttgggcgnnnnnnnnnnnnnnnnnaaaaaattttttaaaacttttttttgggggggggggccccnnnnnnnnnnnnnnnnnnnnnnnnnnnnnnnnnnnnnnnnnnnnnnnnnnnnnnnnnnnnnnnntttctccccnnnnnnnnnccgcccgggggaccacaagggttttgaaaaaaacccgagggggtgtttggggggttttttgggctttcaaccagggggcccccgggcgccttt

SEQ ID NO: 13789 - DNA, 839 bp, Homo Sapiens
  misc_feature (270)..(284): n is a, c, g, or t
catctgacttcttgtctaacctttaaagaactggtaattcgaatttaaactattctagatcatagaaaaagatagcttccaaatatattttatgaaactaacacaaccttaacaatgaaacttcatagatgaatacaacaaaagaaagctgttgactagtttccctcatgaatacagatgaaaaagttttaaataataaaccatagctagtggtgtattaaaagaataagctgttttcagcaagaaggtatgagaacaattttttaattnnnnnnnnnnnnnnngaataacctgttggaataacctattttaatatacctagtgatgtattaaaagaataacataatattgaacccgtcctgcatgggttcagtattaggaaatctttcaagataattggttttatcaacaatataaaggaaaaatattaataggcgcaagaaatataaaatctagccatcatttcttattagaaggtcttaaagtgtaaaaaggaaggactttaattttcaatacgtggtaggaaggcttattgatagcattccttttgcttgaggacaaccgagcgtgctagataaaataagtatcctgaaagcatcaaaagagctaatagaagaaatcaaaactaagggaaagtggggtgctagttctgtccttaaggcatttgttcatttgagcaaacctggacttcaattttgagtctgtcaggaggcaaaggggacaaaaatcaaggactatttaaggagtcactttctatataggagacccttcctgcgtaaaataccaaacactttaagtcgctgtatacccagaatacagggatatctggtcactaggat

SEQ ID NO: 13790 - DNA, 514 bp, Homo Sapiens
ctccccacccacctctgcgaatctgctcccaaaggaagctgaccagagcaagatctgggcaagcagagagtgcctgggacaggactgtgacctggtggacaggggcctagatgtagcctctgttcctcctggacataggaaggtcccaagcttagtatcccacgtggcctttacaaatcctatggctggccttctcattccacaagggccctggaaagggttgacagccagccttggcatatggctgggagtcccttagcaaggccaaccctgaagaggccctttgaggcattccctatggcttagagttgtagacttacactcaaccctcatgtgagcgtgggagtgagggtggcggtcccttgccaagttggtagcagtgacccagtgattcactgccatcccaggccttaactagcaaaactacggagcgtgccaagtgacctggtgcctgtgggaagtgggttctcaggactggcattcttggaataaattcactctgtccttgcaaaaa

SEQ ID NO: 13791 - DNA, 634 bp, Homo Sapiens
gttatggttgaaaccccaaaaagaaaagaggaaaaaataatggagcaaaagaaatatatttcaaaataactgccaaaaatattctaagagaagtgacagaaaatcaaacttcagatataggaaactcagagaatgtcaaatagaacaaaaagaaataagaattccgtcttgaaaaatctttaaaaaatcaagtctaaattttatatcttgctccaaatatatagagatataaatagggtatcatcaagatatggagaaagccatatcatggaaacactaaaataaggctgtggaaggactacattgatattagacacaacagagttcggaacaagaaatagtatcagagatgagagccaatagataatagaataatcaattctcaagaagatgtaaacatcctactaattagggtatgcagctaacaacagagcctccaaatacgtgaggtaaaacacgaaagaaatcaaaggtgaactagaaaaatccaaaattatatttgcagacttcaacacttttgtcttagtaatggaaagactaggcacaaactcagtaatcatgtggaagataagaacaacagtatcaccaacaagacatccaatcttcaatggcagatactctttcctttcaagtg

SEQ ID NO: 13792 - DNA, 632 bp, Homo Sapiens
ccacgcgtccgcaagggaggcgtggtaaactgtcttgagccccaccctcacctgcctgtgctggcaaccagcggcctagaccatgatgtgaagatctgggcacccacagctgaagcttccactgagctgacagggttaaaagatgtgattaagaagaacaagcgggagcgggatgaagatagcttgcaccaaactgacctgtttgatagtcacatgctgtggttccttatgcatcacctgagacagagacgccatcaccggcgctggcgagaacctggggttggggccacagacgcggactctgatgagtctcccagctcctcagacacatcggacgaggaggagggccctgaccgggtgcagtgcatgccatcttgaggcctcatacctaggtggggcaggctggggctgccaacctgatcctgcctgggcaaccctttcctgtcccaggccctacattcagcagaaacgcactttggactttttgctttagataaaagaaagacatcccaggagaaggacaaaccagaggagtgaaccaacaaagagtacctaggaatgggagttgagccctggaatggggctccatggagaggtgcataggactcggcagaaatggcctctccccaaag

SEQ ID NO: 13793 - DNA, 487 bp, Homo Sapiens
  misc_feature (434)..(447): n is a, c, g, or t
cactcttaagtccctttattgcattcagagaatatataggtatttaaactttgacaataattttaccttgatacatccaagtttgacttgctttttaatatatttatagatataaaattaggcctctaacagtgatagggacagggagattgctgccaccaaacaatgtttcttaaaaaaataacagaagaggtaatatccttcctattcttccttcacttctgcccctcctcccacctcttcccagcctccctcacctgacctatttagggggtgatgggatgaaaagaagagagtgaaggatatgtaatcaagtgcaaaatactgtggtaagtacagagaatgaataaggtggaaaggaaagtgaaaagtgtgggatggttaggggctttaaggacttcccaggaaaataggattctgggatggggttgctnnnnnnnnnnnnnnagccaactgtcataaacttttaaaaaacaaaggaagaaaa

SEQ ID NO: 13794 - DNA, 682 bp, Homo Sapiens
ccacgcgtccggggacctcccggccgccctgggcatgtgggacagatgggtccagttggagctccagggagaccaggaccacctggaccccctggaccaaaaggacagcaaggcaacagaggacttggtttctacggagttaagggtgaaaagggtgacgtagggcagccgggacccaacgggattccatcagacaccctccaccccatcatcgcgcccacaggagtcaccttccacccagatcagtacaagggtgaaaaaggcagtgagggggaaccaggaataagaggcatttccctgaagggagaagaaggaatcatgggctttcctggactgaggggttaccctggcttgagtggtgaaaaaggatcaccaggacagaagggaagccgaggcctggatggctatcaagggcctgatggaccccggggacccaagggagaagccggagacccagggccccctggactacctgcctactcccctcacccttccctagcaaaaggtgccagaggtgacccgggattcccaggggcccaaggggagccaggaagccagggtgagccaggagacccgggcctcccaggtccccctggcctctccatcggagatggagatcagaggagaggcctgccgggtgagatgggacccaagggcttcatcggagaccccggcatccctg

SEQ ID NO: 13795 - DNA, 680 bp, Homo Sapiens
ccacgcgtccgcttctctcgttccgtcgattgggaggagcggtggcgacctcggccttcagtgtttccgacggagtgaatggcggcggcggctgggatgctgctgctgggcttgctgcaggcgggtgggtcggtgctgggccaggcgatggagaaggtgacaggcggcaacctcttgtccatgctgctgatcgcctgcgccttcaccctcagcctggtctacctgatccgtctggccgccggccacctggtccagctgcccgcaggggtgaaaagtcctccatacattttctccccaattccattccttgggcatgccatagcatttgggaaaagtccaattgaatttctagaaaatgcatatgagaagtatggacctgtatttagttttaccatggtaggcaagacatttacttaccttctggggagtgatgctgctgcactgctttttaatagtaaaaatgaagacctgaatgcagaagatgtctacagtcgcctgacaacacctgtgtttgggaagggagttgcatacgatgtgcctaatccagttttcttggagcagaagaaaatgttaaaaagtggccttaacatagcccactttaaacagcatgtttctataattgaaaaagaaacaaaggaatactttgagagttggggagaaagtggagaaaaaaatgtgtt

SEQ ID NO: 13796 - DNA, 372 bp, Homo Sapiens
tgaacattttaatcttttggaaaattgtctttctttgttaaaacaattcatttttagcttttgtctccagggcaggatctcaaatttttgcttttatttttaggaaaagaacatttataaaatcatatttttgttactgcaattgttttatttgttgtgtggcaaatgagaaatcctttatttattgtgctgtgatctctctgtgtggaatgccttggtgagagagatgcttattatgactattatcatttctgaccaagcttctattaatgttatttctaataatacactatcttgattgtactctccagaaaatttttctgtcagtgaaaataaaagaaaaattaaagtaaagctaaggaactgtctata

SEQ ID NO: 13797 - DNA, 652 bp, Homo Sapiens
ccacgcgtccggcaagaacaatttgaacaatactgggatgaagaagaggaggaatggcatttgaaaaatgctattagagtagatggaaagatttatcatccatcatgttatgaagattatcaaaatacatcttcatttgattgtacaccatctcccagcaagacaccagttgaaaaccccttgaatattatgttgaacattgtcaaaaacgaattgcaggaaccctgtgacagtcccaaagttaaggaagaacgaattgatacaccaccagcttgtacagaggaaagcatagcaacaccctctgaaattaaaacagaaaatgacacagtcgagtcagtttaaataaaatgagaaaggtatgtttttcttttttaaaaaagctgctgttggatctagaaggtgaagaatttttttatgtatatatagacatatctatataaattgtctggctgaggcagggccttcagctatcatttggttaataaatacattttagtatttgcatttcctactgcctgcagagtttcaggtgcttgttgtgtgaaagttctgtagatgtgtgcaaatttaacgaaatgaaattgtatgtgtaaaaatgtacgatttttcactgtgcaactgtaaattataaataaaaaatatttttgctatt

SEQ ID NO: 13798 - DNA, 1215 bp, Homo Sapiens
  misc_feature (1006)..(1006): n is a, c, g, or t
ccggtctaggtagagtgcttgtgttactctggacgaggctgcagccctgggctcagtctccgccgccgccgtgaacatggagcccccggacgcaccggcccaggcgcgcggggccccgcggctgctgttgctcgcagtcctgctggcggcgcacccagatgcccaggcggaggtgcgcttgtctgtacccccgctggtggaggtgatgcgaggaaagtctgtcattctggactgcacccctacgggaacccacgaccattatatgctggaatggttccttaccgaccgctcgggagctcgcccccgcctagcctcggctgagatgcagggctctgagctccaggtcacaatgcacgacacccggggccgcagtcccccataccagctggactcccaggggcgcctggtgctggctgaggcccaggtgggcgacgagcgagactacgtgtgcgtggtgagggcaggggcggcaggcactgctgaggccactgcgcggctcaacgtgtttgcaaagccagaggccactgaggtctcccccaacaaagggacactgtctgtgatggaggactctgcccaggagatcgccacctgcaacagccggaacgggaacccggcccccaagatcacgtggtatcgcaacgggcagcgcctggaggtgcccgtagagatgaacccagagggctacatgaccagccgcacggtccgggaggcctcgggcctgctctccctcaccagcaccctctacctgcggctccgcaaggatgaccgagacgccagcttccactgcgccgcccactacagcctgcccgaaggccgccacggccgcctggacagccccaccttccacctcaccctgcactatcccacggagcacgtgcaagttctgggtgggcagcccgtccacccccaccaagctgggatacgcaaggggtgacactgtccagctggctctgccgggggggacgggagcccccagcccgggagtatacgctttttccggcctcangatagaccaggaaggaaaatgcttgaatgtgaaatctccgagggggaacttgaacccttggaagggattggacccgggggcccgaaagcggggaccccatgggctgtcaaaaaggggaggggatttaccaccccggcgaaataaacggtggcaagcttttcacaaaaacccttggaaacttttgccggttgggccttatttgtggaaca

SEQ ID NO: 13799 - DNA, 1143 bp, Homo Sapiens
  misc_feature (260)..(318): n is a, c, g, or t
  misc_feature (918)..(918): n is a, c, g, or t
  misc_feature (920)..(1037): n is a, c, g, or t
  misc_feature (1039)..(1069): n is a, c, g, or t
  misc_feature (1078)..(1078): n is a, c, g, or t
  misc_feature (1082)..(1082): n is a, c, g, or t
  misc_feature (1092)..(1092): n is a, c, g, or t
ggaaggcacgtctttccgttcgttggttttctgtgtgtaaggagtagcattgctgttggcgcctaacctcgcgtgcactgcattctcaaccccgtaccagtgcatcatcagaagccttcctcgtgaccataactctgtgtctgcagatatgtgttcccgtgtaagccagttttccccttttactcagactgatttcacctagattgtcacggtttccttcatgttaactttgcgtgactttgttcttcctttactactcnnnnnnnnnnnnnnnnnnnnnnnnnnnnnnnnnnnnnnnnnnnnnnnnnnnnnnnnnnnttgtatagcatttttacacctttattgagtaatctggtttcgaaaggaggtgagagtttagtcccttctgcagttttctccaagctgtgtcctgtgaatttcaacccttggagcctaagaaaaccctaggaagatgatgttaatttgctgtcatttcctaattcaggatctatcatcaaatgaaacatgaaaaaaacagtgacttttaaggtgaaaagagtttcaagcattccaaataaattatcaatgtttcataactttttattataaacccacctcctaataggaagccaagtactatttgatacagtggtaaaaaccaaactaccttgaatttttttaaggcaacttatgaataatgctcattttcacggtcagaatagctttaaaataatggttgaatttgatacacacaggaagttttcttgaagaacaatcctttcgcttttcttttttcttgagagatctaaagagaaactgtagattgttttcctgacagcaaaagactaatgtgacaaaatgaagtcattgtaaagaagcgatgcaacttgtcaaatatttaataaagaattatggaagctggaacattttctacatcanannnnnnnnnnnnnnnnnnnnnnnnnnnnnnnnnnnnnnnnnnnnnnnnnnnnnnnnnnnnnnnnnnnnnnnnnnnnnnnnnnnnnnnnnnnnnnnnnnnnnnnnnnnnnnnnnnnnnnannnnnnnnnnnnnnnnnnnnnnnnnnnnnnnttggggggnggcnctgggccccngaaaaaattttttaaaaacatttctttggggcggcccgcccccccaaagag

SEQ ID NO: 13800 - DNA, 1891 bp, Homo Sapiens
  misc_feature (1017)..(1304): n is a, c, g, or t
gggagagttgctggttcaccttgacgatccagagagggccatccaggatgcaattttagaggtcctcaaagagggcagcgggctgttcccagatctcctggtgagggagacggaggccgtcatccacaagcaccgctcggccacctactgcgagcagctcctgcagcatgtgcaggccgtgccagccacacagtgaccacgctggtttcagccacggcacacccttgtccccacctgagccagagtttgtggcctttaaatctcataaacaaggcacctctgtgccagcagtgagactgtgacagcaagaatgtactcctcaggacacctgcccactctttccctggaataacagcctctgagtggattctgcatgttatgtgatttgttctgttcatcaagagggctcccaaacatctgcagctgatttgaaattaaaagtaagtcgcagccgctcctcccgcagccacttcagcagcatcttagattttaagcctcacgtgcgcagctggttcatgaactattggctgcatcctgcttaggtgcccaccaagaaggtttttacctacttaacaaaaaagaaagaagccaaagtgattagaaagaaatgaaatctctttttgggttctgtctactgaaatttaatatctcagtgaacagactaaaaggaatttagaatcctaacaacttaccagatttctcctgttttaaatatactgggactttaaaggttatatgtccggtcaccgtatgttttaagtcggtgttaatgctaacagtgttgaaaacaatatttcatgagatctaattgtggttgcccctataggtagcaggaaagtaaagttgcatttccctctcgcacattctacacccaagtgcctaaaagatctcattgtaagtgggtagtgttaccggaagccattgtgttcacacgggggaaatgccgtatatatttttcaacaaatattaacgtttatactttcatgtttgaaaatttaattaaaaatatttgttttnnnnnnnnnnnnnnnnnnnnnnnnnnnnnnnnnnnnnnnnnnnnnnnnnnnnnnnnnnnnnnnnnnnnnnnnnnnnnnnnnnnnnnnnnnnnnnnnnnnnnnnnnnnnnnnnnnnnnnnnnnnnnnnnnnnnnnnnnnnnnnnnnnnnnnnnnnnnnnnnnnnnnnnnnnnnnnnnnnnnnnnnnnnnnnnnnnnnnnnnnnnnnnnnnnnnnnnnnnnnnnnnnnnnnnnnnnnnnnnnnnnnnnnnnnnnnnnnnnnnnnnnnnnnnnnnnnnnnnnnnnnnnnnncatgaggcggttagccgggcaccctctccgcgagggacttcccccggggggggtttttctaccaatttaatagcccggccccctggccaagaaaagtcgccaatcccggcctcacactctatataaaggtttttctcgcccgccctcatttacacacccctctccaccagaaggcggggggtgaagtcaaactctagagaattccctccccacgcggaaattccaccccaccccccctggcacaaaactgttgcggtgatataaaaaactgtgtaccactacgcgccgggaaaaaaatcgggcgctgtaagaaaacaccccgcccgcgatataacgcatccaccgccccgataagtaaaaaacccgtggggaaaacgaaacacacccagagggcatttgtgtgtgcccaccctaatataccataataattcctctgagtgaaagaaaccatcacgcgagggcaacatactgacatcaacatctactcaaccccctgtctccccgccccgatattactcccgcgcaagagacaggccgcgcccaccaccgctgttggcgagcgagaacgagccacgcgctagaatatt

SEQ ID NO: 13801 - DNA, 433 bp, Homo Sapiens
acacaatatatgattttattaataaatagtgcaaaagcatcagtgataactgtttgaacattaaattttttaaacagccatgtcttggcattagttaatattgtgcatattggcctctatggcactacaagtaaacagatgaaaatattgcccattttcatgcacaggtattcagctataacaccatttacaaatcattatgaacaagataaattctgcaataatattcatttggatggccacaattaaatgagtgttatatcaagaaatagcctatgttcaatatactccagatgtcagattgtaaaatgtaatgttatttaaaacttaattctttattttccttaaagggacaccttttgtgtatttgggtactcaaatgaaaacttaggaatgcattctttgaccataataacaaaattcacacaaaaga

SEQ ID NO: 13802 - DNA, 737 bp, Homo Sapiens
ggtggacagcatgattcaaagactacaacaggagcaagacctgagacgttctggtgaagcaggtatcagtaataccagccgtttaagtagaggctccataagttctacctcagaggttcattcaccaccaaacgtaggactaagacgtagtggacaaattgaaggtgtacggcaaatgcacagcaacgcaccaagaagtgaaatagccacagagcgggatctggtagcttggagtcgaagggtggtagtacccgagctatcagctggtgtagccagtaggcaagaagaatggagaactgcaaagggagaagaagaaataaagacttacaggtcagaagagaaaagaaaacacttaactgttccaaaagagaaataaatacccactgtctcaaagaatcatgctcatgagcatttcctggatcttggagaatccaaaaagcaacagacaaatcaacacaattatcgtacaagatctgcattggaagagactcctagaccctcagaagagatagaaaatggcagtagttcttcagatgaaggcgaagtagttgctgtcagtggtggaacatccgaagaagaagagagagcatggcacagtgatggcagttctagtgactactccagtgattactctgactggacagcagatgcaggaattaatctgcagccaccaaagaaagttcctaagaataaaaccaagaaagcagaaagcagttcagatgaagaagaagaatctg

SEQ ID NO: 13803 - DNA, 921 bp, Homo Sapiens
ggggctgcggggagggcgggacttcctgcgcgggggcccgagccgctcagtctccctgctctccgtggtcccggctcgcgtgtagcggcggcggcggcgtctccgtgaggaggcgcgcggggccatgacgtcagcgtccacaaaggtcggagagatcttctcggcggccggcgccgccttcacgaagctcggggagctgacgatgcagctgcatcccgtggccgactcttctcctgcgggcgcgaagtggacggagacggaaatagagatgctgagggctgctgtgaagcgatttggggacgatcttaatcacatcagctgtgtcatcaaggaacggacagtggcccagataaaggccactgtgaaacgcaaggtatatgaagattctggcatcccccttccagctgagtcacccaagaaagggcccaagaaggtggcatctggtgtcttgtcacctcctccagctgcccctcctcccagcagctccagtgtccctgaggccgggggtccccccataaagaaacagaaggctgatgtgacactcagtgctctgaacgactccgatgccaacagtgacgtggtggatattgaagggctaggagaaactcctccagctaagaaactcaacttcgaccaggcctgaccctggattctggccttctcatgacctctgctgatcctcctctcctctcctgctgagccttccacctctgacctctcactgttcatgccggacctgtggatctcctgggactccgagcaaggcctgcacgagagagggctgaaaggctgctggggctgccacctcgctattcccgcataagcatctgcccccaacccctttgaccttcatctgatggacatttttatacagaaaacaataaagatttccctctcagcttcgtgctgtctgcttaacat

SEQ ID NO: 13804 - DNA, 220 bp, Homo Sapiens
ctatatatattttttgttgaattctattttatttttaattctctcttctcctccagacacaatggcactgcttatctccgaaatggtgtgatcgtctcctcattgagcagcggctgccaccgcgctgtgggtagtgtgtgaccgtggctgtactgtatagtgaacatagttggcatatctttgtttgaagtttgttggtgactccaccaaactggtgtga

SEQ ID NO: 13805 - DNA, 887 bp, Homo Sapiens
gggacagtcggcggccgcgcgcagcacgctcaaggccgggatggcggcggcggcggcggcaggaagcgggacgccccgagaggaggaggtacctgctggggaggcagcggcctcgcagccccaggccccaacgagtgtgcctggggctcgtctctcgaggttgcctctggcgcgagtgaaggccttggtgaaggcagatcccgacgtgacgctagcgggacaggaagccatcttcattctggcacgagccgcggaactgtttgtggagaccattgcaaaagatgcctactgttgcgctcagcagggaaaaaggaaaacccttcagaggagagacttggataatgcaatagaagctgtggatgaatttgcttttctggaaggtactttagattgattgccgagcggggcagttttgtgagccttcatctgaagccttcagttcacccctctgcacaggcctcagctttgaagaacggagtctttgcacttacacacactcttcctgttctgccttcacctatgccgggataagcagagatctcatcaattagctcttctctgcaaggtcttccactatttctgtctgtcttccatatcaagcctggatgcagctgctgctgcttagagcagagatgaagaaagtgttctgcataagtggcttcctgaatgatgaggaccagaataaaggtttttgatcaacctcagtccagtgtgttttataatctcgcctttgttcctaccctgtgactggagagtcaccatacctggtcacagaccttcctgatcttccctgccagccattctaacatacagtcctttcattaattttgttcttttatttttccagcacatcaccagaagtgattccagaagtttatggacaccac

SEQ ID NO: 13806 - DNA, 1257 bp, Homo Sapiens
  misc_feature (407)..(445): n is a, c, g, or t
  misc_feature (605)..(614): n is a, c, g, or t
  misc_feature (1078)..(1090): n is a, c, g, or t
  misc_feature (1168)..(1168): n is a, c, g, or t
  misc_feature (1198)..(1198): n is a, c, g, or t
gggggtctagcttttctggtgaagccagttcctgttcctgccttctttcctaagggcctgctcgctctggcttccaccacagtgccaagcccctctggtctccaggggagggattgctgtgttacatagcaggatcggggtaatcaggccaacaggggagatggtggcgatttttcttttttaatctgtatttattatacagtcttgtttctttaagcccatactctgtctcttcccccgtcttcctctcaggtgacagtatcagtgagtgccatacagaattgtgtattcaccagcatcatgaaacagttgtggtcttttgagttgatcttggcagagtaaagggacgtgtcctggagccattcctgaatctccccttctttgtgacagctcctcccacccccccnnnnnnnnnnnnnnnnnnnnnnnnnnnnnnnnnnnnnnntaaggcacttcacttagagactggagtcctgcttataatcatgcatataacctttactttgatggatctggccagaggggtgttggagcccagcccacccacataccagtcaagctcttaggggagcagaagaaaagcaggaagaatttaaatgtttaannnnnnnnnnaaattgacttttctagttattaaaagttgcttgtttcagcagtgatattgtataaagaacatcttgtaagatactcctgacatcttgctttagcacatgtacagtacagtttctatgataatgtgtttgctctaacttccctggcttctccttcagcccatccactctcctctagagcagttgggttggaggctcattgaggcaagcagcaacattggagggggagcagggcagtgctgtgtctgctgcctcccatgcccgttctgacctcagccttggaactcctcaagaacctgaagattccagtggtcagtgtcggtggggggtgggaggagagagcggcagagaagctctgagagccccttcccccacaacaaatctagctctagttgttatatttaggcaaaactatgtagtcttctttcccttttatgatggattttgataaaagtaccaaacagggnnnnnnnnnnnnnatcacctttgaaatttggaaaattttgagcaccccaagctcctgctgtaccctattttaaaagtcccacccaaggggngaactggcagccttccctagaaaacatgtnagaaatcaaggcccctcttttaaatttttaaaaacctggccggggaatggtggggccca

SEQ ID NO: 13807 - DNA, 681 bp, Homo Sapiens
ttggtatacatacaagggctaacggtatggggtcccaatattatactataaaaccatttaatcaaatttttgaaaagtcggaaaaactgtgtgtattctaaagtcactggaaattaaaagaaaaatatattccagtagtgacttacagatgaaaatgatgctgacaatagacagtaatctgtttttccatgtctaggtttgtgagtttctgatataattatttctctatacatgtgatatgaaagaaagaaactatcagtctgtcctctatcccagtccattttccctctatgtaacaagtctttgacttacatcctttctttgaacttactgtgtaatattagagcacaagattcatgctactctttatcaaataatcttgcagtccttgaaaagaattcaaagaatttaagccactgacgtcctaatcttggtaaataacactaaaaacaaattcttgagccaacttcggtagcaaattctctacagagcatctttctctgtgaacatctttatacatgtgtattaaagttaggctggttagtcactcttaccaacctcctggtcttacagaatgatcaagaaagtatttgttcatctatgatagagcaaggactgtgactgttttaaagctaagacacacacacacatttctcccttgccagcacaagtgtgccgggg

SEQ ID NO: 13808 - DNA, 866 bp, Homo Sapiens
gacctgggattatcccctggtacgggagtggcgagaatttaaagtcaaaaggctgtggaacaggtcagatttgactccccagaatcagctgaaaaagcctgcagaataatgaatggcataaaaatcagtggcagagaaattgatgttcgcttggatcgtaatgcataatttcaagccatggttggaacattcctacatctgttttgctgaatctcctagtaaaagtcatttttttaaagtaatattgtatgcttacaaaagctgtaaaaatgaacttttaaaactcccaccagcttttaacagtataatgttaaaaatatactgtaatttttgttaatctcaagtttgggtttttaaagacagcaagtctggtcattcagtttaaatgaatggttatactgtttttaatgaaataagccattttcttgttgttttcagtactacatagttggatttgtttgttctagtttctccagtttttgtcaacttattgtatggtaaaacatagattttttccccccaaacttctgttttataatatgtaatttttcatgaaaagaaagggctcagaaaaattaggatgtgattttggttggttttaaattactgtaagttttagattctaaggttcaagatttttaaaatttgatttaaatgaagaaatggatttttctctctgcccctccctgccattcatattttctgcataacactattaataatatcaacctccacagccccttattttattatttccaataattccaagttcatatagaactgataatgtagcaagccccaagtatgataataggcagactattcccaactttctgtctagtttccagccattgaagtgaactgct

SEQ ID NO: 13809 - DNA, 708 bp, Homo Sapiens
agcttggcaaccagatctgctacttcagccagatcaatcatcatgtgaatgtcacacccacattcaataatggtgagtcggagctttttacctgacacgatcatcacagggcctctgatctcggtcaacttctgctgggtgaagttcccaatgaggcattatatcaaagtgctctttccaacttttggaggccccgtcaccactatcactattggtggcggctctagtggagtctgatcaaccactggaatatgatgcttttttgtcttcaaatcctgagtcctgtgaaaggatcaagccatccccacagcagactgaattgcaaaagctttggcatttctcttccagacatcttcttcatcccctagctggagatcctgcagatgctgcttctttttctttgcagctttgggcccaccgtttttctttctgtgtttcttctggtccttagtctccatagtggctatttaccaataacaagtaactctaacctcaggcagatgcgaaatatgccgctcctcgggagcaaagatgacccggaggaccgggggaggaccttcccatgcgcacgactcgcgatcttcccagtgccccagagtccacggacccataccgccgcctaccccagcccgcggcaccaaacctgttcctcgtgccgaattcgccatgccaggcctcgctacctaagagaccgctatagttactgcc

SEQ ID NO: 13810 - DNA, 628 bp, Homo Sapiens
gtgagcttccagtctgcccgcactggcggctgatgtaatcccaggggcggctgaggaagatgctgaaggtgaggatggagatggtgtgggtaaggaacgctgcccggactgagaaaggcattatgctcgctccaatgctggaaccgtgcctgctgctgcgttaatgtttccagagcggcactcccatgtatacgatctagagcctcccctatagcgtaatcccaaggggttctcatcaatgaagctattcagatgtgaaggaagaatggggccgggttgtgcaatggctctcacaggactgtggccttcttgcagcatgggagggggctgctgctccggaattacagcttctgcaggaggagactgtggccgatgagcaactgcactattaaaaaaagcattgttgggtcccgcctggtatgcaggagaaagctgaggaggtggctgctgaggctgctgattcaactgactttgctgctggactacctgatttggctgaggtggtatctgatttggttgttcaggcaaattattctgctgctgatttaacaaggtgtgctgctgtggaattggaaagggtggtcttggtagctggggaaggggatgaaagtggcgattaggaattgca

SEQ ID NO: 13811 - DNA, 621 bp, Homo Sapiens
ttacaccccacgatcacatatcgctctctttctctttctctatcacgtcctctatctcgctctctgtctcgtctgttatctctagggcggtctcgctctcgtccccggtctctttcacggggtctacttctccggccactgacaacagcttgtgtgcgacgaaggaaatcatccaccctcatatcataatcatgtactcgtttatctctgtatcttgcttcatgtggtactggatgatgtcctgagtaagggggatgagcttgaggaggtggagcatggtgctgatagtaaggatggtgtggaggttgttccattcctgggtaagggggcattccttgccaaggtggtggtggtcccatgttatgaaattccctcacataatcattgtaggacccatttaaaaacacatctcggcgaactcctgaaaatcgtctgtccacttcctggtatcgtggatcctttaaataccctggtctctggtgaaactcagggggatagtcaatccttggtttctttctgctgttatgaatatcataatcttctggtcgacgccttcccacatcccggactggttctcgacgggatggacgtcctcgtgatcgtgggttgtaaggggatcct

SEQ ID NO: 13812 - DNA, 442 bp, Homo Sapiens
ctccctccagggccactgcttgaagaagaatatgtatgtttctatcttgtatgtctgtgtgcccctcctgccccgaaagtgctgactatggggaaatcttttagctgctgtttttagactccaaggagtggaaattatgtggaagaagcaaacctgatacaatttgcccaaggtaaacagtttgaaaagacaaatgggcctgccaaactgtacagtttcttccccaagagctgttaggtatcaaaatgttgtcctttcccccctccgtgcttttctggttgagatcatgtcattgatgaactgccaaagtcaggggaggagggcagagactttgtgtttacatctgcatttctacatgttttagacagagacaatttaaggcctgcactcttatttcactaaagaaaaactaatgtcagcacatgttgctaatgacagtgga

SEQ ID NO: 13813 - DNA, 468 bp, Homo Sapiens
cattttgtcagtatccaggaccccccggattctccacgccctccccatctcccagtctccctgccccccatgccccagaccggcccaccagggactagccgctgtcgcacagcctctggggtgcttggtctctgcgaagtcaaaggcctgacagctctgtggcctgggaatccattttcctgcggcagagcagggcctggtgtggaaccagggagctgtgggaagccacagcagaaatggaagaaaaacaggtctcagcccagggtcctcgctcactccctcactccccactttgaagccatctctgttctgcaggtgagaggatttaaagtcagtcacaaaggcttgggaacaaaaggaattctcttccaagaatgcctctgtggtgctgtttggtctctagaaacagggtcacttttttaatgtagtaaagaagtaataaatggtggcattacacattgtgatatt

SEQ ID NO: 13814 - DNA, 494 bp, Homo Sapiens
ccacgcgtccgcggacgcgtgggtcagagtcaaatctgtggctttgagtagcaaagtaggacttctctttcagctcatagcagaaatattctttttattccaaattctgcatttaaatatcaagaggcaaagcccagagagctcaaaacattaaggttatgtctttaactctcaagtgagagaaatgcacaatgaaatgaacacctcccaagcaaaggagatgggagttgcaacagaaaggagcagtggggaagggatgtcactgcactgtctgtgttggtggggtaggaaagtgcgttctttcccaggaggcagatggagcaataaaataccatttaggcttttttttctcatctgaaattcttagaataggcagtcttgtccttcagaaggaaacatagacgtgtatgaaatggctatgggagagtaaaaaatggcaatcagagaaagggattggagttgggcagagtggctcatgtctgtaatcccaaaac

SEQ ID NO: 13815 - DNA, 1545 bp, Homo Sapiens
  misc_feature (44)..(52): n is a, c, g, or t
caagtgggataacaccagctttcatagattgtaagtagcacagnnnnnnnnncgcacgtgaacatctctgattggaaggaactgtacagttgtagcatcttagttaagattggcagcgtttttccctatggtatgtaaaacagtgttttatgaccagcagtgtctttgatgtgacttattatggcaataagacctgccgcacaggattcacgcaggaaggtgcctctctagcccagtgccaaggcacgctgtaggtgcaaaataaagtacagtggctccttttcctctttctcttgtccccttctcaagacagaacatagtggggacgtgtgcatctcctctgtagcactgagtaacgctcagagcatcaggaaacgtctggtttttagaagataaacacttccttacctcctcttggaaacagggaggctatttatagcagctgcagagcaggttgaacgggccactgactcgcttcttcccaggtcacaggtggccaggagatgcctggtccacctctgggtccaggcctcagtcactggtttcccagtggaggctggacgtgaccccggctggaacccaaaggggcagccaggaagggcaggagaatggagctgctttcccccaggccactgagaccccacagcttgtagctgggtcgcagtgtagacaggagacggttgtctgcagcaccacaggcctggggtgaggagtcctcccatgcagggcctgtgcgtggccccgcccacacccagcacatgcaggaaaccaaattcagccaggcacccagggctgctggattctcaaactcttatcttggcaaacactgtggttccaaaagctgctcaaaagattctgctgcaaaattaaaatgtgggaatttccccagattttctagggaaaagtaaataatcagggattcttgatggggcaagagagtggggaccttaagttggaatcaggtcagacaactgtgattactcccagctagaggaggaacaggaggccccaaaacaccagcagcgcatgggcaccagctggtctgtggggcttgatctggtgaaggcctggcccagctttgctctgggcacccagacacccagcagtgtttgttatatgaatgcatcaactcccctgccttcctctccctccttccctccttcagcaggacatgaacagattaggaattgtactccaaatgatacttgctttttgtaaggcgtctcaggctttttagaacgttgtactggtcctcccaagaactcctggagttgtcaggttctagacttctaattgggaactgaaaaatagacaggccaagggacttccctaatgggacagcacagaagagggcagaggtggagcccagaactgggggcaagaagggagggacaggcctgggccagcccatcagcccagatgtgatctgggagtctgcagagatgggcacggctgagggggtggggcagggtcaaggtcccaggaaataccagcaggtaggtctgggaagggagagaatccccggacgcgtgggcggacgcgtgg

SEQ ID NO: 13816 - DNA, 676 bp, Homo Sapiens
  misc_feature (331)..(332): n is a, c, g, or t
  misc_feature (448)..(448): n is a, c, g, or t
  misc_feature (461)..(474): n is a, c, g, or t
  misc_feature (605)..(629): n is a, c, g, or t
aataaataaaatagaagcagccttgtaactgtatttaccatgataatatattctgcacggtaagaattccttttacagacattctttatcaagaggtcggcccttctttttcaggcacataagccaaatgcaggcctgtgtgtagctgtgtgttttttctgtggttgccgcatttattccacctccagctggaccccccactgcaaatagagaacagcggtgggggatgggggttaaaaagtagagaacctcctttctgttcaactaatttcacgtgacagtgcatgtatttattcaataaaacctttatgttagctcaaaacacccagcnnacccctatcccattccccaccccaactcccctttctccactccatttccaacctccctaaataataaccaatctccccccattcctctctccctatccctatccaccactcctaantttttgccggggnnnnnnnnnnnnnntcaaaaacttttttcaaacctttttcttgttgccgcccgggcccccctcacggggacaggcaaccgcgggccaccccccgtttcccccaaaaaaatcctccggccacacaaataaagggcgcgtgggattnnnnnnnnnnnnnnnnnnnnnnnnngcggggccaccccggaccgttttttggaaaccaactccaggaacggg

SEQ ID NO: 13817 - DNA, 1299 bp, Homo Sapiens
  misc_feature (79)..(139): n is a, c, g, or t
  misc_feature (423)..(432): n is a, c, g, or t
  misc_feature (603)..(654): n is a, c, g, or t
  misc_feature (789)..(852): n is a, c, g, or t
  misc_feature (1073)..(1073): n is a, c, g, or t
  misc_feature (1121)..(1121): n is a, c, g, or t
  misc_feature (1165)..(1165): n is a, c, g, or t
tgatgctgatgctgttaaccaaagggcagaataaataagcaaaagccaaaaggggtcttaattgaaatgaaaatttaannnnnnnnnnnnnnnnnnnnnnnnnnnnnnnnnnnnnnnnnnnnnnnnnnnnnnnnnnnnngaagacaattttcataacttgataaattatagttttgtttgttagaaaagttgctcttaaaagatgtaaatagatgacaaacgatgtaaataattttgtaagaggcttcaaaatgtttatacgtggaaacacacctacatgaaaagcagaaatcggttgctgttttgcttctttttccctcttatttttgtattgtggtcatttcctatgcaaataatggagcaaacagctgtatagttgtagaattttttgagagaatgagatgtttatatattaacgacaannnnnnnnnnggaaaataaaaagtgcctaccagaacccacccctactatttcagaaccaaaccgccccgaaccgaccctgctcctaactctacaccacacttcttacctcccatcccccgaccataactgtcaacatctcccgacaccaccgtatccgacgcccgttgacaatcgctccannnnnnnnnnnnnnnnnnnnnnnnnnnnnnnnnnnnnnnnnnnnnnnnnnnnttccacttattcgccacatcctccgctgccgctctgtacactcctttccctacctacctccttatcccatcattttcgatccgcccctcgcgccttctctcgctatatcgccctgctatgtctacacttctccgnnnnnnnnnnnnnnnnnnnnnnnnnnnnnnnnnnnnnnnnnnnnnnnnnnnnnnnnnnnnnnnncacctcttctcacactttcgcctacctatgcacaccctcctccgccctatctatttccttcccttccactcccttttctactctatttcacccctcaccacgaatcttccctcccaattaccttgccctttaccgcttctcattagatacgggcacatgtgtgcatctctcccgcctttatcccacccgtctattccactaccctacgcacttataacatnctcacaacgctcgcgattagtactccccccacctctcaattcatctcncactggctacaacagtgcattctgcttcttgtttccaccccatntatcgtgcactatattcgtctgatacacacttccacacatcaccctgatttcgtactctgcgctgccacctctttcactcgctacacctcacgcactcccctcaattttccccacatgccgcgcgacccaccaa

SEQ ID NO: 13818 - DNA, 771 bp, Homo Sapiens
  misc_feature (134)..(216): n is a, c, g, or t
  misc_feature (630)..(630): n is a, c, g, or t
ggggggaatccaaccccttttcctgccccggttttctttggaaaccgttttggcccggttcccttccctatggggccccggcgccaaacgaaaggttttaaaagttttttgagggccgaggcgccccccaagannnnnnnnnnnnnnnnnnnnnnnnnnnnnnnnnnnnnnnnnnnnnnnnnnnnnnnnnnnnnnnnnnnnnnnnnnnnnnnnnnncaatgctaaggaaaaatttaatgatggaaatatcgacaaatattcaacatcatttaaaaacaaagtagcttctcttatttcacatagcttagtttgggatagaaatagaactaatgtttacaatgatttcttacatttagcattaatcagaaacgagggtttgttaagtgcccttgctgggtcccaacccccagagattccgattcagcaagtctgggatgcggcttgagaatttgcatttctaacaagtttctaggtgatgctgatgtcaatagtctgtgtaccgtttgagaaccgctggattgattctttgacagtttttgaagtccgctgctcaccatatcacttcatcctcttataaactttcactatgtgattgcctaagagcccctgcttgttggctgctccacattntcacacagtggaactatttctttctgaaatgacattgtttgagggacagtgggtggaacgtgtgagctcctcactgaaggctgcctccagaattccctgaatggactggcttgctttcttctaaaatctctcccccagaag

SEQ ID NO: 13819 - DNA, 484 bp, Homo Sapiens
  misc_feature (19)..(19): n is a, c, g, or t
  misc_feature (243)..(243): n is a, c, g, or t
cggaatataatctttcttnaaaatttcttttagcatagcattttcagtgctaagaaagaatctctatgttatattttgttaaaataatggctcttctaacaaagcaaatggtaaagtacaaagttggaagatgtcaagttaacgagaccttgctgcaaagccttgcagaacggaggaagctcctgcctgctggctgtctctccctccaacctctctacaatcatgcctgctttgaggtgttcntgttgcagcaagctgcaccttgggtcactcttttggaatattttgactataggctgcgtcacaggcagaaaaggagttgatggaaaatggactaaaaaactgacatgtttgaatcaatgctagagggaacagattgtgaattttgtttacagcatccaatatttggatttttttgtaaataaaaaagttatttttttctattgcaaactcccccccctaaacaataaaaacataccatgtc

SEQ ID NO: 13820 - DNA, 1230 bp, Homo Sapiens
gcacgagcggggctggcgtgtgggtctcgcagcgttgctcacagaacagagtagaggcggcggcggcggcggccggacccagactggtagtgaggcgttggaccccgagccgctgcaatgccgctggagctggagctgtgtcccgggcgctgggtgggcgggcaacacccgtgcttcatcattgccgagatcggccagaaccaccagggcgacctggatgtagccaagcgcatgatccgcatggccaaggagtgtggggctgattgtgccaagttccagaagagtgagctagaattcaagtttaatcggaaagccttggagaggccatacacctcgaagcattcctgggggaagacgtacggggagcacaaacgacatctggagttcagccatgaccagtacagggagctgcagaggtacgccgaggaggttgggatcttcttcactgcctctggcatggatgagatggcagttgaattcctgcatgaactgaatgttccatttttcaaagttggatctggagacactaataattttccttatctggaaaagacagccaaaaaaggtcgcccaatggtgatctccagtgggatgcagtcaatggacaccatgaagcaagtttatcagatcgtgaagcccctcaaccccaacttctgcttcttgcagtgtaccagcgcatacccgctccagcctgaggacgtcaacctgcgggtcatctcggaatatcagaagctctttcctgacattcccatagggtattctgggcatgaaacaggcatagcgatatctgtggccgcagtggctctgggggccaaggtgttggaacgtcacataactttggacaagacctggaaggggagtgaccactcggcctcgctggagcctggagaactggccgagctggtgcggtcagtgcgtcttgtggagcgtgccctgggctccccaaccaagcagctgctgccctgtgagatggcctgcaatgagaagctgggcaagtctgtggtggccaaagtgaaaattccggaaggcaccattctaacaatggacatgctcaccgtgaaggtgggtgagcccaaaggctatcctcctgaagacatctttaatctagtgggcaagaaggtcctggtcactgttgaagaggatgacaccatcatggaagaattggtagataatcatggcaaaaaaatcaagtcttaaaaataaagtgccattctctgattctcaaaaaaa

SEQ ID NO: 13821 - DNA, 594 bp, Homo Sapiens
  misc_feature (456)..(456): n is a, c, g, or t
  misc_feature (473)..(473): n is a, c, g, or t
  misc_feature (480)..(480): n is a, c, g, or t
  misc_feature (519)..(519): n is a, c, g, or t
  misc_feature (540)..(540): n is a, c, g, or t
  misc_feature (548)..(548): n is a, c, g, or t
  misc_feature (567)..(567): n is a, c, g, or t
  misc_feature (574)..(574): n is a, c, g, or t
ccacgcgtccgcctttccagtgtaacgaatgcggcaaggtcttcagttactactcatgcctagcacgtcatcggaaaattcataccggagagaaaccttataaatgtaatgattgtggcaaagcctatactcagcgttcaagcctcactaaacatctggtaattcatactggagagaacccttaccactgtaatgaatttggtgaggcttttatccaaagttcaaaacttgcaagatatcacagaaatcctactggggagaaaccacacaaatgtagtgaatgtggtagaacttttagtcataaaacaagtctggtgtaccatcagagaagacatactggagagatgccatacaaatgtattgaatgtggcaaagtctttaactccactacaaacctggcaaggcatcggagaattcacactggagagaaaccttacaaatgtaatgaattgtggncaaggtccttcggtcancaatcancactaagcacgtcatcgggagtatttcaatactggaagngaaaccttacgtgtgtaatgnagtgttgncaaagcttttaggagttgngttccantttcctggttaaatccatca

SEQ ID NO: 13822 - DNA, 499 bp, Homo Sapiens
cacgggcttttaattttaatcctggagtctcactgtctgctggcaaagatagagaatgccctcagctcttagctggtctaagaatgacgatgccttcaaaatgctgcttccactcagggcttctcctctgctaggctaccctcctctagaaggctgagtaccatgggctacagtgtctggccttgggaagaagtgattctgtccctccaaagaaatagggcatggcttgcccctgtggccctggcatccaaatggctgcttttgtctcccttacctcgtgaagaggggaagtctcttcctgcctcccaagcagctgaagggtgactaaacgggcgccaagactcaggggatcggctgggaactgggccagcagagcatgttggacaccccccaccatggtgggcttgtggtggctgctccatgagggtgggggtgatactactagatcacttgtcctcttgccagctcatttgttaataaaatactgaaaacactctta

SEQ ID NO: 13823 - DNA, 753 bp, Homo Sapiens
  misc_feature (91)..(91): n is a, c, g, or t
ggaagaaattatccgacagatgaaagtgttccaccccaacatccacatcgtgtctaactacatggattttaatgaagatggttttctccanggatttaagggccagctgatacacacatacaacaagaacagctctgtgtgtgagaactgtggttacttccagcaacttgagggcaaaaccaatgtcatcctgctgggagactctagcggggacctcaccatggccgatggggttcctggtgtgcagaacattctcaaaattggcttcctgaatgacaaggtggaggagcggcgggagcgctacatggactcctatgacatcgtgctggagaaggacgagactctggatgtggtcaacgggctactgcgagcacatcctgtgccagggggtccagctggagatgcaaggcccctgaaggcgcaggctccagcccggcctgcaggccgtggtgaggaggggcgcctccccagagtctgctcccccgtgaacacagagcagaggccagggtggccagcagtggctgggtccttccgcgcccctccgtcctcctttccctgagcaccttcatcaccagaggcttgaaggaaccccgccatgtggcagggcacaggcactgttcctggtgaaccttggaccacagcatgtcagtgctctagggattgtctactccagggattttcttcaaaatttttaaacatgggaagttcaaacaaatataatgtgtgaaacagatcaaaatttttaaaatgaaa

SEQ ID NO: 13824 - DNA, 431 bp, Homo Sapiens
aatatcttagtcatttttatttcccttgcaggcaatctctttgaacagaggtttattcaatgaaggaaaggtggagggaagaagggaagaattacaatggttagaaaagagcaactaaagattatttctattatacttctgaacggcaaactagcaattttaataaatattggggtccacttaaatctattaaagcagaaagggtaaagctatctccattagtgaagagatgaagtgacaaaaaccaatcagtttttggagcaactgatttacaaaatcttgtcctgaaatcaacaattagacttgcacatcatagattttcaaatgtttgctgaattgaaaaagaatattcacaggaattatttcccccgaaggtgtcttatatcaaatagatgaacttcaagttggggaatgtaaatcttttattaaaa

SEQ ID NO: 13825 - DNA, 958 bp, Homo Sapiens
tagactaagtcattaacaatgacctggtaattctttcacttcaatttgaatgatttataagctaaatcttacaaccacaaaaaggtttttatttgtattaagatgttaccacttttgacaaaaagcttaaaatattttatatttcaaaggaaaattagcaacataactttacaatatattctatgatattttgattgtgagggctactctatttaaaactgatgatctctgttgtgttgctcagatgcaggaaagcagcagaaccctggtactcccccaacaagctcctgtcgtggaccacagcttcataaggacacttaggcccccacccccattctaaaaaatacaacaaaagaacaccaaacaatgctaggctgatcccattacatttttaatgtgtagaactcctgctccagtggactgatgtgcagaggatggataaataaatttgttgactatctctccatcacccagaaatatttaatcttcatttgcactagattagtttcttattccatgaagctccataagatggaagaaaactagactcagtatttaacatatctgtttcacttgattctagatttaaaattattaaagttaaaaatctctgaaaaatcagtctcagttgggaattatagaaaaaggggcatagcaagtatacagacacatttgaatgagcatttaaaataattatttttaattttataactttctgaaaggaagtgctcgagcattttaattttatttgaaaatataaagaaagcaagtaaacattatttatgaaaactgtattatactaggaagagaattacttaaattattggaaaaacatcactgcaataaaaactattgaacactgtattgtacatttaagtacatttgaatgaactttcagtctgatattttccgtcaaaatgctactcaactaggtttgtcaggtaaatccagaaacagt

SEQ ID NO: 13826 - DNA, 941 bp, Homo Sapiens
cggtccacgctatgacagcacagcagaaacagactatcgaacgcctggaacaagagcacacaaatcgcttgcggagatgaagccaatacgcatcaaaggagaacaagagaaagagttgtccaaatttcagaatatgctgaagaaccgaaagaaggaggaacaagagtttgttcagaaacaacagcaagaattagatggctctctgaaaaagatcatccagcagcagaaggcagagttagctaatattgagagagagtgcctgaataacaagcaacagctcatgagagctcgagaagctgcaatttgggagctcgaagaacgacacttacaagaaaaacaccagctgctcaaacagcagcttaaagatcagcatttcatgcaaagacatcagctacttaagcgccacgagaaggaaacagagcaaatgcagcgttacaatcaaagacttattgaggaattgaaaaacagacagactcaagaaagagcaagactgcccaagattcagcgcagtgaagccaagactcgaatggccatgtttaagaagagtttgagaattaactcaacagccacaccagatcaggaccgtgataaaattaaacagtttgctgcacaagaagaaaagaggcagaaaaatgagagaatggctcagcatcagaaacatgagaatcaaatgcgagatcttcagttgcagtgtgaagccaatgtccgcgaactgcatcagctgcagaatgaaaaatgccacttgttggttgagcatgagactcagaaactgaaggagttagatgaggaacatagccaagaattaaaggagtggagagagaaattgagacctaggagaaaggcactggaagaagagtttgccaggaaactacaggaacaggaagtattatataaaatgactggggagtctgaatgccttaacacatcaaccccggacacgt

SEQ ID NO: 13827 - DNA, 437 bp, Homo Sapiens
ccacgcgtccgcggacgcgtgggtgaatacgcattcagtggatgaaaatacggaatggagagaacatgcacagtgtttggagaacagtgaggcaattgctgagcaggagtatttgtggaagggaggagacgttagggaagcaagtctgggaagaacagactgtgatagcctttgaagatgtaataatcagtttggactctgtccccagggacaaagggagggggtctgtcagtggcagatggacacaaacagatgtttttcaggaagactgctggtagagggctgagggtgggctggatgggagaggaagatgcccatggagggccatcaggaggctgcaacactggtcaggtgaggccatcggaggccagatgaactgtgaagatggtggtatccccactctcgtatgttgttcactcaaaataaaaattattccc

SEQ ID NO: 13828 - DNA, 672 bp, Homo Sapiens
tatttataattattttcttgatgaataaattttcaatttctcctctgaccatttcagaacatccctccaatactcataaacaactgaagtaaattgagtgctggaaaatatattcaccaaactttggtaatttaagttgactaaagtttaaaattaagtctaaaatagtttacacctatactgcataatccaacaattttaatttcagttgaagacatgttactaatataactattattaaaagagtagaggatgtgtaattaaccatatcttctaaaacatggttactaaaagaatatgtaacatcaatattgaccttggtttcttacacaagtgttgctaactcaatagtgaaggagacactattaaattttctgaacccatgagagatactagagatggggagtggaaagtgtttggttcaggggatatctgaagaacagaagggcagagatttcttaagtgacgcctcatctacaagctggaaattcctaaaaacaagtagaaagcttataaacaacaggtgatacactcacctcactggttttagtaaattaccaatacagaaagtatccctagtcttaaaaacaagtggaaaatttgaactgattagtcatattcctttgattacactgtttgttacaatatttttctcagtaaacagaaataact

SEQ ID NO: 13829 - DNA, 731 bp, Homo Sapiens
gggagctatgtacctataaacagcttgtaaaaaagcaggctggtactggtcggattcccgggatatcgtcgacccacgcgtcgggggccctttgtcctccagtggctggtaggcagtggctgggaggcagcggcccaattagtgtcgtgcggcccgtggcgaggcgaggtccggggagcgagcgagcaagcaaggcgggaggggtggccggagctgcggcggctggcacaggaggaggagcccgggcgggcgaggggcggccggagagcgccagggcctgagctgccggagcggcgcctgtgagtgagtgcagaaagcaggcgcccgcgcgctagccgtggcaggagcagcccgcacgccgcgctctctccctgggcgacctgcagtttgcaatatgactttggaggaattctcggctggagagcagaagaccgaaaggatggataaggtgggggatgccctggaggaagtgctcagcaaagccctgagtcagcgcacgatcactgtcggggtgtacgaagcggccaagctgctcaacgtcgaccccgataacgtggtgttgtgcctgctggcggcggacgaggacgacgacagagatgtggctctgcagatccacttcaccctgatccaggcgttttgctgcgagaacgacatcaacatcctgcgcgtcagaacccgggccggtggcggagctcctgctcttggagaccgacgctggcccgcggcgagcg

SEQ ID NO: 13830 - DNA, 586 bp, Homo Sapiens
  misc_feature (473)..(529): n is a, c, g, or t
aagggaccccaagaggccaccatgctcttatctcgcactttctttcctattccccttgcctgaatctggagtggggttgagccctctgccttcaaccttaagatttaggaagttctttccccaactgtctaacttggaaaggtagatgagtctgaattttgaagtaacgaatgcaaattccactcaccagaggcaatgttatttatgtacatagggatagtggaatgagttttaatagattctgtccaaacaggggtttgttcctcttatttccccaaagaaggaagttgtgtcttaggcaactttatcagtaccaatggaaaaatgataggcactacaatgaaatggcaggatgccaatatgagatatttcaggaataataagaaatacagtttgtttgtataaaataaactatctcaagaaagttttcaacgacagtgatagtgttcatttgtaagagagagttctagaannnnnnnnnnnnnnnnnnnnnnnnnnnnnnnnnnnnnnnnnnnnnnnnnnnnnnnnntggttagtccaaattgagatgtgctctaaaggacaataaaaggttaaatatcaaaaa

SEQ ID NO: 13831 - DNA, 622 bp, Homo Sapiens
ggggccgccgaaggaggggcaaagctcaagatggcggacaaaacgccaggcggatctcagaaggccagttcaaagacgagatcatcagatgttcattcatctggatcttcagatgcacatatggatgcatctggaccctcagatagtgatatgccaagtcggacacgacctaagagcccaagaaaacataattataggaatgaaagtgcccgtgaaagcctttgtgattctcctcatcagaatctctcaagacctcttctggaaaacaaacttaaagcattcagtattggaaaaatgagtacagctaagcgaactttaagtaaaaaggaacaggaagaattaaagaaaaaggaggatgaaaaggcagctgctgagatttatgaggagtttcttgctgcttttgaaggaagtgatggtaataaagtgaaaacatttgtgcgagggggtgttgttaatgcagctaaagaagaacatgaaacagatgaaaaaagaggtaaaatctataagccatcttcaagatttgcagatcaaaaaaatcctccaaatcagtcttccaatgaaagaccaccatctcttcttgtgatagaaaccaaaaaacctccacttaaaaaaggagagaaag

SEQ ID NO: 13832 - DNA, 896 bp, Homo Sapiens
  misc_feature (769)..(828): n is a, c, g, or t
aaatatgagtaagtcgtgggagtagatatgaaacagggttataagcacatctcagtgtctaattttacagaataaatacttctattctatcgcagctcacatgtaaatccaggtaggtatgtccctatcccacttagaataaaatgaacagccaagtggccaaagtttccataactttcctccttgctgacaaatccaacccgaagtctgtgcctcctagggaaaggacaggacaaaggtacaattcagttcctaaagttatttctccctctgggagagaaaggcactgtcaaagtacaaacccaagtcagcgtgctttgaaagatcatgtcacttgtttgtaataggaaatcatgtcatccagagttttgaaagtaactgtgggggcttgtggtgggttgtcgggggcaggagtgggtgacgtatgttcagggctaggtccgtggctctggtcagggcactgccctgggtcactctgtgctggcccaggtctgctccatgcctggctgctggaaaaaccagttctcttctgacccacaaagtaatctgacggcggggcaaactcaggatctctctcagcccggagatctgactgcctcttcgaccagtatccaaaggaaaattcttttccgcggtcccactcccggatgtgtggcactccaggcttggtgtccttcctctcctggacaatgacttctactttgctactctgggcagcaggacgtggggttggcacagcctctggctccggtggcaaaggcccaataannnnnnnnnnnnnnnnnnnnnnnnnnnnnnnnnnnnnnnnnnnnnnnnnnnnnnnnnnnngtcgaagtttggcaagtcttgcctctaagatagcctttcgcttttcctttatgttttctcgttttgtt

SEQ ID NO: 13833 - DNA, 1540 bp, Homo Sapiens
  misc_feature (613)..(633): n is a, c, g, or t
  misc_feature (771)..(908): n is a, c, g, or t
  misc_feature (1419)..(1428): n is a, c, g, or t
ttgggtatggaatattacttgctatcagaagatgatcaagatgtatcagtccagtgcacatcagcatgctgacattttatggatgctaaacttgtgtagtctctttcttaagatcaactttttaaaaaaataaagtgtaaattaaccgactagagtacttggaaaatgtgatcagtacaagtgaacttaggttgttgccaacagggtccttttaggcagaacccagaaaccagtcaaatctgtagagaagcagtgtgacatcttcaggttaccattattttttaatgagcaggaagtctagaaatgataactagactgtatgtttcatgtgtgtgatttttcagaattcccagagtttactcattcttgttattaaactctagccagttgacatcttcgcaatttcaaggactgatagtgctgtattttctcacgttttctaagtttccgttttgcaaggcctaggtgactttttcatggtgtttgtatgtttagctcttttgaaaaggaattttgaaatctccatcaactgaagtaaatgatgtctgagtgttacagtaaaggtgaccaagtctctttcttaaagtcacaatgactaaagtattagttgaannnnnnnnnnnnnnnnnnnnngatggagtctcgctctgtcaccaggctggagtgcagtagcacaatcacggctcactgcaatctctgcctcccggtttcaagtgattctgctgtctcagcctcccaagtagctgggactacaggcatgcgccaccacgnnnnnnnnnnnnnnnnnnnnnnnnnnnnnnnnnnnnnnnnnnnnnnnnnnnnnnnnnnnnnnnnnnnnnnnnnnnnnnnnnnnnnnnnnnnnnnnnnnnnnnnnnnnnnnnnnnnnnnnnnnnnnnnnnnnnnnnnnnccttgaatttttaattttatctctgatatacttcattaagtgtctggagacctaattatcctaaaagatcatacattttctacctatgaattttgctgcatacagaaaagtgccctttcctcaagaagttgctgtgtttcatttctttggatggactcttatctagaatacataggcagctctgcaaagaaaacagttttttaaaaatgggaactttctacattgaaaagtccccattttcttgtgccaacttatgatttagtgagagggaagaaatctttattctatgggcatattgtatggaaagggtgtaaagattcttttgaaaggtttattcacattgtaggacagcaaatgacatttttacagtatttttttgtaaagcaaactattttgtgccttgaatttggtatatgtgtattagtgaaacattgtaaaggtgaacttctacctctgtatctaaatgtataccatccacttgtaaatgactataaactattatgtgattgcnnnnnnnnnnagaatgtcttgtttaaatagtggccaatgtttaaggctgttaaaataagccaacttttactaattggggagttttattaatgactgattaaatttaaagaatttactccgaa

SEQ ID NO: 13834 - DNA, 814 bp, Homo Sapiens
  misc_feature (507)..(507): n is a, c, g, or t
  misc_feature (512)..(512): n is a, c, g, or t
  misc_feature (514)..(514): n is a, c, g, or t
  misc_feature (516)..(516): n is a, c, g, or t
  misc_feature (518)..(518): n is a, c, g, or t
  misc_feature (521)..(521): n is a, c, g, or t
  misc_feature (523)..(526): n is a, c, g, or t
  misc_feature (528)..(529): n is a, c, g, or t
  misc_feature (532)..(535): n is a, c, g, or t
  misc_feature (689)..(697): n is a, c, g, or t
ggggatgacgcagttagtcggctgcaatggcgccggtgaggcggtccgcgaagtggcggcctggtggtattgaggcgcgtggtgaaggggtttccactgtcgggtacaggaataagaatgtgagacagaagacatggcggcctaaccacccgcaagccttcgtggggagcgttcgcgagggacaaggctttgcttttcgaagaaaactgaaaatacagcaaagttacaagaaattgctacggaaggaaaagaaggctcaaacgtcactggaatctcaattcacagatcgatacccagataatctgaaacatctctatttagctgaagaggaaagacataggaagcaagcaagaaaagtcgaccatcctttgtcagaacaagttcaccagccgttgcttgaagaacagtgtagcattgacgagcctttatttgaagatcagtgtagctttgaccagcctcagccagaagaacaatgtattaaaacagtaaactcctttacaattccanggaanananancancnnnnanncannnnaaacttttttggccggccttgggcccttccaaaagctttttttaaaccattccttttgggcccccgggccccataaggttaaatggaacctgtggcctaaacctgggttccctagggaaaacccttgggccatggacttaaggctttgggattnnnnnnnnnataaaaaaacccgcccggggggacaaacgaaagcgtcctttgaaccaattccccaatagggagtttcctgggggcccctttactggggaatcttattccccccggggagtccccacc

SEQ ID NO: 13835 - DNA, 793 bp, Homo Sapiens
  misc_feature (485)..(515): n is a, c, g, or t
  misc_feature (517)..(517): n is a, c, g, or t
  misc_feature (519)..(539): n is a, c, g, or t
  misc_feature (541)..(544): n is a, c, g, or t
  misc_feature (546)..(548): n is a, c, g, or t
  misc_feature (550)..(552): n is a, c, g, or t
  misc_feature (559)..(560): n is a, c, g, or t
  misc_feature (562)..(562): n is a, c, g, or t
  misc_feature (606)..(607): n is a, c, g, or t
  misc_feature (613)..(613): n is a, c, g, or t
  misc_feature (669)..(690): n is a, c, g, or t
gggacagactaatggagttgcattttaaatatctgggtccaatgcaggtggcggacaagaagattgaagggcaaaaacacgacatggtccggcgaggagagatcatcgacaatgacaccgaggaggagttctacctccggcgcctggatgcggggctctttgttctccagcacatctgctacatcatggccgagatctgcaatgccaatgtcccccagattcgccagagggttcaccagatcctaaacatgcgaggaagctccatcaaaattgtcaggcatatcatcaaggagtatgcagagaacatcggggacggccggagcccggagttccgggagaacgagcaaaagcgcatcctgggcttgctggagaacttctagaggcaccttggccctgcgcatcatggactctctcagcttccctcccaggatcagtttctacacaactctgtgtggcttttggacaaattaaagctagttttggtnnnnnnnnnnnnnnnnnnnnnnnnnnnnnnntncnnnnnnnnnnnnnnnnnnnnncnnnncnnntnnnccctttnncntccccccctccttctcttttcccctttgaaaccctcctcccccnncccttnctcctcccttttgtggggcgcccttcgggccctttaaaaaattcttctaaaaaccnnnnnnnnnnnnnnnnnnnnnncccccgtaagggaacgggcaaactggggcccaacacggtttccccaggaaaaaacccggggaataaacataaggggcctgggaattctcccccccaataaaaa

SEQ ID NO: 13836 - DNA, 1059 bp, Homo Sapiens
  misc_feature (588)..(631): n is a, c, g, or t
ttcagataactttgaattgcattcaagaagtacacttctttcccattgtccgtggctctgggagtctccgtgatgccaggctagagtctgattatataataattcaaaatggtaactcccaaggtaatgctttcttccatttcatcaggttcttttatccccactgcaccccctccccttctcccttgcctatctggatggcttctcagaagctcggccctagtcctccctgccttggcggggccagagcccactactgctgaggcagcactgctctcgtcagctgtgttgcctttaccaagtgtcttcagagggttatgagttagagtagctggcctggggagagggtgcctccctgggtttgatctttagggtctgactttctgcagagaagatgttttacagatgtgtcaaagctgatgtaatgtggatgggggaggaaatccagacccaaagtgtttgtcagctgggtgtacaactgcctatgtgatcctctgtcttaaaatgatttctgtctgtgctgcgaaacaaagacaaggtgaggtgtataaactttagtgtaataatataaacgctgtgtgtttctgnnnnnnnnnnnnnnnnnnnnnnnnnnnnnnnnnnnnnnnnnnnnggggcgcacccaacaacgaactcatccgcagaggcgaacacacataataaccgtatccacaagtaagcaaggaaaaaacagggaaccactatagtaagggcgagaacaaaaacacggaaacacgaggccgaactgtatccaaacacacgaagaagagcggcggcaaccagatgaccacaagcatggcaacacccaaggacaagagagaaaaaccagctcaagtctcattagagcgcagacccacgagtcgggaccccacaatagccactaaaaacaagaacacagcacacagccccacgagaataacacatacgcaaactgacaagcgaggataaccagggttcaagaaaccgcgctcacacacagccggcaccagaaacaaagctggcggcataggcggcaagaaacacacgccaacacatgacagc

SEQ ID NO: 13837 - DNA, 1120 bp, Homo Sapiens
  misc_feature (161)..(161): n is a, c, g, or t
cgtgtaaagactacacccttgaggcgaccgacagaactaacccctgtaacatctaattcagatgaagaatgtaatgaaacagtaaaggagaaacaaaaactatcagttccagtgagaaaaaaggataagcgtaattcttctgacagtgctatagataatcntaagcctaataaattgccaaaatctaagcaatcagagactgtggatcaaaattcagattctgatgaaatgctagcaatcctcaaagaggtgagcaggatgagtcacagttcttcttcagatactgatattaatgaaattcatacaaaccataagactttgtatgatttaaagactcaggcggggaaagatgataaaggaaaaaggaaacgaaaaagttctacatctggctcagattttgatactaaaaagggcaaatcagctaagagctctataatttctaaaaagaaacgacaaacccagtctgagtcttctaattatgactcagaattagaaaaagagataaagagcatgagtaaaattggtgctgccagaaccaccaaaaaaagaattccaaatacaaaagattttgactcttctgaagatgagaaacacagcaaaaaaggaatggataatcaagggcacaaaaatttgaagacctcacaagaaggatcatctgatgatgctgaaagaaaacaagagagagagactttctcttcagcagaacgcacagttgataaagacacgaccatcatggaattaagagatcgacttcctaagaagcagcaagcaagcgcttccactgatggtgtcgataaactttctgggaaagagcagagctttacttctttggaagttagaaaagttgctgaacctaaagaacagagccagcactctcacaacccaaacatgtaaaaacgtaccggatggcctctatctggaattcgcagagaaatttcctcaagaaacgaccttcagccgaacgaaacttcccggaccacgatacaaaagtccagccataaccgggaatctggccgaataatacgaaaccctcccccaactttcaccaaccaatgttctttacacatgggacccatccggtatgcaatccttccctcctgagggcccctggaaaaattca

SEQ ID NO: 13838 - DNA, 425 bp, Homo Sapiens
  misc_feature (214)..(227): n is a, c, g, or t
gggactctagtatgtaaatgttacttgaatctgtgcttcataatagtgtgtggcatgtatgtgcagactcttggatgctttatgcctgcgcagcaggagccctgtcctcacgttcccaggagggcggcttcacccttcgtaaccaggagacaaggcggccatggatttgcccttgattctattttgctaatggaagatagaaaggagagaaggnnnnnnnnnnnnnnaacattctgaagatggtgctgtgtcaagaaggaccttttttttcccctctcccctattttttaagtaccttggaggaggagaggttggtgacatgcatggtggggatctatggcctctggtgctttgtcctgtatttggtttaatgtttttgtcctaatctcttcaatcaataaaattgtgcgtatttaactaaaaaa

SEQ ID NO: 13839 - DNA, 919 bp, Homo Sapiens
  misc_feature (841)..(853): n is a, c, g, or t
ggagttgatgacgaggtgcttgctgaaggatccccacgttccctgtctcaagtgcctgatgtgacacatcacctggtgaccatgcagtcagggaggcaatcatatgaagtttctgtcttaactgcagtaaatccacaagagttactaaaccaaggagattttaactgaaagacggacatgagcgtgggtgctgactcctggaagagcaactctatctgatctcaaaatgcgtatactgggaacaggatgccttagcccacaacagaaccagaatgaatctttgaaggcacaagactctgcttttgccactcttcctctttcctggtatagaagatggatgtaggagagcttcttttctaactaccatctgatcagacaaggaatgaagcaatgactgtgggctgggaaactgtacctacctctcttcccactgcaaatttctgggatagaccaaaagtgaatttgattatgtgttggctgaagttcttcattctgactgttgaggggaggttttcctttgaagagttttcatcccagactcagctgtcttttcacatggatgaaataattcctgctaccaacaacagagcttcaccaggaagttgagttttcaagatgccttgttgctttgaagaagggagtgatgtcaattctcttgttacattctccctttagcaacctgagtaagagactctctgccactgggctgcaaaaaaataaattacttgaatctccccttggcccaggctgaggtactatcttgtcctatacacttctacttggtcactttgctttcttcgttaatggaacatacagtagcatgttaagagggatttcatgnnnnnnnnnnnnnaaagttaaaaattacatgatgcagagattcaggttttcctttaaataaacaaaacagcccagtcaa

SEQ ID NO: 13840 - DNA, 355 bp, Homo Sapiens
gggggcgctccgccggccgccctgcgtacgctcgcaaggcgctcgcagactccggagtcgccaacatgtcgaccgccatgaatttcgggaccaagagcttccagccgcggcccccggacaagggcagcttcccgctggatcacttaggtgaatgtaaaagctttaaagagaaattcatgaagtgtcttcataacaataattttgaaaatgctttgtgcagaaaggaatcaaaagaatatttagaatgcaggatggagagaaaattgatgctacaagaaccattggagaaactgggatttggagacttgactagtggaaaatcagaggcaaaaaaatgaattttgatgagaagacc

SEQ ID NO: 13841 - DNA, 779 bp, Homo Sapiens
  misc_feature (541)..(552): n is a, c, g, or t
gggggactgaagggggaccccaaaactggctcaccccccagaacaccctcctcccagggagggtcctccagctcacctcatgcttcttatttggggagagggctgtgatgtaaaggggttgacctcagaggcctaagcaactggggccatcccccccattagaggggcccccaaaacttggttggagagctgaacaggctgggactgaggaaagtataaaccccgatattgggacctcacagtgggtgtctgaaaggacagatcactccggagtatcagggattgtggggacaggagtgagacaaccccccaggtacagcactggcttttcttttcagcccctgacaggccacccccactcctctgcatgtcttggagagcgctagttacacattggcttgtcccctttactttttcccagccacccctccccctgaaatttctgcccctctctaccaccctcactccatgacctgtgagatcacaaagtgaagatgaaccctttctgtgcaggagcaaagccaggtgggcccctggacannnnnnnnnnnncttaatataaccagatatttataaggggctgctaggggccttgactttatctccgcctgcccagaaagcggggttgaactctccaatcctcatcccctctcctaagtgaacccccggaaccttcacgggttcccttccctcccctttaaagatttgggtttgtcttggggccctgaccccaaggataaaagccttttttctcccccacataagcgaccccatatccc

SEQ ID NO: 13842 - DNA, 870 bp, Homo Sapiens
  misc_feature (154)..(163): n is a, c, g, or t
  misc_feature (390)..(402): n is a, c, g, or t
gggcattgtaataaaaggtgtctttccctgtagtgacctgtaaaaagtactcaagggctttattacagacataccctccctttgaaaagggacatgctaaaagactcattactactcagccttcaatgtacctgtgtgtccatcttatatttcnnnnnnnnnnaattgtgaattagacttgtatatcccactgggagcactttgtaggcattgcatgaaccatgggatgatgattctgtggaggtattgccttgtgaatttgctgctattttagttttgtctttgctgtaaacttgtagcattaaacaatcattgttgttaataggtcttctttttgaaacaattatgtgaaatgtatagctgcttttgatgaaaagcagctatttgccnnnnnnnnnnnnncctttgaactttgaagctagtgcattggaaaaatgcaccctttccctcctttggaatgctgtattaatgtagtataataattactggttttgtaacttgttctggtaatgtccttcccggactctttttaaatgtctccccctaagttttatacttgattgtattattagtctgtttttaaatgttttgcccggtttttctcttcaatatttgtgtatataaaccgatcttcgtgatactgtacatagctgtttgaaatgccagaatgacttctgacattccaagtttttcacaaaatatattttatctgtgattagccatttgactaataatactggctaacagatgttgaaaaaaattgtctgtttgttttctcattaattttggtctaaaacatgtttgcacttgtctttgacttgtgttttattaacattgattggcatattaaaagtcactctgagcttaaaa

SEQ ID NO: 13843 - DNA, 1070 bp, Homo Sapiens
  misc_feature (777)..(780): n is a, c, g, or t
  misc_feature (785)..(830): n is a, c, g, or t
gggtcccctgattcccaatgctgttttctaggctgagtggtttccaggagctgcctggtgtctgctgtaaatgtttgtctactgcacaaggcctcggcctgcccactgagccaggctcggtaccgatgcgtgggctgggctaggtccctctgtccatctgggcctttgtatgagctgcattgcccttgctcaccctgaccaagcacacgcctcagaggggccctcagcctctcctgaagccctcttgtggcaagaactgtggaccatgccagtcccgtctggtttccatcccaccactccaaggactgagactgacctcctctggtgacactggcctagagcctgacactctcctaagaggttctctccaagcccccaaatagctccaggcgccctcggccgcccatcatggttaattctgtccaacaaacacacacgggtagattgctggcctgttgtaggtggtagggacacagatgaccgacctggtcactcctcctgccaacattcagtctggtatgtgaggcgtgcgtgaagcaagaactcctggagctacagggacagggagccatcattcctgcctgggaatcctggaagacttcctgcaggagtcagcgttcaatcttgaccttgaagatgggaaggatgttctttttacgtaccaattcttttgtcttttgatattaaaaagaagtacatgttcattgtagagaatttggaaactgtagaagagaatcaagaagaaaaataaaaatcagctgttgtaatcacctagcnnnnaaaannnnnnnnnnnnnnnnnnnnnnnnnnnnnnnnnnnnnnnnnnnnnnaaaaagggcggccgctctaaagaatccccctcaaggggcccaagttaacgggaacccacttttcttgaacaagggggcccctatagggggccgaataaaaagctaggacttgggcctcctttttacaaccgccgggactgggaaaaactgctacctggggaaccttggggaaggaaccttaacttctggggggggacataattgggacaacctcccctcgaagaattaaaagctcctagg

SEQ ID NO: 13844 - DNA, 1338 bp, Homo Sapiens
  misc_feature (790)..(790): n is a, c, g, or t
  misc_feature (795)..(892): n is a, c, g, or t
  misc_feature (1027)..(1036): n is a, c, g, or t
  misc_feature (1246)..(1291): n is a, c, g, or t
cagatattttctatgggctgtagcagtacactgaattgtactgtgccagggatattgagatgctctgggggtgtattgtatacctgccagttttcttcatttctgaattgagttttcttttcttgatgttggtttccttcatatcacctcaaggtttagatttgtgaaggaataagcatgatggaaataatagtcttgaaaggagatatgttgtatataatcaggaggaagaggaaggaaggacttacccattttgatatattagctgtaggtggccagttttgtttctcatagggaaatctgacccacctgtcatgttggctcctaaggaactgctgttgtaagcggctcatcaagagttgaacttcacgtagccttgttgggaatatggaaaaggaagaaagccacaggactgcccattcagtcttgggaagattgggatgattctgcacaagcaaaaatgactgaagtttatgtatagacacacctctaccaatccatcttcagctgactgaatgttgtatgatagcccttctccaaagcagaggtagaatgttcaggtttcaccatggattttctacttatttcgtttttggaatcaccttacagattccaggtcccttttgtatatattctttattcttttgcttttttaaaaaataattttgtttcatatttaaagcacttgtattagtcaatgtttcgtgttccgcattatttgaaccatttgcccttacagaaagagaaatacttgtttgtgttttaaataaaactgatgtaggaaagtccncaccnnnnnnnnnnnnnnnnnnnnnnnnnnnnnnnnnnnnnnnnnnnnnnnnnnnnnnnnnnnnnnnnnnnnnnnnnnnnnnnnnnnnnnnnnnnnnnnnnncctttgcggcccccccggcccttaaaaaatttttcaaaccttttctttggggcggcggccccatagggaaaggaaactgggcataactggttcccaagaaacccggggtcagaaaaaggggctggattctccccnnnnnnnnnnccccggggggcaacgaagcttttgaaaaaacccaaaagggaattccggggggctttaccggggtttaaccaccgggattcccagccggatctcttttattaattttaccccccgcccttgcccttctcttccaacaaatgggggtgaaaataattaaaacccttctcgccccaaatggcgaaacccctcccaaaagcgcggatgtgtaannnnnnnnnnnnnnnnnnnnnnnnnnnnnnnnnnnnnnnnnnnnnntttggcatatattttatctcgccccctgggggaaaaaaccggggcgg

SEQ ID NO: 13845 - DNA, 1136 bp, Homo Sapiens
ggctccaaagagtgatcactacaccattcaaagagatctcgatgggacctgctccctccataccacagcctccaccctagatgatgatgggaattatacaattatggctgcaaaccctcagggccgcatcagttgtactggacggctaatggtacaggctgtcaaccaaagaggtcgaagtccccggtctccctcaggccatcctcatgtcagaaggcctcgttctagatcaagggacagtggagacgaaaatgaaccaattcaggagcgattcttcagacctcacttcttgcaggctcctggagatctgactgttcaagaaggaaaactctgcagaatggactgcaaagtcagtgggttaccaaccccagatctaagctggcaactagatggaaagcccgtacgccctgacagtgctcacaagatgctggtgcgtgagaacggggtgcactctctgatcatagagccagtcacgtcacgtgatgccggcatctacacatgtatagctaccaaccgagcaggacagaactcattcagcctggagcttgtggttgctgctaaagaagcacacaaaccccctgtgtttattgagaagctccaaaacacaggaattgctgatgggtacccagtgcgggctggaatgtcgtgtattgggagtgccaccacctcagatattttggaagaaagaaaatgaatcactcactcacagcactgaccgagtgagcatgcaccaggacaaccacggctacatctgcctgctcattcagggagccacaaaagaagatgctgggtggtatactgtgtcagccaagaatgaagcagggattgtgtcctgtactgccaggctggacgtttacacccagtggcatcagcagtcacagagcaccaagccaaaaaaagtacggccctcagccagtcgctatgcagcactttcggaccagggactagacatcaaagcagcgttccaaccttgagcgcaaccccatctcacctgacactgaatactgccttggtagaaagtgaggacctgtaatccagcattcttgttaaagctgaaacactgaaacagccattgccttgaccaacatattcctttgtcacattatgtaaaaggcagaaacatacctttgactata

SEQ ID NO: 13846 - DNA, 485 bp, Homo Sapiens
ggagggtcttcttaactagacctgaacaggccacagtcagtatcatattcacttagaaggataccagcctggaaacaaagcataccagcaggggaccatagggcatctctcctccagtgaacatctaagcaggccacaccgccaataaggacctagttctcttctagccctccagatgacagctcaggttcaagggaccaagactcacatccagtgggttttttgagaaaatatattgcaagacagttcaagactagatcatagctttgaatgatagcataagacatacagacttttattttttactatggatgatttccaagcaaggggttagcattgattgaagttctaggaatgttaatatgtcagtagtatgtaagagagctaaaattagagagagactagaggcagaaagactattacattccattagtggaataataataattatgataatagcagcagccaataatttttcttagcaa

SEQ ID NO: 13847 - DNA, 189 bp, Homo Sapiens
ctcatcttcaaaatctctctgcagagtagtgcctttagataaggaaactgcggcacagcaacattatagaactcacgaagaccattcccttctgtgtgactccattagatggactggatcaggctccaaacaggagccagtagttcttgtccataaaggagctctggcaatgaattctgcagggtgccg

SEQ ID NO: 13848 - DNA, 767 bp, Homo Sapiens
  misc_feature (76)..(76): n is a, c, g, or t
tccaataaacatttaacagcagtgacatctttactctgagatctaacacgatatattgtgatttcagctctgaganaatcatctgatggcaatgataaaaatgcacaccaggaaaggaatcactggagctatagaataaaaattattccatgtgacgacagccccaaatgaatttctatttggatttgcataacggcctttcaaatctgtgtggggcacttctttttttctagaggcagtgcaggcttccttaagtggtagccaattagcttgtggagtcagaatctctacctcattccaggaatggagccagatatgacaaataaggtggaaattgtgcaatctctatgagacactgtttgtattatcatttagactgaaaatcagacaaaaagcatgagagcaggtaatattattgatccagacctctcggttcctatcggcatcatggaaggaaatacaagtggttctagtttcaatttgctggggccccacttctgtgccctagaggagaatgatgtggaacaggatttgacaaaatggggagacaaactgtatttggcaggtcattgctgatgtgctgtcatttgggtctgcttgtcagggttggttttgtcttacagccaccttctacttctcagttgttaatagaacctgctaggaacgcagaagagaagggccaagggagccgatcacaagtatctgggcagatcatctaaaccagtggtcaaaagttacaatgtccaacatcaaatattctgatgtct

SEQ ID NO: 13849 - DNA, 539 bp, Homo Sapiens
caagggagaaaaggattaataacctaaactatacacacccaaattgtcctgtaaagatactttcaaacatgaagtgacagcttttacacatggtttcttgcaaagctaacaaaagatagaccccaggaaaatgaaggagcaagccaagaaagaggaagactagacagccaggtaatggggctcccaggaggagagaggtgaaagaaacccccaagagggagggtaggttctacaagaggctacagtatttacatgatgcagttgtatgacttctctgcaacaaatctggtcatttgcagtgtttctcatccagatctagagtcacaactcattagagctggaagagatcatttcatttcatttccctctgtttacaggtgagaaaattaaggttcacaaaaacgtagtagataaagacacagaaccaggaatagaatctaaatctcctctctggggagctgtagtttgagttactgtgtcagatcttatcagcaggttgattaatatagagtatcacagttttatgtttacgctaagtg

SEQ ID NO: 13850 - DNA, 588 bp, Homo Sapiens
  misc_feature (53)..(160): n is a, c, g, or t
  misc_feature (461)..(472): n is a, c, g, or t
aacaagagtgaaactctgtgtcaaaaaagcaatcaaatgatccaacaaaattnnnnnnnnnnnnnnnnnnnnnnnnnnnnnnnnnnnnnnnnnnnnnnnnnnnnnnnnnnnnnnnnnnnnnnnnnnnnnnnnnnnnnnnnnnnnnnnnnnnnnnnnnnnngagttactgcttttagctcacagaaagatttgacatatggtattgtcatagttcaaaaccatgactagtcttgtgttgggagactctaagataaatggtaagaatgtagtcttttaaaatggttaatgtttatttcagggttttttctactgaagttatatcagcactacttctttaaggttaatgagacgtttaactgaatatactaatttttcgtatctttgtgaaaagttagtcattggttaaaaaaattatgtcagaaactagtctaggcactagaaatacagtaagcaaaacagcnnnnnnnnnnnntctcagagtcagtgagcttatgccatagtgggaggaggagcagaaaaataacaagtaaaatacaggtgataataagtgctgtgaggagaataaacagaaggatagaaatggttaag

SEQ ID NO: 13851 - DNA, 607 bp, Homo Sapiens
  misc_feature (41)..(67): n is a, c, g, or t
attgcactctagcctgggcaacagagcgagactccatctcnnnnnnnnnnnnnnnnnnnnnnnnnnnttgggcagaggatttaaatagccatttcttcaatgaagatatataaatggccaataagcacatgaaaagatgctcaccttcattagttattgaagaaatgcaaatcagaaccacacctaattgaatggcaataataataaggaaaaggaaaataagtattggcacagatggaaattagaaccctaatgcattgctggtaggaatggaaaatggcacagctgctgtggaaaagtttggtggttcctcaaaatgttaaacgtagattgaacctgcaattccacttctagctgtatacccaagagaactgaagacatatgcccacatcaaaactcgtccaaaaatgttcacagcatcactattcacaacagccaaaaggtagaaacaacccaatgtccatcaactgatgaatagataaacaaaatgtggtagtacatccaaagagtggaatactaattcaggcataaaaaatagttcagccaaaaaggaatgaagcactgatatatgctacaacatggatgcatcttggaaatactatatact

SEQ ID NO: 13852 - DNA, 482 bp, Homo Sapiens
atcgaaagggaatcaggttaatattcctgaaccgtgtcactcttcatcggtaacgagtgtcagattgaagacattgatggtactcctgggaagagttgtcttttcttgttaacaagtggttgtgcttggaataaactcagtttgcgagaagcatgactgtttggtaaaggttcgcttggagcgaactccggtgcagtatcatgagtccttgaaaattgaatctggctatggagtgacacgttcgtactaataaccgcatcaggtctccaaggtgaatagcctctagttaatagaataatgtagataagggaagtcggcaaattagatccgtaacttcgggaaaaggattggctctgagggctaagtagtatggcagtgatgagttaacggcttgtcgcgtggttggtggttgtggcttcggctgtgatgaatggctatgtgatgaaaagagcgctcgtcgttgttggctacaatgaatagct

SEQ ID NO: 13853 - DNA, 574 bp, Homo Sapiens
ccaattcattcatcatatataatgaaataatcaccaagactgaccgaagaaatctttcgtagagatgaccagatgcaacggagaaaatattaattatgtcatctttatcttgcttcacttcctcagtcttctgtcctgtaaagcccctataacaataagggtaaaaaaaagaccacttgaaacactcatacagacacacggcctttgaaagtaagaggaaagagactgcgcttcccatccttccctagcgggtgagctgcagcaggagtggttatgaagcttccctcacaccctgaagagaccacaagactgacaaaaccaacctacaaaaagaatgttcactctccgacagtgttgttttaggaagagactgaacacaggctgcaccagaatgcaacttacacaacgggaagtaaactgagcagggagcagtcaaatttccaaagagcaggtacaggcaatgagagtcacaaagtatggagcagaagtaacttccccactaggagacatgaacctcttttggatcaatcgagtggaaaatactcatctatgccaaatataagtggctagagca

SEQ ID NO: 13854 - DNA, 338 bp, Homo Sapiens
agaagcaaagatctacgcgtgacaccgcggcgaccaggagcgccaacaccaagacaggccatttcagggtcgcaggatgcagggacatttgtagttcacacgccaaccatacttacatatcccttttataaaaacaacgagtatttaaagggagccagcctgggatactgtgctgggacccaaggtccctccagcagctcactggctgctctgcgtagaggatgagagtgcctctcacgaaagggatgcatattcctggggttgaatgatcatcaaaacgatgatggcacccactctctaccaattcaaattaaaaatgccaagcctcggccaggcac

SEQ ID NO: 13855 - DNA, 327 bp, Homo Sapiens
tgtcttggctacttgggaggccgagacaggaaggaggattgcttgctctaggtgacagcaagacccttgtctcttggaaaaaaaagtgtttgaagtttctattactctgttgtttcttataatctttaattattttatctttgtttgttcacttgtctgatatatctcccctcccccattaaaatatgatcttctgtgtagaaatcttgtttttcttatctctagggcttcgaacagtgccttgtacgtaattggcattcaataaatatttcttagtaaatgaacgaacatttttatttcacatttaggttgacttagttgactaat

SEQ ID NO: 13856 - DNA, 290 bp, Homo Sapiens
cccttgaatgcagctaccatgctgtgaggaaacctggactaggccagctggaaagaggacatggacaggcctatttggggaggagctgagtgaggccccagtgacagcaaacatcagttgtcagatgtgcaatggatgagccttcagcaggctctgctgtgcccttttcaaatgcatatttattatgcagccagagttggcagcaagcactaagctgtgacagtgcatgaagtaatttaattggtgaggcccattcttgcaactacgtaagtggctagagcacccgggtg

SEQ ID NO: 13857 - DNA, 520 bp, Homo Sapiens
aataattctgttcattagcagctagccatctttgatgagtgctgacttctctcctttcagcacagagcaggaaatgcctgcctcccatgactctgggctggagtgaaggggaatgcataccagccaccctcttgcagaggtggggcaggtgctggcacagagcctcaggttaggccgaggggatgcaatctcagatcagcagccagcagtgtttgtaaacaacaggagggagattgtgctggtgatgtccaactcacaccaatgaagatcaaccggtttgtgctttgggcagcaggctgcagatggacagtgcctcctgagggcatcgccatgttttagggatccgtgttgcaggatacctgtctgcaagagagagtcaaggagggctttttaagcccctggggttcaggcctggcatctgggtgttaagtagagtgaatctcctgaagtccaaactaacatatgacattttaaaatgaggaaaacaaatggctctgaaaaggtctataggattataggt

SEQ ID NO: 13858 - DNA, 556 bp, Homo Sapiens
aagcagatatgacttctcaagttaacgtttttttaagtgatttccattcatcactaattccaaacaaaacaattacaaactatcataaaattattagaaagtgaaaatgggaggcattggttaaatatgtatttagtatgcttcatcatgtcctcaaacatatttaaaaagttaatctacacttctttaagtgtcctgggggacttgctttagattaagaaatatgttaactatttcaggacccttctttaagtatattgggagacttgctttagattaagaaatatgttaactatttcaggacactaaggactttacaaatctgaattagctcatattggctgctatctcctcaatattttctgataaataagaaacaaacagtaaatagcaacttccacaaaatctaccagtagtacacaagggcagccaaacttcaaaattcttgccactcgacaactctagatggttactgtttactaaaatgtaaataataaaaagacttttctcaatcttgtcctccagaaagaaaagccataaagttcaaacactaacc

SEQ ID NO: 13859 - DNA, 454 bp, Homo Sapiens
  misc_feature (209)..(209): n is a, c, g, or t
  misc_feature (307)..(307): n is a, c, g, or t
agcatgtgtgtgtgtgagtaatgtcactactaggagtagtcatgtggactctaatactgctccggctactacttcaaagatgtaaatgttctggggtcagtctccccaagtaccccctcattgcctcctctggcacaattcttaatcttggccacttccttaagagtgcccatgacacttcctttcagtccctcagttcctgatcattntctccgttctccatttgttttggaatgctcagctagctgatgcccgagaaggcagctgggttggtaattacacttctctgcttgctctcaccactatntcttctcaagaaagctcttgtggctgagggaaatcgctcttaaaggttggggagaaccttgaaaagaattctgaagtggttgggagaggagtgtgagctaagtttgcagagctgagctagccagcaaagtcgggttctcagtgggga

SEQ ID NO: 13860 - DNA, 438 bp, Homo Sapiens
gtagttctttgattgcaataacattccaaagctagtcctcatgagtgatacctttataaggttacacttgcgtttcttggtatgataactagatttctggtttcttgtagaacattttcctaagtccagcatggagaataggttatatcttacatatcaactctaattaaatggtgtagcttctgtagtttggcattaaaaaggattaagaaactccatgtgggttttagtgggaaagaacattctaattgattaatgatgtctgctgtggatgtcgaatgctggtgaattgtttatatgccatagactctgccacagctgctggaaaacattcttcttgccttttcttttaacatacagctaaagtgacagagaagacaactagaatatgcaaacattcaaaactgctgttgacaactgctctttgttgtcaaaact

SEQ ID NO: 13861 - DNA, 349 bp, Homo Sapiens
tcatagttaatgagatatgatgggccctgtgggaagcaaagttcaattatgactttttgttttacatatccatggaatccttggcccggtgtctcccagtaactgtctaatatgtagctttgtctttgtaagcttgtattatctctccaagatacagatggtttttgtgatcttaatctatttcgttggtaatatcttacttaaatttttgagtctcatagccaatgaaagcaaaaatagacaaatgggactgcaacaaactagaaaacttctgcacagcaagggaaacaacagaatgaagagacaactcacagattgggagaaaatatttgcaaatcatacatcagat

SEQ ID NO: 13862 - DNA, 661 bp, Homo Sapiens
ccggacatcaggcgcacggtgccaactgcgccacctgcaggccaagaagaagtttgtgagaccatggtgctggtggtgctgacgtttgccatctgctggctgccctaccacctctacttcatcctgggcagcttccaggaggacatctactgccacaagttcatccagcaagtctacctggcactcttctggttggccatgagctctaccatgtacaatcccatcatctactgctgtctcaaccacaggtttcgctctggattccggcttgccttccgctgctgcccatgggtcacacccaccaaggaagataagctcgagctgactcccacgacctccctctccacgagagtcaacaggtgtcacactaaggagactttgttcatggctggggacacagccccctccgaggctaccagtggggaggcggggcgtccccaggatggatcagggctatggtttgggtatggtttgcttgcccccaccaaaactcatgttgaaatttgatcccaatgtggcagtgttgggaggtaggggttagtgggaggtgtttgggtattggggatggatcccttatgaatagattaatgccttccagttgaagtgaatcatcactcttgtgggaatggactagttcccaaaataacaagttgttagaaag

SEQ ID NO: 13863 - DNA, 753 bp, Homo Sapiens
  misc_feature (696)..(696): n is a, c, g, or t
attttcccggttgttttttggaaagccccccttcccgggcagggccaacccaggctttcggggggccctccccttgggggctgggaactttgccaggaatgcccctttgggaaaatggtttttcccccgaaacccttcccttttcaggccttgggagacgtgggccaggggaagagccaggttccttcagagcccaggcctggcagtggtgctagcaggggccaaggccccagggagcagggtttcccgtcggagggacctgggcaaagcccctccacgcgccagcgggtttctcagcaggggaggtccacaccacaccgcttgggaacctgggtgcctaaacgcaacaggagccaaggcacaaatttaaccaaacaccaaggttgcgtgaggccccatttcatgagccgggctccaaggacgtgtccttaggcggctctggaaggcccagcgccagcccccgtcctctgttaaagggagccagccccgcggctccgcccaggcatggtagcctgagcgcgcccccagggtagtagggggcacctgaggagcagggtctgccctggcatgagcagagcccaggatggggtcagggtcaggccctgccagaggctggagggtgcccaaggcgaggccggtgaggcccagctctacaaataaagtgttttatttacaggagttgtctctccaggttcnccagcttccctgccacccccaccccagccatcccgggaattccggaccggtaccagc

SEQ ID NO: 13864 - DNA, 748 bp, Homo Sapiens
ggccggtaccagacttctgtccaccagactgggtatctgtaaagaaaagaggtttaattggctcatggctctgcaggctttacaggaagcatggtactggcatctgcttggtttctggggaggcctccggaagcttatagtcatggcagaaggtgaagggggagcaggcacatcacatgacaaaagcaggaacaagactcagagcaagaagtcacttatcaccaaggggatggcccaggccattcatgagggatccacctttgtgctccaaacacctcccaccaggccccacctccagtattggggattacatttcaacttgaggtttgggcgggaacaaatagtcaaattatattacccatctacatggttttctttttcttagtatgggagtgtccatgaataaattcatgggcatcctcataactcttccatgaatggcaaggggtacttatggaaaacagttttccaaagatctgattgttttgaaatgtgttagattggacttgttcaaatgttcatatttttgttctatgctaaatgcatcgttaggggagtagtggtaaatattccagaatccatatgaaattcatgagtttatttatgtctaaaacactgaaaactgtgtccaatatcgttcagtttcctgggtctttttcttattagcacatttgagaaaaatattcctttcctttattgtagtaaatctattaaaggcaatagccaataaaacatttttaattttaaa

SEQ ID NO: 13865 - DNA, 343 bp, Homo Sapiens
catctgatggagacgtcactctcactccaaaagaaaatgcaaggtcctgtgtgaacggcacccttgtgtgcagtaccacccagctgtggcatggtgaccgaatcctatggggaaataatcacttttttagaataaacttacctaagaggaaacgtcgagattggttgaaagactttgaaaaagaaacgggcccgccagagcatgacctggatgcagccagtgaggcttcctctgaaccagactataactatgaatttgcacagatggaagttatcatgaaaaccctgaatagtaatgacccagttcaaaatgtggttcaggtcctggagaaacaatacgtaga

SEQ ID NO: 13866 - DNA, 728 bp, Homo Sapiens
  misc_feature (424)..(449): n is a, c, g, or t
gaaaaacccacagccaacatcatagtgaataggcaacagctggaaacattcctcttgagaactggaacaaggcaaggatgccctcttttaccactcctattaacatactactgaaataaaatgcatccaaataggaagacaggaaatcaaacttctctgtttgcaaatgatatgatcctataccccccaaaaccccacagtctctgttgaaaagctcctgataaacaactttagcacagtttcaggacagaaaataaatgtacaaaaattaggagcatttctatacacgaataatatccatgcagagagccaaatcaggaaggcaatcccattcacaatagccacaaaaagaataaaatatctaggaatatagctaaccaggagatgaaagatctctacaatgagttacaagatgctgctgggnnnnnnnnnnnnnnnnnnnnnnnnnngagatgatacaaatgaatggaaaaacattccatgctcattgataggaagaattaatattgctaaaatggtccaactacccaaagcaatttagattcaatgctattcctatcaaactaccaattacattgttcaccaaattagataaaactattttaaaattcatgtggaaccaataaagatcccacatagccaagcaagaagaacaaagtttggaggcatcatattaaccaacttcaaactatactacaaagctactgtaaccaaaacagcatggtaat

SEQ ID NO: 13867 - DNA, 648 bp, Homo Sapiens
ttccaggatctctggcctcagttgtccttggttattgatgggggacaaattggggatggccagagccccgagtgtcgccttggctcaactgtggttgatttgtctgtgcccggaaagtttggcatcattcgtccaggctgtgccctggaaagtactacagccatcctccaacagaagtacggactgctcccctcacatgcgtcctacctgtgaaactctgggaagcaggaaggcccaagacctggtgctggatactatgtgtctgtccactgacgactgtcaaggcctcatttgcagaggccaccggagctagggcactagcctgacttttaaggcagtgtgtctttctgagcactgtagaccaagcccttggagctgctggtttagccttgcacctggggaaaggatgtatttatttgtattttcatatatcagccaaaagctgaatggaaaagttaagaacattcctaggtggccttattctaataagtttcttctgtctgttttgtttttcaattgaaaagtaattaaataacagatttagaatctagtgagagcctcctctctggtgggtggtggcatttaaggttcaaaccagccagaagtgctggtgctgtttaaaaagtcccaggtgccgatgaatagcga

SEQ ID NO: 13868 - DNA, 1021 bp, Homo Sapiens
  misc_feature (46)..(46): n is a, c, g, or t
  misc_feature (52)..(52): n is a, c, g, or t
aagccgcccagctggagcattcagagctgccacaatcttccccccngggggnccctccagggaggttagaccctgttttttaaagcgtagcaggagaaagtgaaggcagggaactcaagccgggttactcggtcacagcggcggatacagtggagctcaatgccctgattgtcatagatgtggagccagcggttctgagcaacagcaagcagtgcctcaagaatggagaaaccggatgtcccgcaccgcctccatgacgttgatctcgcacataagcttctttgttacccaatcaagggcagccacatgacctcggcgccctccaaaagccaggtgtcttccagttcgagagtagtttagtctgtagggtccaaactgccgcagattcaagtcaaagtgcttggctgcacttgcaatgtccacagcctccacaatgtcagcctggcatatctttgctgtgtcttccccatcctccccttccagaaacccaggttcttcagcaagcagcagctcagaacgagcagctttgatacttgtttcctcttcctcagcttcagccacctcaagtcggcttcgagttttggctttagaatgtggtagctttcgggatttgtcaatgcgacagaacttctggaccacttccacagggacgggggcggggcctgggaatggatcttgggccccggacaagccgcgctgggactccgggttcttccattctcggggtttcttcgggacctgaggcttcttagagatccgagacttctttaagatgtaagcattttttggtctctgaggacggagctcccgattcttcttgttacgaggaggccctggagaggctccggctgtggtcggaacggtctcttcctcccagtatcgccgcggtttctttctcttggtctgaagtttgtctttcttgggcgggacatccttgcccggcttgggggctgtctccatctcgcccacccgaacggcgatccacgtgcaaaactcatcccgggaattccggaccggtcca

SEQ ID NO: 13869 - DNA, 334 bp, Homo Sapiens
  misc_feature (49)..(62): n is a, c, g, or t
tggcgccattgcactccagcctgggtgacaagagtgaaactccatctcnnnnnnnnnnnnnngaaggtccagcttttggattcaatgagtgggaaatacattgtgcctttctctagatgtgatacgttataccaaaatctttgtagtgtgcagagcggtggtttgagactaaatacaggcttagaacttgcagagtgtgtattcttggatggctgatgcatcgacttgcattcccacttaacactttgattagcatgaacttgccaatcaaaaaatgacaatcaatttgagaaaatagaaatagatatttttaaataaaaccattcacagttta

SEQ ID NO: 13870 - DNA, 424 bp, Homo Sapiens
aatttcgcgcttcggcgtccgagttcagctgctgccacgtcacaaagggccggtaggtggctccatcccagattccccacaagtagcatccgcgctctagatacgcttccatgtccacatcgatttcgacgtctgccctgcggacaatgtcggcatcactgcgtgcacggtccgtccgtactccatttacgcgcgccgtgttttcatccaccgtgtttccatgcgccctattccgacgttgccgcactttgtcaggacgatacaccgctgtccacccttgcatgtacgcgtacgccatgatgctggcgtcgccgcagtcagcgtcggcaagctgatgaacagtggatataccggcaagccgatacttgtccgctcgcgccccatgaagaacaaggctgatatcgtccatctggggtgcgcagct

SEQ ID NO: 13871 - DNA, 673 bp, Homo Sapiens
  misc_feature (329)..(385): n is a, c, g, or t
atatacttaaaaactaggctctgtaaagagatttaaaaaattaactatggcctaatcacaagttccatactcatctaaaattttttataaataaggactgaacaaagcatgaaatttgtaaagaatgattttaagaaaatttacagtttttactaaaaatcaaattcagcagttgcagaacagaaaatcaatacgcaaaaatcagttgcacttttacactaacaatgaacaatctagaaaggaaattaagaaaacaattccatttacgatagcatcgaaaagaaataaatactcaggaataaccgtaattgaggaggtgaaagacttgnnnnnnnnnnnnnnnnnnnnnnnnnnnnnnnnnnnnnnnnnnnnnnnnnnnnnnnnngacaccccatgttcatagattggaaaacaatattgttaatatgtcaataccaccaaaagtgatccacagattcagtgcaatccctaccaaaatcccaaaggcaatttttgcagaaaaagaaaaagctatcctaaaattcatggactctcaagggacccgagtagctaaaataacattgaaaaagaagagtaaagttggaagtctttcacttcctgatttcaaaacttattacacaaagccactgtaatcaaaacattatggtgctgtcacaaagaaaaacatacagat

SEQ ID NO: 13872 - DNA, 189 bp, Homo Sapiens
  misc_feature (34)..(34): n is a, c, g, or t
gggcttgtgggtacggccgcacgcgctggcctgntatttgtatttttagtagagatcggatttcagcatcttggtcaggctggccttcaactccggatctcatcacacacccgcctcagcctccccacatgcggttattatagttgatatgtctgaaccaaaatgatatgggaagcttgagaataaaag

SEQ ID NO: 13873 - DNA, 406 bp, Homo Sapiens
cccctggaacgagacgactgaaggaccgtttgatgcagccgggtactaccaactggcgctggcggccgccgtggacctgggcaacaagaaggcacaactgaagatctacacgcggctggccaccatctaccacaacttcctcctggaccgtgagaagtcgctcttcttctaccagaaggccaggaccttcgccacagagctcaacgtccgcagggtcaacctgcctcctctgccactctgcgggtgggccccctggttggcccccagccaccctcgctgaggacagcatccaagggagtgggttttgtgcaagggctgggggtctcatgcctctcctcgtgtcgccggtggctcattttctggcaaatggaggcacgaacgcaggggccaaatagcaataaatggg

SEQ ID NO: 13874 - DNA, 358 bp, Homo Sapiens
tactctgacgatcctttaacgagacgactcagcgcaacccgtaggcacagccccagcagacatggcctctggtgctcacacagaccctcacccaaaggaaccgctccttgtccctcctgccctccccggaggcacagcagctgtcatggggctgtctcccctgacaggcacaactccccgggcagaaaacgtgccccaccgcatccctacctggaaactgaccagcctgcactgtggaaaagctggccctgtggcgtgacgggggagcacccccatccagactgcgaagctgctctggggtctgcacccaccccttgccctgacttgtgtggcctgacaagagactcatctttttttg

SEQ ID NO: 13875 - DNA, 472 bp, Homo Sapiens
ctagaggatcccctgtgacgagacgacctctggtgcctgtttactacagctgtgaaactgcggtaggaccttttgaggaaattgaaggagacgatccatgtaaaacttgggcctaggggtgcggtggacagcaaagctcaattggctgttagcgtcctttctctttcggagtgtggtgcagcaggaagggtaacgtaacaggagccctcctggctctgccatcgagatggagcctggtgtgcgctctctagcagaccttccagccctcacatcgctctacaatgattccgattctcatgtgtctggcatgtgccagtttctaaacgtatctgcatgcaccaggttgtagtgaccttgaactttttgatagactgataaagagatgcagcacatagaggccaatgggcatctttccacaaactagccaatgctggtcacagtcagaagcaaaacgcccaccgacgggggctac

SEQ ID NO: 13876 - DNA, 369 bp, Homo Sapiens
tagcgatcctattctgcaccacagccacttacaaatgtgttgaatacaatgtgctcgcatttgtgaatgaattgaatcactagtggtataggagccaaggattaatatcaggcctgggataataccaggctgcttgagaataaactcagtctcctataatacagtcttcttggaaactggagagactaatgggggtgttgtatctgtttcccatgttgcacctggtttggagcagctattagatggcatggaggccttatgcctacgtgaccagaacaacagattgataggcaaaagaggttaaagctttcacgtgtcaaagtgtcctaaatacaccatggtccttatctagggaaggcatacatgcct

SEQ ID NO: 13877 - DNA, 159 bp, Homo Sapiens
acgggtgccgggcgggggtgtggaatcaacccacagctgcacagggcaggtcttggccagttggcaaaacatcttgttgaggcaggggagtacgggcaagtcacaacattggcagtcccagaatgcaagaagccagacagaaaacagatcctctagagt

SEQ ID NO: 13878 - DNA, 307 bp, Homo Sapiens
  misc_feature (242)..(242): n is a, c, g, or t
  misc_feature (273)..(273): n is a, c, g, or t
  misc_feature (297)..(297): n is a, c, g, or t
agacgggatctagaggatcccagagactggagaaggagtaaaatatctacaaattacttatgttatttataaagttgtgcatctacggaaatgtttactgcctgaatgctgctatatatatcactgaagctgaatctcatgtgactctccagggaataggctaaaagagagaactgggagaaagaagtggcaagaaaaaaagcaaacccagggattcactccatgacacaattatgtacacnattacaatcatgtttgactatacaatgttangtgttctctctcctttctcgcatngtctctggga

SEQ ID NO: 13879 - DNA, 342 bp, Homo Sapiens
aatcctgccttttacaggtgaaactcggggctgtccatagcggctgggaccccgtttcatccatccatgcttcctagaacacacgatgggctttccttacccatgcccaaggtgtgccctccgtctggaatgccgttccctgtttcccagatctctggaactctgggttctcccagccccttgtccttccttccagctgagccctggccacactggggctgcctttctctgactctgtcttccccaagtcagggggctctctgagtgcagggtctgatgctgagtcccacttagcttggggtcagaaccaaggggtttaataaataacccttgaaaactgaa

SEQ ID NO: 13880 - DNA, 481 bp, Homo Sapiens
  misc_feature (368)..(368): n is a, c, g, or t
  misc_feature (384)..(384): n is a, c, g, or t
  misc_feature (394)..(394): n is a, c, g, or t
tggtggatgtggagcagactgcagctggccaaccgcatcgccagtctgctgctggccctgccatcacctgggccccagccattgcctacccctccccagagtgtgctcgttgctgtgttggctgctcctgaatctgccctaactccacacgcacctggacttgcgtgtccctcctgcagttctaactaacagtcccttcttttcaagccccgtgggtctgcacgttggaccctgggttccccattagagcccaccttctgagcagcagcctcagtgggaggtggaggcaggtagtgatgctgggtgccaggtgggagtggagaggggactgctctcctccaagtgtgcactttcctcattattctcangggcgcagatgctcangctggcgcangggagaggctagggagggagccatggtgcccagaaggcctggcgaccagcccctgctgagagatggagctaacatcctgtgtttacg

SEQ ID NO: 13881 - DNA, 546 bp, Homo Sapiens
gcccgctgttgggaccatcctcaacttgtttcactgggacctttgcttaccgttctgtgggtgaccttttccgggatttcttgttcttatcaagcaagaattaagcacatgctaaacgtcttccatttgacttctctactcggtgtctcagacagtgtcttcccagaaaaccaccaccctctacccaaagataaaacatgctcatgtcatttttctcatggtcacatttaacagttttgacatgttatacttgcgcatagatccaagcgtttcttgggaacctgacttttgagtgtttaataaagccggaagtggtgttgccctgaaccagcagattttcacctgggttctggctccggtgtttaacactggatacatctttgatgtgcgaaagtgagtacatcttcagacacatttggtacatccagaaatagatccaagaaatggagtggttgagtgggtccgcacgaaatgcttgattatgtcagcaacacccaacactgtctgttttccatttgttggttttaatcataaaattgtcaagtg

SEQ ID NO: 13882 - DNA, 460 bp, Homo Sapiens
ttgaaaaaagagaaaaaataaatgttttggttgattctgtatttgagtacccttgttaatattttaaattgtccaaacaaacattctaattgttccttaagaactcattttcccatgtttatactcttcccacactgtagatatggcatgtactttacactatttataatgactgtagatacttgaatgttctacttgctaattttgcaagttgagtttatttcatttatgcagagtatcttggagtttggtaatttccatcttatgataatatatactttgcatttgtgatatgggtgaaaggagacataaaattagcaagtctgttttgttcttgtaataaagtaacttattctgttttcattgttgacttttcatgttaaggaaatacgaatctgaaagaaaaatgttaactccagctcttgaagtatcttaaataaagacttaattaaagtttaaa

SEQ ID NO: 13883 - DNA, 643 bp, Homo Sapiens
tcttcgggggcgtccttatgaccctgctgggactcctgggcagcctgttcttcctgggccaggccctcatggccatgctggtgtacgtgtggagccgccgcagccctcgggtgagggtcaacttcttcggcctgctcactttgcaggcaccgttcctgccttgggcgctcatgggcttctcgctgctgctgggcaactccatcctcgtggacctgctggggattgcggtgggccatatctactacttcctggaggacgtcttccccaaccagcctggaggcaagaggctcctgcagacccctggcttcctgtgagtgttgagagccctccctccctctccccaccctcagaaggatccccaccgatggggacctgtgctggcctgtgctcaacacgggcccctccccacagaaagctgctcctggatgcccctgcagaagaccccaattacctgcccctccctgaggaacagccaggaccccatctgccacccccgcagcagtgacccccacccagggccaggcctaagaggcttctggcagcttccatcctacccatgacccctacttggggcagaaaaaacccatcctaaacggcgtgcccatgcaagggcccacctgaataaacagaatgagctgcaaaa

SEQ ID NO: 13884 - DNA, 460 bp, Homo Sapiens
aaggctccctgtccccacatttgcacaccttccacagggtcaggatggagtagctgccttgcgaggtggtgagactcctgtctctgaaggtctgcaagcactggtagtgatattgcagcagacaaggtctgggttgggcgtctgcaggaggacaccttgtgggacatctgaggacatccgcagattcttgtcagcctgtgaactaggccctgcctctgtcacctcattggtccatgaaggagcagccaggggtggtggaaggagcactgggctaggggtcaggggtcagagattctgtcctgctcctgggatgcactggctactcccttagtctactcccttcccctctctggtcctcagcttcctccatcatggaggagatgggatcatggattttctgggcataagtggctgttctgggagtcattccaaagagagaataaaactcctgatccaaaaa

SEQ ID NO: 13885 - DNA, 533 bp, Homo Sapiens
  misc_feature (32)..(32): n is a, c, g, or t
gctgcagcgactgtcagggagcatgaagcggncggcgatcacggacgcgcgagcagctgcagcagctcaagcacctggagtccttttacgaaaaacctcctcctgggcttatcaaggaagatgagactaagccagaagattgcataccagatgtaccaggcaatgaacacgccagggaatttctggctcatgcaccaactaaaggactttggatgccactggggaaagaagtcaaagttatgcagtgttggcgttgcaaacgctgatggtcaccgaacgggtgacaaagaatgccctttctttatcaaaggcaaccaaaagttagagcagttcagagtggcacatgaagatcccatgtatgacatcatacgagacaataaacgacatgaaaaggacgtaaggatacagcagttaaaacagttactggaggattctaccccagatgaagaataggagcagctccaattcctctgggagtagagggaatcgcaggaaaagaaggaggaagaaagcctaggaaagggagatagaaa

SEQ ID NO: 13886 - DNA, 392 bp, Homo Sapiens
cgcactctcagctcagtgcgcccaaacacctgcccccattgtcccaaggcctttttgagtgccagcgacttgcgcaagcatgaacgcacccaccctgtgcccatggggacccccacacccctggagcccctggtggctttgctaggaatgcctgaagaggggccggcctgaagcccatgaccccccagcaccacactccgggagcccagcccccatcgggggcttcctgtacctccttttgcctggctctgctctttagactccagatccctacccctcagcaactagctcccctgtcggccagctaagagagctgggacagtggaggctggcagaagctgagacgtgactgtctaggagtaacactcattaaagctttcattttggcaaaa

SEQ ID NO: 13887 - DNA, 261 bp, Homo Sapiens
ccaccaaaattgtgagaaacagaaatacttaaaatgaggaataagaatggagatgttacatctggtagatgtaacattctaccagattatggatggactgatctgaaaatcaacctcaactcaagggtggtcagctcaatgctacacagagcacggacttttggattctttgcagtactttgaatttatttttctacctatatatgttttatatgctgctggtgctccattaaagttttactctgtgttgcactaaaaaaa

SEQ ID NO: 13888 - DNA, 365 bp, Homo Sapiens
acactctgcagtccactgaaatcccttgtagcatataacaatcagttaagggcaaaataaaatcagaataatactaagaggtagcagctgtttatcttctcggagatttcgagggtctctggaagccgggccaagtaagggtgctctcctggtaaaaggatggggtggggaaatagttgaggctaagggctcaatggctctgggaagggtgtgggcatgatcacacaatagatgctcaagataccgagaaccgagggagcaatctgcccattacaggacaatcaaaaccagagtcatttcctgggctagttatccaagtccccacaacatagaaataaaagtttagttcagtgtttccatagatc

SEQ ID NO: 13889 - DNA, 663 bp, Homo Sapiens
ataaaatatgaaccattttattgaagaacagttatacagtgtagctacagatactgactagatactaaatatttctgcctaatttttcattgtcttcacaagttagggaatagaaatcaaaaaaccaaaaatctcaaatgatttagctgtccagaacatatttgacagttgataaatttataacagctctgacatataaatttctaattagagaatcctttcatttgaaaaaattgagatgatattaccctaatgaagtttttacctgaagttaacaaagtcctggatttgatatattactttgaatgcattaattctgaaaatttatatttagttctactttataacatttcttctcttaaggatgggatatgaggtacacatgagctggtttctacagtatgaatgtatgtacatatataaagtatggttgtaaaggagtgggtgatttgcaaataaagcacattatacacaaaatataaataacttcccttttaaaagttactgagaataaagaatatagaacatggttataggcacttacattgctatcaaatgcaggaattcacttcaataagaagtgctttctttgtaagcatggttcatggcaatagaagctccaactttggagaggatgctttccgtgacaaaaataataaccac

SEQ ID NO: 13890 - DNA, 174 bp, Homo Sapiens
aaggggtgacaggagcaacaggggtggctgagtaagggcttgcagctggaggcaacagcacatgcaaggccctgagccaggatgtgctgcaataagggccactgagggggacagtgtaggttgggggtgcggaatgtattaaaagatgagattgccttctaaaaacaaaccaaa

SEQ ID NO: 13891 - DNA, 368 bp, Homo Sapiens
  misc_feature (177)..(276): n is a, c, g, or t
aaccacagagtctcgtccgtcgccaaggtgtagtgcaaatgttgcagcatggctcactgcagctttgaactcccaggctcaagcgatcctcccatctcagcctcctgagtagctgggactacaggcacaggccaccaaacactggctcaatgtttaaattttatgtagacgatggcnnnnnnnnnnnnnnnnnnnnnnnnnnnnnnnnnnnnnnnnnnnnnnnnnnnnnnnnnnnnnnnnnnnnnnnnnnnnnnnnnnnnnnnnnnnnnnnnnnnngtgtgagccactgcctgggctggccgtaagggtttgtaactggtttcatagaagagccctggagcagcacagtagaaatgagccctatcgga

SEQ ID NO: 13892 - DNA, 579 bp, Homo Sapiens
agctcgttaccgaaggagacacaggtgaggctagaagtcagctgtgggagtcccactggggagaccaagaggggtgaaatggaaagaaacagcgggccaggggggttggacttcctcatgggctgaagaaggccatggaggggaacctctcagaaaccacccagaactacgcggtgaatggccagcctgcactgctagatacacagtgccatgccaacactgccatggaactgctttcatcattcagaaagaggaggctgctttttccccctcttctaatatttttaagtgactatgtttgcctgctggtagtccctaagtatgatgggataaatatcccatggaaaggaactgaggaacatgggcctaaaactcgtgaggtggtgtgagggggaggagaggagaaagaagggggaaaatgccaagcaaagtaaaagctgttatggcacttcagggccaccaatctcgtctctaacttcatctcctggtctcctccctccctctgtccagccacgcggcctcctcgctatgcgttgacacactcacctgtgtctccttcgggatcctctagaacgagcg

SEQ ID NO: 13893 - DNA, 265 bp, Homo Sapiens
  misc_feature (152)..(214): n is a, c, g, or t
gaagacgacacaggtgaggggatgggacctgataaggctctgtgctgtgtccatggcccgtcatttatcaaggctgcagcttggtaaatgtggctatttttatgttgtgtatagtttctatcatttatttttccactggatttgagtaaagnnnnnnnnnnnnnnnnnnnnnnnnnnnnnnnnnnnnnnnnnnnnnnnnnnnnnnnnnnnnnnnggggggagcacggccccaatttactttttctatactacccacccaccaaac

SEQ ID NO: 13894 - DNA, 624 bp, Homo Sapiens
ctagaggatccccgagcagaccaggtgaggtggcatattcagaggagctgttggcaagagctggtattccctgccagccgaccaaatgacctctgcattcttcaggtaatgggggctcattgtgagggaggtgcagaggcagcagaggattggcataaaactgaaaaggagttctgtctgcatgagaaaggatggcaagtctctgaggtgacctcagggtggaattctctgttaagtccaccctgccccagggtgctcctaccctcttggtcttttcaaagtcaaggtgcgatttgggcacctgactgtccagtttaccttaacaagtttgggaatccatgtgatgtccttgatacttcttcctcatttgggacattcagtaggagcatttgggcttccggggcccctgagaccaaagaagaggggccaagtaccctgggaaatcagctgaaggtcaacaaaagactggttgtgagttgcagctgtcccgaaggccccagttgagaaagccatgggcaggccagatcaagccaccacgtgccctacgataggctaacaggagtgcccattgacagattacacattgtaatatgacctcagacaaaaaggaaccagaggcccaag

SEQ ID NO: 13895 - DNA, 578 bp, Homo Sapiens
tgacagatgtgttcactacttggtgtggtaatcatgtcacgaaaaatacatgtatcaattcaagcactttgtacaacctttgttacaatgtcatttgtcaatcacacctcgatagagttgggaacaaaataagtaaaaggaaatgcagaaccgcaagtgaaaaggaggcccatgagcacttagctaggcgaagcctgttcccctgaacactcttaagaccctagaagtcccatgtttattagtacgtatgtcacaaacatgtcctcatgtcaactctttccaccaaaatgttgtatccccacacaccccttgatttcatcggccgtctctcccaaattcacattctccatcccaatcccagccctgtcatacacatcacctcctcccttctgagtttctggaaagaccactttcctcacaggcatgccctcctcctctgtctggtctcagggcttctcttatggacacctcctcctcactcttccatggagctcagctcagctcgggctccagagctgcttccctagtgtggtgtcaacagctctgggttcagttgtcactgtgccacctccctcact

SEQ ID NO: 13896 - DNA, 525 bp, Homo Sapiens
  misc_feature (309)..(408): n is a, c, g, or t
tgttgcctaggcttggagtggcctggaagaaaagctgatggatctggtaaattaactatagattacggaagacttgataaattggtgtcaccccatttgatcagctatatctgatatggcatcaacaactaaactgtgctcaagctcagagagatcagtattctgtactagatttggctcaatgccttcttttccattaggaagccaaagccaattttcattcattagggatagtccccaaatatgcatttactctgccctcagaagaacatttaaattctctggatgggctgaacatggtggctcagnnnnnnnnnnnnnnnnnnnnnnnnnnnnnnnnnnnnnnnnnnnnnnnnnnnnnnnnnnnnnnnnnnnnnnnnnnnnnnnnnnnnnnnnnnnnnnnnnnnncaaaaatttacgaggcttgttgcaggcgcctgtaatcccagctgcttgggagctgaggcatgagaatcgcttgaacccagtaaagtggagttgcagtgagcatgagatgctaccact

SEQ ID NO: 13897 - DNA, 410 bp, Homo Sapiens
cttaaatatgatcaaggaaaatagcttccagaatgtggtggttctgggcaacaaatgagattgtggcgacgtggagattaaaatatatgtatttgagctggggaatttgaatattgtgagtttcagatgttggaaatttgggattttgcagttttgtcttttgaaaatgatcaagtcttgtcagttcgtgccctctttccccatgttccctgggaagacgggtggtggcagagtgagaaggccactggttctatgccgcagcacgaaaaatttagaattctacagactagctctatacgtagtgaggacccagatttagagaaactgaccaatatttatctccgcatttgtgtgtgtgtccaactctgtaggccaataaaccaacaagacaaatgaactgtgctccacaa

SEQ ID NO: 13898 - DNA, 515 bp, Homo Sapiens
attattttaaaagaacggcaagaaagaaagcagcgtctccaagaaaatgctgtgagtccagcttttaccagtgatgacacacaagatggagagagtggtggtgatgaccagtttcccgagcaggcagagctgtcagggccagaggggatggacgaactgatctccactccttcggttgaggacaagtctaaagagccaccaggcacagagctccagagggacaagaaggcctcccaccttgctcccaatcacaccaccttccctaagatccacagccgcagattcagggattactgcagccagatgcttagtaaagaagtggatgcttgtgttaccgacctactcaaatgatgaatttgaatttatgagagttcccccccgtgtgtctgtattttgggtaagaaggggaggtctgaaaaagactttggggctttttcttctgtttttcataacaatgtaatttgtgtaactgttgaatctggaaattgatcagcattaaagggcacatgaagcag

SEQ ID NO: 13899 - DNA, 1413 bp, Homo Sapiens
cgcaggtgcgcgcggccggggctggcggcgactctctccaccgggccgcccgggaggctcatgcagcgcggctgggtcccgcggcgcccggatcggggaagtgaaagtgcctcggaggaggagggccggtccggcagtgcagccgcctcacaggtcggcggacgggccaggcgggcggcctcctgaaccgaaccgaatcggctcctcgggccgtcgtcctcccgcccctcctcgcccgccgccggagttttctttcggtttcttccaagattcctggccttccctcgacggagccgggcccagtgcgggggcgcagggcgcgggagctccacctcctcggctttccctgcgtccagaggctggcatggcgcgggccgagtactgagcgcacggtcggggcacagcagggccggtgggtgcagctggctcgcgcctcctctccggccgccgtctcctccggtccccggcgaaagccattgagacaccagctggacgtcacgcgccggagcatgtctgggagtcagagcgaggtggctccatccccgcagagtccgcggagccccgagatgggacgggacttgcggcccgggtcccgcgtgctcctgctcctgcttctgctcctgctggtgtacctgactcagccaggcaatggcaacgagggcagcgtcactggaagttgttattgtggtaaaagaatttcttccgactccccgccatcggttcagttcatgaatcgtctccggaaacacctgagagcttaccatcggtgtctatactacacgaggttccagctcctttcctggagcgtgtgtggaggcaacaaggacccatgggttcaggaattgatgagctgtcttgatctcaaagaatgtggacatgcttactcggggattgtggcccaccagaagcatttacttcctaccagccccccaatttctcaggcctcagagggggcatcttcagatatccacacccctgcccagatgctcctgtccaccttgcagtccactcagcgccccaccctcccagtaggatcactgtcctcggacaaagagctcactcgtcccaatgaaaccaccattcacactgcgggccacagtctggcagttgggcctgaggctggggagaaccagaagcagccggaaaaaaatgctggtcccacagccaggacatcagccacagtgccggtcctgtgcctcctggccatcatcttcatcctcaccgcagccctttcctatgtgctgtgcaagaggaggagggggcagtcaccgcagtcctctccagatctgccggttcattatatacctgtggcacctgactctaatacctgagccaagaatggaagtttgtgagggtaaactgtggcttattcttacaaaaagtgtaataaaggagactgacccctgacaacaa

SEQ ID NO: 13900 - DNA, 1137 bp, Homo Sapiens
cggcgcgggcccaggagcggcaggactcgggccggagcgtggccggacccccacccgccgaggggcccagggaggacgcggcagagtcactggtggcagcattgatgagttggacacccgggtccttgaagtgatctctaggccccagccccaaatccgccaccattccgtgctgcgtgggacaccatggctccagaagaggacgctggaggggaggccttagggggcagtttctggcgaggctggcaactacaggcgcacggtacagcgggtggaggacgggcaccggctgtgcggggacctggtcagctgcttccaggagcgcgcccgcatcgagcaaggcttatgcccagcagttggctgactgggcccgaaagtggagggggaccagtgcagaagggcccccagctatggcacactggagaaggcctggcatgcctttttcacggcggctgagcggctgagcgcgctgcacctggacggtgccgggagcaagctgcaagggcaggacagctgacgcgggctgcgcgcctggcagcggcgggctttccaccggcctgtgctgggcggcttccgcgagagccgggcggccgaggacggcttccgcaaggcccagaagccctggctgaagaggctgaaggaggttgaggcttccaagaaaagctaccacgcagcccggaaggatgagaagaccgcccagacgagggagagccacgcaaaggcagacagcgccgtctcccaggagcagctgcgcaaactgcaggaacgggtggaacgctgtgccaaggaggccgagaagacaaaagctcagtatgagcagacgctggcagagctgcatcgctacactccacgctacatggaggacatggaacagggcctttgagacctgccaggccgccgagcgcgcagcggcttcttttcttcaaggatatgctgctcaccttacaccagcacctggacctttccagcagggagaagttccatgaactccaccgggacttgcaccagggcattgagcggccagggacaaaaaggatctgcgctgtgggggcaccaacccccgggccaggcattggcatggaccgggccccagtttcaagggaggtgcccttggacccccggagggacattcccccc

SEQ ID NO: 13901 - DNA, 838 bp, Homo Sapiens
  misc_feature (128)..(183): n is a, c, g, or t
gttccaacctcactcgcctcgcacgctgttcagcttttcggttactattcagttttaaatgttaaccctgtgtcctgatgtcatggtctggaagcgctaagtgttttgcggaatgtgatcctggtgtnnnnnnnnnnnnnnnnnnnnnnnnnnnnnnnnnnnnnnnnnnnnnnnnnnnnnnnntcggctttccatttccagatgtgaccgtccagctgctgctcgctgctgctggattccagtttcctccccttctggcgatggattggtgatgacaccgagtctcactttctccttcccccgccgggaccaacggccgtgggggcacgagggtgccggggacggccggagagcgatcaccggctgggcggcagggagccgtacgaggggagagccccgctcacggcatcaagcagcgcacaacccctcactggcccgcacatccaggccttgccacacccagtgcacactcgtcgcccagcgggcaggcggcatgccgtgcccaggctgctgcagcagccacccgcccgctcgcggaccactccagcgccctcacgcactagtcacccaggcccggccgcgggccgccggggctcgcagagtgtcagccatcccgggcaggatgtcgcgtctccccaccccgacctccactcgcgcacgggagctgagcggcagtgtaggtagtgaagactcactggggctcccagccttccctctccgcgctctccccccgtcacttttatgaattcgactccactttctaaaggaattatgagtcttgtggcaaacacaaaccggagtggccgggaaggggaaaaggggggaaaagaaaatcttt

SEQ ID NO: 13902 - DNA, 1192 bp, Homo Sapiens
cacccctgtgaggaggccggaggtcggactcaggaggctccttctccactcccggaagatcatgtaccagcccagccggggtgcggcccggcgtctcggcccttgcctgcgcgcctaccaggctcgaccccaggaccagctttatccaggactctaccattcccacccctttggccccactccacgacaaccacttccccatcttctcctctattctggtctcccctgcccccacgccttcccacccagcgtcttccccaggttcccccactacctctccctcagatccaggccctcagctcagcatgggtggttctccctccaggaaacgggggaggagggaccaggacctgagttgcatagcggctgcctggatgggcttagaagcctttttgagggacctccctgcccctatcctggggcttggatacctttccaagtccctggaactgcccacccttcccctgccaacccgtcaggagatcctagtatggaggaacatctgtctgtcatgtatgagagactgagacaagagcttcccaagctcttccttcagtcccacgactacagtctgtattccttggatgtggaattcatcaatgagatcctcaacatacgtaccaagggccggacatggtacattctttcactgaccctctgccgtttcctggcctggaattattttgcacaccttcgtttggaggttttacagctgacccgccaccctgagaactggaccctgcaagcccggtggcggcttgtggggctgcccgtccacttgctctttttgcggttctacaagcgtgacaaagacgagcattaccggacctatgatgcctactccactttctacctgaattccagtggcctcatttgtcgccatcgtctagataaactgatgccttcacactcacctccaacgcctgtgaagaagctgctagtgggagccctggtggccctggggctgtcagagccagaacctgacttaaacctgtgttccaagccctgatccttgaccttggagtggaggcagcactgaagactgctacgcccaagagaaggaggtggaggcagccaagaatctcaggagccagcttcctctcctcgtttctctccttccttcctttccatctcatgctgtgtaaagctgctgtgtaatttaacttgtaaataataaagtttaactgactat

SEQ ID NO: 13903 - DNA, 499 bp, Homo Sapiens
ccactagtgtaggctgacaacccaaattaaggaagcaggagagatcaaacagaactgctgctgggtggttgtcaggagctgctacacggagaaccctggactattcgatcaagcagcaaggctatatgttcacttatgcagaaatggactattgcagatgctaagctttgttgtgcaagcgaaggctcacttggaaggaaatactcagcccctctctgggcagcatttgagttccttatggatgccgagtcgcgaaacaagttatttttttaatgtatccttctttatgaggagaatgctacccaaaaatgtattaaaggaatattaagtcgtccagagactgtcttgctaccaagaactgtgcaatggaattctttttaccaacattagacacctacactagagttagataacgttttctcacattgagtttagaagatctgccttgtcagggaagccaaggttttgtatgtgagagtttaaatctgatgtgaagctc

SEQ ID NO: 13904 - DNA, 544 bp, Homo Sapiens
cggttcagtgtatttgtatgaacctacaggatcatctaaatggactgactgaaactcgctaaggttaaatctgcatcaaaatctaaccattttgagcctctgaagggagtgccattggctttatttacttctctcctctgctagttctgatttggaaacagttaaaagccaatttttagctccagtggaaccatagccacataaaactttaatggacaaccatatagaattaacttattttgtccaagtacagttggcattttccagaataattttaccaccctgctagatgtcatctctggattgcacatggatgatgaaggaactcagcattgaaagttgggggattagtaaccttgttacaacggtttctttttcattttagcctattttaatggctattggtaagatactgtatgtttttagtatctcatccagtgcttagaagaaagaatggtttataattcccagtacatgtttatattgactgtgttatatttttaaatcctttaaataaaaaatccttataagtttatgtaaagca

SEQ ID NO: 13905 - DNA, 1044 bp, Homo Sapiens
  misc_feature (272)..(469): n is a, c, g, or t
  misc_feature (509)..(686): n is a, c, g, or t
atatcggtttatggatgaaggagggagcggtcgaatattttaggcgatcaagcacggtctccgctgggctttggtcccttttgtgatacctggcttagtccgggggccttttccccctcttataggcagccaaatctccataggtctatttggtgtgtgtgattgagctaagctgcaaacatctatgtcgggacgatgtacagctagaatacaccgtgttcggtataaggacttatagtatttagcttctgtcgagtctcgatagcgcaagnnnnnnnnnnnnnnnnnnnnnnnnnnnnnnnnnnnnnnnnnnnnnnnnnnnnnnnnnnnnnnnnnnnnnnnnnnnnnnnnnnnnnnnnnnnnnnnnnnnnnnnnnnnnnnnnnnnnnnnnnnnnnnnnnnnnnnnnnnnnnnnnnnnnnnnnnnnnnnnnnnnnnnnnnnnnnnnnnnnnnnnnnnnnnnnnnnnnnngtgttggccagtatgtgtctccaagtctcattgaccttgnnnnnnnnnnnnnnnnnnnnnnnnnnnnnnnnnnnnnnnnnnnnnnnnnnnnnnnnnnnnnnnnnnnnnnnnnnnnnnnnnnnnnnnnnnnnnnnnnnnnnnnnnnnnnnnnnnnnnnnnnnnnnnnnnnnnnnnnnnnnnnnnnnnnnnnnnnnnnnnnnnnnnnnnnnnnnnnnnnacttggccgggtatagtatatgtcgtatattgagcacttcccctactgagttgctgccttctctgtggctacaagggacctcacagaattacagggaagttacagggaagcaggtttcatctcaatattgggagagatttcaaacaatcacacctgcctgagaaggagtgggctgtcactaggaatttttattcacagcccgtcaggtaattttgtagaagggcttcatgtgctggttcatccaataggacaggaagatattaaatcagctttactatctatgtttttttatggaaactgtgtgtatgtatacatacattttccaaaaagaaaaattaaatgattatagagattagaa

SEQ ID NO: 13906 - DNA, 468 bp, Homo Sapiens
ttacgtatgactgggatttcgcatgtcggtcaggttggtctcgaactcctgacctcaggtgatgtacccgtcttggctcccaaagtgctgagattacaggcatgacgcactgactgggctgaaaaatttggcttttataatgcgtgtacctctctctctggagtggctaatttattggaagactgttgtagctcaacttccattatctcgaatggtctcagaaaatgcattatttccaggacgggactcagacttttctcgcataaactgaattacaacattcaagacgtactttaaaggtggggtaatttgccgagtaacttcctatatatgcaagctcatatttcttctctggggaattgtgcataatgtagttgtaatacagtgcttcttaatgtttcttcccttatcttactggtgagatatgcttttaggggtcctgaaatcccctttaacctcatctctcag

SEQ ID NO: 13907 - DNA, 194 bp, Homo Sapiens
ggtgtatcacctgaggtcaggagttcaagaccagctctggtcaacagggtgaaatcctgtctctgccaaaatacaaaattactggcgcggtggtgagcactgtaatcccagccactggggagactaaggccgggtaggcagagttcagtgagcacgagattgcaccgccgcactccagggatcctctaagcgag

SEQ ID NO: 13908 - DNA, 202 bp, Homo Sapiens
gtgtaactgcgctatcggacagaatgaacccatcacttgctgtccttctggttcctcacccacttcatatgacatagctggtggctgtgcattgtagaggggaggctgggcgctcagtgcaaagcacaattgtttacaaccttcctggaaatggctgttctctggctggaggctggggccatttccacgatgcccaggacag

SEQ ID NO: 13909 - DNA, 265 bp, Homo Sapiens
tatcgagctcggtactgttgctaggtggagtccatatgagtctgtgcgtgatggtggggttgctaatattctgtctgcattcactccttgtcacagtgagcacaggagtcccacagggtcctggcgaggacctatgaagctgcgcggaatggcccagagcagtggctgtgcagagggagcgctcagcgtcaggtgtgacagcattgagcttctatatagcaaatgagttgttaaattctcttcgtgcttacagttgcgtcatcac

SEQ ID NO: 13910 - DNA, 170 bp, Homo Sapiens
agatcgagctcggtcctgttgctaggctggagtacagtggcacaatcacacacactacaacagccttaacttcctgggctcaaggagtcctctcaccccagcccctcggatagctgggaccacagtgcactgtgcacgcatgcccaaattaaatttttaatttttgtgta

SEQ ID NO: 13911 - DNA, 470 bp, Homo Sapiens
tcctccctgcttgcatttctaaaaactagacattgtggcttgagaatttatcaatcatctttccgaaatgaccacattgtgcttttagtttgtatgtttaagtggtcaagcaaggctctaggaggtagtcactgagctggaccttaaacacatctgcaggagctcacaaaatgggagcaaaagaggcattccagaaagaagagtagttaagcagatgtgggggcagggcaagaggagacagcaccttgttgccagagattctacacaaaggtgtgatggacactgatgctctattaagaagcttttgtggtgtgtgtggtagagaataattaaggcttctgataagacaggaaagggatatttcatcatgactgttaagaaaaggtaactgggttgtttaatgttttaattgataattgtcactgatcgtatttctacttgttaaataattaaaaatcatcttaaaattc

SEQ ID NO: 13912 - DNA, 510 bp, Homo Sapiens
tgccagcaaatatatataaaataaaccctgcaataaaaggtacaggaggtctggctccccggccagctccccacgtgacactggacaaatcactctccctctgtgaatcacagtttcttcatccataaaatgagggttctagagtcacctcatatatccacacatccttttccctcccaagaaaagacttcagaaatgaaacctccatgagcagcaaacaaggaaacatctcacatatgtttagtcagttccatccctgagcttcctctcccaacctcgaaagcccatccaaaaagaaggaaaagggaccaacctgaatatcagaaagccaccacaaccctacaggacagcacagggaacgcacgcggctgccatccccaggcagacaagcaagccactccccaggatcaactgcagtcatggtcatagcgcgtgaaccttgtcagcaaattgctggtttgaatggcaattttttaaaagctcaagatgcaagagcattgatgcagacga

SEQ ID NO: 13913 - DNA, 418 bp, Homo Sapiens
ggccatgtaacaatctcctctaattcaaaagaagcccaatcatagaccttattttcttctgatagccccatatcaccatgcctctgccttatcatcatccctgtcacatctctccataattccttccccaacacaccaccccagacccagcaccttagcacctgaggctgctacctgagaagtacgcactgttctggcttcatggagaccatgctccatttctgctgctgaagtctttgagagaccaggatcatgggctgagtgcaacctcctccccatgccatctgcagagcctgaagaggaaaacacaaatacaagttgaggccatctcttcccctagggcctaacctctaagcctagcagcacaaactcaggagctgttgtttcatttaataataaatatgcatccttgaattca

SEQ ID NO: 13914 - DNA, 559 bp, Homo Sapiens
ggcctgtatatgaacttggaacactcttaccactttggttctgtgccaagcctttccctcggtgatactactgaaattaatacttagaggggacttataaaagaccaaattttccatgtaacaaggcttttaggagcctaggtttacgacatttgaaatgtgaatgtatattcataatgtatgagaactgaggctctcttgaacatagtcagtgaccacccaagacacctttcttctttcttccattttgctttaataaattcaggatgaagcccagacatgtgataagcttactgggtcaatatgatacagatcagcattggtatatttcccagttttcacaagttgattcctggctttgctctttcttagctgtgtgtatgaatttggacaagttattaagtctaagactatgtttactctttgtaaattgatgataaaaatagtaccttcctcattgggttgccatgcagattaagtgaagtaatccatataaaattcttaactaagtcactgacctatagtgctcaataaatatgtgataatgaaaaaataaaaa

SEQ ID NO: 13915 - DNA, 1201 bp, Homo Sapiens
gcaggcgctgcgggcgcagctccggtgcaagcgaggacacgacacatgcagtggcttctggactgcgcgatgactggacgcaagtaacttctaggtctgcagacaagaggaagagaagatgaaggaagactgtctgccgagttctcacgtgcccatcagtgacagcaagtccattcagaagtcggagctcttaggcctgctgaaaacctacaagctgctaccatgagggcaagagcttccagctgagacaccgtgaggaagaagggactctgatcatcgaggggctcctcaacattgcctgggggctgaggcggccatccggctgcagatgcaggatgaccgggagcaggtgcacctcccctccacctcatggatgcccagacggcctagctgccctctaaaggagccatcgccccagaacgggaacatcacagcccagggccaagcattcagccagtgcacaaggctgagagttccacagacagctcggggcccctggaggaggcagaggaggccccccagctgatgcggaccaagagcgacgccagttgcatgagccagaggaggcccaagtgccgcgcccccggtgaggcccagcgcatccggcgacaccggttctctatcaacggccacttctacaatcataagacctccgtgtttactccagcctatggatccgtgaccaatgtgagggtcaacagcaccatgacaaccctgcaggtgctcaccctgctgctgaacaaatttagggtggaagatggccccagtgagttcgcactctacatcgttcacgagtctggggagcggacaaaattaaaagactgcgagtacccgctgatttccagaatcctgcatgggccatgtgagaagatcgccaggatcttcctgatggaagctgacttgggcgtggaagtcccccatgaagtgagtgggggccaaggctggggaggcctgctctagggtgaggggttcttgggtgacggggcctcccaaggactcctggccagagccctgtcagttgatgtctccaggagctccacactctcccaaagggctcccagcctagcacagggaggcgccagccctccctctcccatcagtgaccgccagcaccagcagcttaggggaaagaagaatttgggtcctataaaaccatggcctgtccttttcctctagggaagtaaagtcttttccttcattg

SEQ ID NO: 13916 - DNA, 538 bp, Homo Sapiens
tcaaataaatgtttaatattaatcattcccaaactgacaagaacacaaaaataaaatgcaaatacagagccagctttgtcacccaaatctatgtctatttctgatagtccatggaatgtggttttcttggaagccagggttggtctccccacagaccccaggctaaggtcaccagttaggaacccaggacttggaaggcagagcctgtgagctcttccatcagggatctgactccgcaaaacgacttgatgaatgcaattggcaaactcccatgttcggacttcatatgcatgagccgttggacagagggtttcttagtatatactttaatgcatgtttatgtgcaatcttgttagtgggtatacaagtttgtgaagaacttctcatttcaataggcagttaatgtaatgcattaaaagcctgggaatttggggctatatttttcctttctgactcaataatcttcaaagaattcataggaaagtcagtacttgcagacaagtggttagcttggctaaaatgtacaaaacacccagaa

SEQ ID NO: 13917 - DNA, 690 bp, Homo Sapiens
atcttgtaggaaataaatcctctccaggacaataatgtacatgaatggagtggcattttgttccaagtcagaggtgggcacctataataaatgactagggttcactttctgggactgatgtttaattgtaacacagatacaacagggtggccttgttgtgtataatacggtattatacctgcatgtgctctagcaaggataccaaggcaagcatacatgtagctggcttgagtttgtaccaaaacagtccttcaactttgcactgtgccttaagtaattactaacaaaaggtactaggattagctgcaatctctactttcgatgaggaaatcccagtaagctttctgattcaagtacaatgctgccattttttaaagggccacaactatagaattaccactgttggaatttggtacaaaatatgttttgtctattgaaaacatacacggtaaatggtgttgttaggtaggttctgtccagttcttagggacttttttcacattatagcatttttaccctaaacatgatgttgagattattatatactgtattttcttctaaattaaccctaatgtttaaaaactcactttccccctttaattgaaggcattgttttgttagatgcagtaatgatgtttaccagagattattgtttcctatgcaaaataaattttcatattttgaattctg

SEQ ID NO: 13918 - DNA, 169 bp, Homo Sapiens
ttaaaaattggctgagcatggcatcgtgcacctgtagtcccagctactcggggcgggggccgaggtgggaagatagcttgacccagcttgagcccaggaggcagaggttgcaatgagcgagattatgacacctgtactccagcctagcaacggtaccgagctcgattca

SEQ ID NO: 13919 - DNA, 511 bp, Homo Sapiens
  misc_feature (253)..(463): n is a, c, g, or t
gtatctttgttttatgttttgctgatggttgtgtgtggccaaagtgactaattcatctgaatgtatgtgatgttgaacctgataaaattatagcacttttattgatcagagactaggacacttgaaatatattcttgattaccgcctaagaagatagagccttattaaatgctgctgacacggagataattcttgaagaggtcctagaggcaaaaagaaaaatacagtacagggctgggcacagtgggctcannnnnnnnnnnnnnnnnnnnnnnnnnnnnnnnnnnnnnnnnnnnnnnnnnnnnnnnnnnnnnnnnnnnnnnnnnnnnnnnnnnnnnnnnnnnnnnnnnnnnnnnnnnnnnnnnnnnnnnnnnnnnnnnnnnnnnnnnnnnnnnnnnnnnnnnnnnnnnnnnnnnnnnnnnnnnnnnnnnnnnnnnnnnnnnnnnnnnnnnnnnnnnnnnnntttcattataactccaccgtagcaacagggatcctctataacggcgca

SEQ ID NO: 13920 - DNA, 564 bp, Homo Sapiens
attacctgactcgtgatctacccacctcggctcccaaactcctgggattgcaggcgtgagccatcgcgctaagcctacaatactcatattattaacattcccataaatattatttagagaaggtttagcatcacttataccttatttgaaaatgctttctataaatattaatatataaaataaggtggcttttccgtacagcttctgtttctcaagaggattactgagttcttggtgtagcccattcataaatagggccaaaaatgtatagtcttatgtatgttgaaaaaggtccttaagtaattccagtacttttagctgaaaatcattgatttagttttaagttctaccctattgcaaaaggagttctcaatccttgttacgtgtaagtagtgtcaggaaagacttaaaaattaccaatgcctgggtccctctccagacctttgaactggaactaatgggtggggcttgagcatccacttttagaaatgtccccagtgattcaatgtgtagctctattcacatcagattctctgatatcttgtggcattcattttttctatt

SEQ ID NO: 13921 - DNA, 759 bp, Homo Sapiens
caggctgagctgtcctataagaaggtgagcgaaggaccccctctgaggctttggaggtcatcaatcgaagtccctgctgtgccagaggaaatcttaaagcgcctactttaaagaacagcacctctgggatgtagacctgttggattcaaaagtgatcgaaattctggacagccaaactgaaattaaccagtatgtccaaaacagtatggcacctcatcctgctcgagactacgttgttttaagaacctggaggactaatttacccaataggagcctgtgcccttttactaacctctgtggatcacgatcgcgcacctgtggtgggtgtgagggttaatgtgctacttgtccacggtatttgattgaaacactgtggccaagaaaaatccaaacccacctacatgagcagagttgacttaaggggccacatgccagaatggtacacaaaatcttttggacatttgtgtgcagctgaagttgtaaagatccgggattccttcagtaaccagaacactgaaaccaaagacaccaaatctaggtgatcactgaagcaacgcaaccgcttccaccaccatggtgtttgtttctagaacttttgccagtccttgaagaatgggttctgtgtctaatcctgaaacaaagaaaactacaagctggagtgtaggaattgactatagcaatttgatacatttttaaagctgcttcctgtttgttgagggtctgtattcatagaccttgactggaatatgtaagactgtg

SEQ ID NO: 13922 - DNA, 434 bp, Homo Sapiens
  misc_feature (408)..(408): n is a, c, g, or t
  misc_feature (411)..(411): n is a, c, g, or t
tgctgggattacaggcatgagccactgtgcctggccaggaccatatcttaattgtctttgtagtttcagtgtttggtacagtgcctctcactgtttctttttgcctttgagatcttccctctttgttactgtgatcttccctactggtctttgttcttctgagtctgtccctatcaccacctcaacccgagctggatgtggcctgtcctccttttggtgtttctctcacagactgtgtacagtgccctgggcctgagggatgcctgccgctccctgccgcagtccatccagctctttcgggacattgcccaagagttctctgatgacctgcaccatatcgccagcctcattgggaaagtagtggactttgagggcagccttgttgaaaatcgcttcacagtcctcccnaanatagatcctgaaattgatgagaa

SEQ ID NO: 13923 - DNA, 237 bp, Homo Sapiens
aaatattttcttatttatttatttattttagagacaggatgccattatgttgcctagtttggaatgcagtgtctatttagaggcgtgatcatggcatactatagcctcggctcaaaggaccctggtctcaaaggaccctgccaccttagcctcactgagtagctgggacgagtgtgctgccaccacaccctgccgtaattttttaaattttttgtagagatagtgtctcagctattt

SEQ ID NO: 13924 - DNA, 175 bp, Homo Sapiens
ggtagtgaggaattccttaagactcagtgttatgtttcctagggctgacataagaaagcaccaaaaaccgggtggcttaaaacaagcagaaatgtattacattacagttctggaggctggaagtccaaaattggtgtcagtagggtcatgctctcctgaaggctctgtaggagga

SEQ ID NO: 13925 - DNA, 475 bp, Homo Sapiens
acgagcctgctgtggggccagggcttcccagattacgtggccccttttggaaattcccaggcccaggacatgctggactgggtgcccatccacttcatcacccagtcattcaacaggaaggattcctgccagctcccaggggctttggctactagaagtgaagtggactaaatacggatccctgctgaatccacaggccaaaatagtcaatgtaactgcaaatctaatttcatcctcctttcctgaggccaactcaggaaatgaaaggacgattcttatttccactgcggttacttttgtggatgtgtctgcacctgcagaggcaggcttcagagctccaccagccatcaatgccaggctgccctttaacttcttcttcccgtttgtttgacaatgctcagatgcatcagttccttaatatacacgtgaaatttgaaaactgtacattcggtgagattaaattttattttcaacc

SEQ ID NO: 13926 - DNA, 945 bp, Homo Sapiens
gccttagcgcggtgtgacgtatttccctgtggaccttggggcacttctcttaatagtatgtatccagctgacatttggataagcaggtaaacgctggaacagggtttatgcttgggttttggtcaatgccatgagtttcccaagtcgtgaacacaatgcatggtatcaaaggttaatgttcctttgttctaaaaggagttatatccactggccgcctatcatatccctcctgggttgtgtattgaagaactctggcactgaagattcaagaaggtgaacagagataagaggtgcctattcgcctattttgtggacaaccttaaaacggtttaaaaactgggagggaagttaaaaaactgggggtgaaaaacaacgacgacaacaaaaaccgtagccctagaaacattgtctctgaagtaaagttagatgtcttcaggacaccctgttaacaggggttgccaacaggttggaaacttgtgggttccagtattcacgttatttgttcccaaagtctacaaggtgactgaaatgtactgagaattccagtgagaataaggcagacgtggcctgaaatttatgatgctgtctaccaaaaacctgggctcgaggccagcacctaaagaaaacaaaatcaaaatttgatcaggccacaaaagaatacaggacaccctcaaacacagattaccttacgttggctccgtgacgagattactagcctcttgtcaccaaaaaacggaaacaacggctgagaaagaagccgggcgcgaagcccaggccttcaaaggttcgctttaagaacagaaaggcagtgctttcctcagtcctcgccccttggggcgagctgggcaagtcggggcagcaggcagcggcgtcgcccagcacaaggcgtgaatccgggaggagggcgtggcaccttctcttcccgttcgctcgagcaggcgcgac

SEQ ID NO: 13927 - DNA, 211 bp, Homo Sapiens
accaggtagcgaactgaggctttaaaaggttacatcaaccgtctcaagatcagacaccaaaccatagttcagctaggtgtcgcaggggggaatacttattaagtgctaagcactgtatatgtattggttcacttaatcctcaacaaccctatgaggtagctcctgtttagagaccccctttttttagaggaggaaactaaggcttagagtg

SEQ ID NO: 13928 - DNA, 1021 bp, Homo Sapiens
  misc_feature (62)..(76): n is a, c, g, or t
gaaaaaggcctgggtacgcgtaagctgttacccctcgagggatactctagagcgggccgccnnnnnnnnnnnnnnnaatattactaatcaaatctatggcttttatggtttttaagtaagggggggtatatgtcatctttttaaatgtttctttggggaagatcttatagaaaagggcaccctgaaactttcagctctatgtcccaaaaattatctttcaacaatctgatgaagtttcttaaagaaactcttaaaaatgaagataatataccgggcctaaatcaaaacaatctgaaaaagtggatgtgtcccagttggaaagactcaagtcttttcaagtttatcagaaatgccactatacaccacggtactataagtcgaggaggatggatatccaaaggtatcattggttgacagttcctgatggtctcaggtatatcctataatcacgggttactatgcatcatttcttgtagataaatggtattcatgtgataagctgccatccaactgggatgtctctgagcattccaataatatgaatgagaagcggcagcataatattcttgccatgccctgtagtaagctctccagtactcctcataatcctgataggtatcagaaaaactcagacgtatttccctatgacagtcatacaatcatcttcctgggcttcagttctgcaatctgaaggaagaccgctgggtaggttctccggactctgcttagctcctctgggtaggcccctctttaagtcttgctcatctggatccaggtgatcgtgatattctctggatggggggtacctccattggggggtgttccaaggaatagaactccacaggggagattcagagtcttccagtgatattcaaagactcaggttgattattcctgctgaggaaggttgtggtaaacagctactcacaccagatggtatcatgacacgggcccgtgactgttccaacatgggtcacgtccggggagagagtaaggctaacctaatataacacacaactgg

SEQ ID NO: 13929 - DNA, 525 bp, Homo Sapiens
ctagaggatcccatgcgcgacgcttccatcaaatatgcttatatgagtggctgagaggactactaactagtagacagagttttaacatcatatttggtgaatgtccatattgtagtaagccaattaccttaaaaatgtctggaaggaaacactgaaataagaatacaacatttcggtgaagagctggaaacttaaaaaattatcaaaaggaattttggtatcatcttcagagaaaaaataaagcaagaaatactaacatcaaaaggacaggtatgatgatgcgataataataaacatctgcgtttgtctcttcactaagagtaaactgggaaattgtaggccaaagtccagttgaactttctaagtctgtgatccccgtgctgactgtggaagtgtatttataccaagatggagatcttgacttcttgaatatatctggactggtaaaatcttgatgaggctcataaaatgagtttgggaattgtgtatagctgattttttgtgggaaactgtgcatggggaccg

SEQ ID NO: 13930 - DNA, 577 bp, Homo Sapiens
ccacagtctgtctgtcttccagttcatctcagtcctcgagaaaggccctttaaatatgtcactttcccattttcctttaaccatgggttgtgtgagccagaaagagctttgagaaagatggctgcttccaccagggtggaggcttctaggtctgcatgatgatggggcccgtttctggccagagggtggctctgggagcagttgtgctgcgggcttgctgggggagaactctaactgttgcagaaacagagcttcatggcttgcttaaattacttagctggaatattttaaagtgtcagataatgtgatgtacaaagagagtatgccgatgcatttcattgtttttgcattatctgtatcagtgtttcccattgctagcccgaataatcaagaccagactgtttcttgtcactggattctggaagccttgccctttcaactggatttatgtttgtttctgctgctgtgaaaccccaaagtaatgcagtaggttttaattgaaaattgtttaattctattattgataattatttattgtaataaaagtaaaagagtaatttttaaatccttttaagga

SEQ ID NO: 13931 - DNA, 503 bp, Homo Sapiens
acgaggtcaagtagtaagagaagcggtaagagtgacgggaacaggagtcattgacctcttgggagaggagacattggaggtggtgatgatttgctgaagcagccacacacgttcagcttgtgaggacagcagttgttaggcaggggatgagggaggaagctggcagatctgtgcaggtgagaggtacctgtggccttgggctcatggaagtgggaggtgatgggattctaatgtgcttgggtacagtttacaaatacaacctctcttagtttgcccaatacctccaaattcctggggtggcacacctgaggttcaggtggcatgactgagccacagtcacacatccccactgtaggataccaccacggttgggttaggttccagcacatggcggtcccggcctggcctcttggtcccacctcacctggtgactagtgcagaccactctgttcttgcctgtttcaggcagcggaggaggagaaagagatggacctcccggactc

SEQ ID NO: 13932 - DNA, 559 bp, Homo Sapiens
agaggggacagagtggctgccaaaaactcgctggaggcccatgtcttccatgtgaaaggttctttgcaagaggaaagccttagggacaagattcccgaagaggacaggcgcaaaatgcaagacaagtgtcgggaagtccttgcctggctggagcacaaccagctggcagagaaggaggagtatgagcatcagaagagggagctggagcaaatctgtcgccccatcttctccaggctctatggggggcctggtgtccctgggggcagcagttgtggcactcaagcccgccagggggaccccagcaccggccccatcattgaggaggttgattgaatggcccttcgtgataagtcagctgtgactgtcagggctatgctatgggccttctagactgtcttctatgatcctgcccttcagagatgaactttccctccaaagctagaactttcttcccaggataactgaagtcttttgactttttgcggggagggcggttcatcctcttctgcttcaaataaaaagtcattaatttattaaaacttgtgtggccctttaaaaa

SEQ ID NO: 13933 - DNA, 549 bp, Homo Sapiens
  misc_feature (37)..(37): n is a, c, g, or t
tgcgaaatgagccaaaggctcttggcactgggattanattgagcagcggttagaatggttgaggagaactctgaatttgttgttgctttaatttctggctcccgagtaagcatgaaaccagaatttcttcacttgattcagggagttaagttggaagcaggaggagataatcttggccaacagtacaatagcccacaagaagttattggcaaacgaggttccgatatcatcattgtaggtcgtggcataatctcagcagctgatcgtctggaagcagcagagatgtacagaaaagctgcttgggaagcgtatttgagtagacttggtgtttgagtgcttcagatacatttttcagatacaatgtgaagacattgaagatatgtggtcctcctgaaagtcactggctggaaataatccaattattcctgcttggattcttccacagggcctgtgtaagaatgggttctggagttctcatggtctttaggaaatattgagtaatttgtaatcaccgcattgatactataataagttcattattaaaaaaaa

SEQ ID NO: 13934 - DNA, 700 bp, Homo Sapiens
  misc_feature (131)..(131): n is a, c, g, or t
  misc_feature (275)..(333): n is a, c, g, or t
  misc_feature (630)..(630): n is a, c, g, or t
  misc_feature (663)..(663): n is a, c, g, or t
actcccttgccggccccagggtaagagccacctcctaggccgcagtggcccaaggtcccagctgctcgcctgaggccgccgggggtacggtccaggcctcccgtctccgggggatctgtagggttcccgcnctgcgatagggcggcccgttccctcctcttggcgcaggacgccccggaacccaaaccaacatttccagctctcaggtgtacagaaatgcggtttactttgtaggccacgttggttcaataaatgatgcagcggacacagcccgnnnnnnnnnnnnnnnnnnnnnnnnnnnnnnnnnnnnnnnnnnnnnnnnnnnnnnnnnnntaggcgccgcggcaggtgtccgcggtgaccggcaggcagctgaggaagcggaagccgaatctgctctccgccgtgttctgcaccgacagggccaccagggggcagctacggtccacgctcttccggcacacccgaactcggtgttctttctggagccgacagtcctccaggcccagcccggcctctgcgggaggcgacggcagggtggggtcacccgggatggcgggcaggtgctgcggcgcggggatctcggggttctcgggccgcgcaggcccctcccgcgcgtggaagagcttncccgagctcactgggggcagcaggccccgcgtncctggtctccggcgactgacccggggctcccgcaccc

SEQ ID NO: 13935 - DNA, 373 bp, Homo Sapiens
gaagtttagtctaagatgaaagtttactagctgcaaaatagctcgtgttgcctgttcttatcagcctgccccagctacttaagtcataagtcaaatacctgaagagcccctgagctaactaggattgcaatgcattgtgggctgcaacaaaacgcagcaggacaaccctaaagaaaacacccaaagcccctacccaacgaccaataggcaatgtccgggaagattgtgaccccataatacacagcccatggggaactgggggaggcacctgtgcactaggggataaattgcttgttgaaactgtgctgggtgtgcctgctgccagacacccaatattacaagagcatcattaaaagtctcactttcgctgtta

SEQ ID NO: 13936 - DNA, 612 bp, Homo Sapiens
aggaagtgattttgctgtcacgactcttcgacaaggagaggtcccaaatgttgtccatctccctacacatgcactacttttctcctgtactgtcgcctgtctgattcgctataataaatctgtgagcctcagggcatttgcttcagaatttgaacaccagtctttccctatagacacatcccttttaacgataatttttgaaaattttgtttcttgttaacaaatctagaatagctgatggattttcttaacctccagaaaggttttctgtaacacataataaaccttatgttaacacgttcaagactgaacaaagcatcctgccttctttgatgctccactgtggagtctttgatcagttgaatttgtcagtgtgcattttgtatgctcatttcttgaaaagggtcttaaatacaagagcacattctaaggtggaataacttttcttctgacagttgcacagtttcataacagtttgtcaggcttttcagtaagtacatggttttagggcacgtagaacttagaatgacctcacaaggcaacttattgggacaagaattatgacatttgtctcccactgtggctattagaaaatggtgtccccttgagtgc

SEQ ID NO: 13937 - DNA, 452 bp, Homo Sapiens
ggacacttcagagtcccggccttgggctacctggacgtgcgcatcgtggacacagactacagctccttcgccgtcctttacatctacaaggagctggagggggcgctcagcaccatggtgcagctctacagccggacccaggatgtgagtcccaaggctctgaaggccttccaggacttatacccgaccctggggctccccgaggacatgatggtcatgctgcccaagtaaaatgcatgcaaccctgagaccaaggaggcgccctgacacctccggagcccaacccccgcccttcccaggtggagccaaagcagcaggcgcctttgcccctggagtcaagacccacagccctcggggaccacctggagtctctccatcctccaccccccgcctgtgggatgccttgtgggacgtctctttctattcaataaacagatgctgcagcctcaaaa

SEQ ID NO: 13938 - DNA, 459 bp, Homo Sapiens
tattactagtgaattcactagtaatgccccgagggcgcacagggggcgggcggggtgctgtttgcgcccttcggccgggcgggcgccccgggaccaggcggcggcagcgacctgcggcggcgggaggcagcgagggctgagccccgggacgcgcggaccggctggcccaggagccggccccggagacgcagttcaagcgccgcagctgccagatggagttcgaggagggcatggtggaggggcgcgcgcgcggcgaggagctggccgccctgggcaagcaggcgagcttctcgggcagcgtggaggtcatcgaggtgtcctgacccctccgctgccctcggccccgccgcccgcagccaggcccgttataaatgtatattatatataatgcaaagaaaggtaaatggtttcactgccatttttatcgagaaagtaaatatttagattttttatttattt

SEQ ID NO: 13939 - DNA, 297 bp, Homo Sapiens
gttgaactgttaggatgtttgtacgcagtgttcacggggagcaagtgggcagggacggtccagatcgatggccacccactgagtccgctgctacgtggccccctggggctccttccggtgcagccccttcctgcagctgttcttctttttgttcctgacatttcagctcttcttctaaatgtctgtcttcttgaaggctggaaattaccttcttctcatgaccagaatccaaagagattgcgtaaatcccactttttctttcttttcagttctttacgtattgtaaaccagatcaca

SEQ ID NO: 13940 - DNA, 258 bp, Homo Sapiens
  misc_feature (56)..(112): n is a, c, g, or t
  misc_feature (131)..(140): n is a, c, g, or t
aaaccctctctactaaaaatacacagaattagctgggcatggtggcttgaacccannnnnnnnnnnnnnnnnnnnnnnnnnnnnnnnnnnnnnnnnnnnnnnnnnnnnnnnnaaagtgaaattccgtcttnnnnnnnnnncaaaggaagagagaattggctgaggttttctaatgaaaacatcagaacatcacgtgtactgagcacacagataaagataaactaacacttttgtcacattatagtgaaagtacagaac

SEQ ID NO: 13941 - DNA, 652 bp, Homo Sapiens
tagccaagagaggtctgcgggaccttagagcataggagatgctgtgtccgaggtgcaggcacggggtagaagagcctcataggtggtgactggcaggctaagttgtctcctgggagagctcaggttcacccaccaggtcccagccccactttgagcctgtttttctccaatgtggccaagaccccaggcagaggcagaacttctgcagccagaacccggcttggatgcccactttgtagcttctccttctccattctcaggcagaccccctgggatgaaggggagggcaggggtggaggcaccttgaggccaagccagcaggtgggggtgctgcttgctcactcttgcgtccctagctaggtcagcaccagctcctctgggccccaggacagtctgtggagcctgctcctcacctgccctgggagcctagggtaccaagggtaccgaggaagccatgggtagtggggacaccatgggtactgagggtactgagggtcctgagggcttgaaggtggggtcctcagggatgtagacagtgctgttcccttcaggcatctcccagtagaccgcatcctcaaagcagttctcatctgaaggttgtccccagaatggtaatctcaaaatgagccccacaatgatgccacccatcagg

SEQ ID NO: 13942 - DNA, 912 bp, Homo Sapiens
gacatggaagctctcgaggctgacctgaaacatcgatttacccgacaggagtgggacttggctaagagcctacagaaaaccatccaagcagcgaggtctgagaattactctctgaccgacttctgggcctacatggttgtctctaagcaaaccagagaactgccggagtctcatttgtccaatatgaagaagcccgtggaagaagggacactaccctacccgatatttgcagccattgacaatgacctgcaaccttcctggcaggaggcaagagcaccagagacctggttcgagttcacccctcaccacgctggcttccctgcactgggggcctttgtttccataacccacttcggaagcaaattcaagaagggaagactggtcagaactcaccctgagagagacctgactttcctgagaggtttatggggaagtgctcttggtaacactgaagtcattagggaatacatttttgaccagttaaggaatctgaccctgaaaggtttatggagaagggctgttgctaatgctaaaagcattggacaccttatttttgcccgattactgaggctgcaagaaagttcacaaggggaacatcctcccccagaagatgaaggcggtgagcctgaacacacctggctgactgagatgctcgagaattggaccaggacctccctggaaaagcaggagcagccccatgaggaccccgaaaggaaaggctcactcagtaacttgatggattttgtgaaagaaaaacaggcatttgcgctttcaaagtgggcaatgggggaccactcacaaattcctgtacaaacaacggtggcatcccgggacaagataatgagccagccggaagcacctcaactggtggatgcgggttagccatcaaattccctcccaatcgtgttgccc

SEQ ID NO: 13943 - DNA, 315 bp, Homo Sapiens
  misc_feature (110)..(165): n is a, c, g, or t
gtcaggaatctgagaccagcttagacagccaaaaaaatttagccgggtgtggtggcacacagctgtagtcccagctactcaggaggctgggccgggagaattgcttgagnnnnnnnnnnnnnnnnnnnnnnnnnnnnnnnnnnnnnnnnnnnnnnnnnnnnnnnntgacagagcgagaccccatctctacaaaaagatttaaaaattagccaggcactgtggcttgcacttgtattcccagctactcaggaggctgaggtgggagggtggtttgagccagaagtttgaaaccaaactatgtttactgggaacact

SEQ ID NO: 13944 - DNA, 144 bp, Homo Sapiens
ggaggcacaaaaccccaggcttcaagtctctgcagcctgctccacatttgggcacagaaggactcagacaggcactgtgtgggcacgaggttttacaggggtggtcagacctcaggctttaatgaataaagacactactcccaa

SEQ ID NO: 13945 - DNA, 427 bp, Homo Sapiens
  misc_feature (361)..(361): n is a, c, g, or t
gagtatcgcttcagggaaaaaacatttatcatgccagttgccatgggtcaggagtgcaggcactgcttacctgactcttctggcttggggtctgtcacgaagctacaaatcaaagtgtcaagtgggctgcagtctcacatgaaggcttcactggggaaggatctgcttccaagctcattcatatggttgtcagcaggattcagttcctcataggctattggactgaggatctcagttcttcactggctgttttctggaggcctccctcagttcctcacatgtgagcctcttccccatggggcagctcacaacatggcagcccatctccatctgttcgggcctcggtcgcgccgccgggtcnttgcagacgcgaatgtaaacagaaacacagtgaaaggcgttcggagagcctcgtgactgcggcacg

SEQ ID NO: 13946 - DNA, 517 bp, Homo Sapiens
catagaaacataatctaaatgtctctaaattttccactttgtgttttctaaacacaaattgtattactcatttgagcataactcaagaattcagcgatgataaattgaagggctgaatgtgagaactccattaattccacttcttccaagaaagttaacctcaggaaatactgtttgaagagaagaaagtagtaccaaacaaaaaccttaaacagtacttgaatcttttttgcgctgagactataaagaattcattctaacatcgtgtttcataagggccacatcattcgttggagcatgatagtgtgatttgtgtacaattgttacctctcagctgctgaagttcacacttcaaggatctaggagctctgtgaggggtcgtccagcaagatgctgatttgtctttcagttggtatggtttctgtgatcggggtaaactcccgtctcccactattcaaaagcagcccaactcatgctttggaatccactgaaataaaaatagttacatgaagtttaa

SEQ ID NO: 13947 - DNA, 184 bp, Homo Sapiens
atggagaaagacggaagcgctatgggtacatttgaagggagtgcagcgataaccggagtagttgaaatggtaataagacgaccaatctgaccagcaaggaagccaagatgggaaaggtcatgcggcatacgctcggcggccagttatgaatattagacataatttatcctcaagtaaagggggc

SEQ ID NO: 13948 - DNA, 516 bp, Homo Sapiens
gtatatacacacatgtacacacaccctacaacccagtgatttcaaaaaattaaacatttgtttagctcatgaatctgtgggttgggtgaacatttctattggtcttggctgggctcacctgtacccagtcagctgcagggtctagctcttcttatcttggctgggatctcacacatgtctaggatcagctgctttactagtctaggattgtcttggctgagacaggtggactactcagttctcctccactgccttatccttcagctggccagcccagaaatgttgccatgtttacagcataagagcaagcaagaaagaataatatgcaaccacttttccaagcctaaggtgaaagggcgggcagaacctgtggtgttaggaggcaactcataccagcccatgggtctactgtttaattttcagaaatttggcaagctgattgttaacacagctgttgtttaatttatgtacttgtaattaaataatttacattaaaacaaagataataggtactca

SEQ ID NO: 13949 - DNA, 345 bp, Homo Sapiens
tagaggatcgttctcttgggacggcggggcagacgactgtggggatggctctgacgagatcccttgcaaaaagacagcctgctggtgtgggcgagttccgcatgccgggacgggacctgcatcgggaactccagccgctgcaaccagtttgtggcatagtgaggacgcctcagatgggatgaactgcagtgccaccgactgcagcagctacttccgcctgggccgtgaagggcgtgctcttccagccctgcgagcggaactcactctgctacgcacccagctgggtgtgtgatggcgccaatgactgtggggactacagtgatgagcgcgactgcccaggtgtga

SEQ ID NO: 13950 - DNA, 715 bp, Homo Sapiens
  misc_feature (461)..(559): n is a, c, g, or t
ccaagccctccgtctatttcatcaagtttgatgatgatttccatatttatgtctacgatttggtgaaaacatcctagatgtcatcacaaactctgccaaatttgtggaactatgaaatgtattatttgtagacataaagacttgattgctttccagtttaatgaaagcttaaatgtccctgcgaacccacaatctctgccagcagaactggttttgttctgaatagtacagattgatgtgaacacaaagcattttgtgtaaggagaacccctttcttttaaaagaagtctgtctatttcgaggggagttacaggcaagtttggtaaaagttaagcctagtatcatagtcatttaaaattgtaatagatcttaaccattttccccctcaccctaactctcttattccgccgccacaatgcaagcatagtttgatgttttcgttattgccttttttgagatgnnnnnnnnnnnnnnnnnnnnnnnnnnnnnnnnnnnnnnnnnnnnnnnnnnnnnnnnnnnnnnnnnnnnnnnnnnnnnnnnnnnnnnnnnnnnnnnnnnnccactggcagtctttgtggattaggatgggggtgacataattttcttgagtttaacaggagtgctttacccaagtcagtcatggatatgatatcactgctctttatttaaaagtaaactttgggcacaggaaccatatgggaacattcagcttgtt

SEQ ID NO: 13951 - DNA, 336 bp, Homo Sapiens
gcagccccataaaccgtgactggaagcccttgcagtgcctgaaagtactcaccatgagcggatggaacccgtcacccggggaaccggaagatgcacggggacctcatgtacctgtttgtgatcacagccgaggaccggcaagtcagcatcaccgcgtccacacggggcttttacctgaatcagtccacagcttatcacttcaaccccaagcccgccagcccccgcttcctaagccattccctagtggagctgctcaaccagatcagcccgaccttcaagaagaacttcgctgtgctgcagaagaaaagtagctgcctttgtcccctcccgccgtcc

SEQ ID NO: 13952 - DNA, 345 bp, Homo Sapiens
cgctctagaggatcctcatgtgctttgggacggcgtcggctggacggtgtttcagcgccgggaggacggctccgtgaacttcttccggggctgggatgcgtaccgagacggctttggcaggctcaccggggagcactggctagggctcaagaggatccacgcccatgaccacacaggctgcctacgagctgcacgtggacctggaggactttgagaatggcacggcctatgcccgctacgggagcttcggcgtgggcttgttctccgtggaccctgaggaagacgggtacccgctcaccgtggctgactattccggcactgcaggcgactccctcccaaagcaca

SEQ ID NO: 13953 - DNA, 488 bp, Homo Sapiens
tgccttttgcttgggatgcgaatgatcctgtcatccaggtagtgagtatagcacccagtgaaactgtagtctcatgccaggcactgtgctagcccactctggctcatttaatcctctcctaagaagagaggagacacagcgtccccatttgacagatgcagaaagaggttccacaggtgtgccttgattctgtcctaaaaccgtttcccggaagcttttcctggtgtgggcgcttctaacctaatcctcaatcgattccagaactattactctgtttccacagtgatactgtgtctaggttttagggaggacagttcattgatgttacttaagaatgctttccaggtggaaagttccttaagtttgaggcttcaaattccatacagcacattaaaatcccattcatgagtttgaaatactgctctgttgtcttggaaataccaatcagattgttggctgaagtgatgtggataaagaagggatcttag

SEQ ID NO: 13954 - DNA, 945 bp, Homo Sapiens
gcagaagccaaaaagggtgacagttgggtcctcaacacttttctgggctatttaaagcaacagaccttcgctgtcagtgagagtcctgtcacacctctgcactcgctgagcttcttgacctgctggacagcagacattttcttcatcagcagctaaacaggtgtttgaggaactgtggaagagggaaggcaagactccagggcagattgtttcagaaaagcagcttgaactgatgcaggaccagggggcactggagcagctttgccactctgtgatggaggcccatcctcaagtggtaatggatgtgaagaacagaaaccccagagctataaataaactgattgggttggtccggaaagcgactcaaagccgagcagatccagtcatgataaaggagatcctggagaagaagctgtcattgtgagatgtttgggatccccttgcccaagggacaacaacaaacagtgcagcctgactgggaacaggatcctgtgaaagctgatgcccatgtgccctgagagctgcctctcaatccctgtcccaagccacagctatggcgttaatgtcaccagtgttctcaccctctaggccctgtgcctggaggtgcctccacagccgaccagcagccaccccgcctgcttcatccacatcaggagggtccggtgaggctgcagcagtggtcaaggagtaacaccttcttgtattaaggaattttaaactaaataaaatgtatgttggagatactgttacccattctaagaaaacttttcattctgcagttccttcaacaaatatttttgagcaactcctaagggccagccattgtaggtgatgggcattagcagtggtcaagagagactgtaatttggatgtattgttttcagacctaaacacaggttaacaaagatgaaaatacaaccaaataaactggcacagtataaacac

SEQ ID NO: 13955 - DNA, 729 bp, Homo Sapiens
  misc_feature (617)..(635): n is a, c, g, or t
tgtactaagacaataatcgctttctgacaaaggagccatgcacatttgggtgagcagacccaagctgtttacaggctctttcttgtcctgccatccagtagcagttagtcttcatccccacgtgaacaaaatgggaaggagccgtgaggagaggagtgaggcaacaggcacccgaagtccctcgtccttccctctgtgtgctctgaatatgtccttgtccttcctgacccatccctgaccagctgggaacctgcttggggtccccatcaaacctgtgtctggggtgtgggctcacagatccctatcagcctggttcgtgggagggctcttcctaaagggacccccatctctaagtcactctgaaagggagttgtggagaggagacgcctccagactctcagaagttttgaggactgaactgggtcactcgggatctgtgttcgaatcctccccacccctttctttgtggagtttcctaacctgctgctgaagcacaatgttttggtgctttcttttctcatttgttaaaggcagtgtccaaaagccattccagatgccaagaccaggggcttatttctagggaaggtaggtcggtttccatgtttccctcccgttannnnnnnnnnnnnnnnnnngcctgagacaagccgagtatgaggtggtttgatttaagaaaaatcaatgaaattgtttactactgttttaaaataaaaccgtaaactctgaaaa

SEQ ID NO: 13956 - DNA, 514 bp, Homo Sapiens
ctcctcgctctggagggcaagttgctccagaaacagtacctctccattgcagagggtgcggacttctccagctctccgaacctcacggagactcaggtcaaaatcttgttccagaaccgaagggccaagacgaaaagactgcaggaggcagaactggaaaagctgaaaatggctgcaaaacctatgctaccctccagcttcagtctccctttccccatcagctcgcccctgcaggcagcgtccatatatggagcatcctacccgttccatagacctgtgcttcccatcccgcctgtgggactctatgccacgccagtgggatatggcatgtaccacctgtcctaaggaagaccagatcaatagactccatgatggatgcttgtttcaaagggtttcctctccctctccacgaaggcagtaccagccagtactcctgctctgctaaccctgcgtgcaccaccctaagcggctaggctgacagggccacacgacatagctgaaatttgttcgttga

SEQ ID NO: 13957 - DNA, 759 bp, Homo Sapiens
  misc_feature (49)..(49): n is a, c, g, or t
  misc_feature (139)..(139): n is a, c, g, or t
  misc_feature (172)..(172): n is a, c, g, or t
taaaggggtgatatataatatacatataccaatgctattattcataaanacctggtttagtaatacaaagaattgctttgtttacatatgaatattatagtctgcttctcatggttaggaaataatagtctttctgaanagcaggtgctttttctactacaactccatatcntgggcctcatcttcggaaaagtcagacatagagctctccgatgagctgtccccggtaccctcttcctgttcttcagcgccctcctccgtggcgtatttctggatgtactctttaattttctgcttgtattcttctggtcggtggaggtacatggctgcagcgtcaccattgagaggatctatggggttaggataggccaataactgaggcaggaaggactcaaatatattggtaagatcatagagagctgtccaagtttgattaattacatctagacacacagttcctgacgcttcatcaatgatgggatggaaaatgttattcatgaatcctatagaatgcagatttgaaagggtaattaatcaggtaggtcgcactctaactttccatactccgccttcatatggtgttccttgtggtccataaaacttcactacaaattcattaagtcctcccaggatcgtaacctcatgtttactctcgatgagcttgaccacgtccgtgtccatccgcctcttgcccggactgggagatgacatggtgtcgccgccgactctctcccttcctcgcccgtctgtcgacggccc

SEQ ID NO: 13958 - DNA, 281 bp, Homo Sapiens
gcttaggtggcttccacctcagcctcccgagtagccggaaccacaggcgtgcatcaccacacccggccaatcttttgtatcttcagcagaaatggggtcccgccatgctggccagcctgatctcgaactcctggactcaagcaatctgcctgcctcgggcctcccagagtgccgggactacaggcgcgagccaccgcgcctggcttctgctgtattcttagagtgggtaacaattgtttactctcattgttactaattctactagtagtagagctcttttc

SEQ ID NO: 13959 - DNA, 427 bp, Homo Sapiens
agctgggtgtagtgctggacttgcaggttcaggagctgctcttctatgagccagcctccggcacagtgctctgtgcccatcatgtgtccttcccggggcccctcttcccagtctttgctgtggccgatcagaccatttctatcgtccgctgacctctggccacaggaagccaggtccaccgcccaccaccctttcagggccatgtttctactcagtgtgcttttcccaaatgatgtgtgtggtgtttctaagagaaacagggcccataaccagtgggcagctttaggagggatggggatctgtttcagatctaggcataacctgtaaatcacaggtgtccaaacttttggcttccctgggccacatttgaagaagaattttcttgggccacataaaatacactaacgatagctgatgagctaaaaaa

SEQ ID NO: 13960 - DNA, 106 bp, Homo Sapiens
gaacaaatgcctttttaaaccttttaagaacatttttaaaatgtctttttctatgtcaaatgtaacgtttatttttttaaacaataaaattgatttgccaaaaaaa

SEQ ID NO: 13961 - DNA, 530 bp, Homo Sapiens
ggcctttgaatgtagtgacaaaatccgtttatgtgcatgaccactacatcttcagggcagcatcggagccgtgtctgaggaccacacctggcacctcccttccccatctgcaaaagtagggactgtgaccctcctgcgaatccagttcatggctattttgaaggaaataacttcaccttaggatccaccattagttattactgtgaagacaggtactacttagtgggcgtgcaggagcagcaatgcgttgatggggagtggagcagtgcacttccagtctgcaagttgatccaggaagctcccaaaccagagtgtgagaaggcacttcttgcctttcaggagagtaagaacctctgcgaagccatggagaactttatgcaacaattaaaggaaagtggcatgacaatggaggagctaaaatattctctggagctgaagaaagctgagttgaaggcaaaattgttgtaacactacagctgagcagatgtaatagaaataaacctatgaataaattttcttcttggttctga

SEQ ID NO: 13962 - DNA, 390 bp, Homo Sapiens
tttcaagggccatgagcctttgccagtcctttctcctgcgacgtgactgacagcaactcaggctggtcccgtattccagtcccaggagcctcaaaacggactctgcctgggagtcacccgacagctgaccaaggggcagagctgagaagagggcgtgggagttctgacgctgtgttggacctcctcgatgtgcctgttcaacagcacagcctccaggtcgcagccctttccacagcagacatggtgacgaggtgaggccagggcaggaacagttttcagggctgctcgtctctggccagctactcctgcctatcctggctccaagtgacctggcgagccacctgtcagatttatgttcctaaacactgctttacctttgtcattctgatt

SEQ ID NO: 13963 - DNA, 159 bp, Homo Sapiens
tgctttgggacgtgtgtctacagtaaggccccctgctggctccgacagtagctcctctgggggctccacagcgaggatggcgacagaaggcagcgagtgccatggatgcggtgagcaggggtcccggccgggaggcccccccgccgtcccaaagcacag

SEQ ID NO: 13964 - DNA, 412 bp, Homo Sapiens
  misc_feature (358)..(367): n is a, c, g, or t
ggttccaaatgtaaagctccttgtgtttacctctgtttatgtcattcttgacatgtttatctaaattatgtgtgctctgtgacaggtgaaatgtaaatctgggatccatagtcaagatatcataaggacctacttcccagcctacctttcttcctctacctgataatgataatactcaaaataacaacattcaaaggaaacacaaagaaatcctgctttcacatctcctatttcttgggctccttaataactactgatggtttgttcatgaaaaaaaatttttaaatcaaaagattgtacttggccctgagttgaaaaaatttcaaaaatcaaaagtttgtacttggccctgagttgnnnnnnnnnnttcacattctaagaataaacagaaaaatgttcttcttaaaagtaa

SEQ ID NO: 13965 - DNA, 222 bp, Homo Sapiens
ctgtgctttgggacggcgacgacggcgtcctgcgctccccacggggtgagcccgcgctccgggacatcgtacagttcgtgcccttccgggagctcaagaacagaacagcacaaggggctcctggaatccaccacgcggcttcccccgttgctgccaacctctgcgacccggcgagacacgcacagcacacacaagagcttctacccgccgtcccaaagcaaa

SEQ ID NO: 13966 - DNA, 615 bp, Homo Sapiens
gtatgtgcaatctgctatcatgagtttacaacatctgctcgtattacaccgtgtaatcattatttccatgcactttgccttcggaaatggctgtacattcaagatacttgtccaatgtgccatcagaaagtatacatcgaagatgatatcaaggataattcaaatgtatctaacaacaatggatttattccacccaatgaaactccagaggaagctgtaagagaagctgctgctgaatctgacagggaattgaacgaagatgacagtacagattgtgatgatgatgttcaaagagaaagaaatggagtgattcagcacacaggcgcagcagctgaagaatttaatgatgatactgactgatgaaaatagcatttattaatgattgaggtatttgtttaaaattcagttcatccaaaatggagtaatatccttcaccttcagtgtgtaaccaagcacaaaaacagtatcaatgttgaatctgtgaatggttttccgtttactgtgatgtgctactgtaaatatacctctttaattacttctggtctctttggtgacctgtttaaatttgtgtacattattgtacatagaataaaatgttttcacatttttatgaca

SEQ ID NO: 13967 - DNA, 1104 bp, Homo Sapiens
  misc_feature (796)..(796): n is a, c, g, or t
ggcgccccaggctggtgccggccgggtccctggccagccggagcaagcctgactcgtgcagccgccggccgcgtcctggccaggcggagcgagcctcactcccgcagccgccagtctggttccaggcctcccgcaggtttcgggggccgaggcggaccgacaggcgccagccaatcgcgagcacggagccggcctgggggcggggtggtacccgctccgccaatcgggtgggggcggagccagacgccgggggcggacgggaggaccggaggaccgaggacagaaagattgggtggacaggagcagcggccggtggggagggcgctcggcggcggcctgcggccatggccaccgtgatggcagcgacggcggcggagcgggcggtgctggaggaggagttccgctggctgctgcacgacgaggtgcacgctgtgttgaagcagctgcaggacatcctcaaggaggcctctctgcgcttcactctgccgggctccggcactgaggggcccgccaagcaagagaacttcatcctaggcagctgtggcacagaccaggtgaagggtgtgctgactctgcagggggatgccctcagccaggcggatgtgaacctgaagatgccccggaacaaccagctgctgcacttcgccttccgggaggacaagcagtggaagctgcagcagatccaggatgccagaaaccatgtgagccaagccatttacctgcttaccagccgggaccagagctaccagttcaagacgggcgctgaggtcctcaagctgatggacgcagtgatgcntgcagctgaccagagcccgaaaccggctcaccacccccgccaccctcaccctccccgagatctccgccagcggcctcacgcggatgttcgcccctgccctgccggtccgacctgctggtcaacgtctacatcaacctcaacaagctctgcctcacggtgtaccagctgcatgccctgcagcccaactccaccaagaacttccgcccagctgggggcgcggtgctgcatagccctggggccatgttcgagtggggctctcagcgcttggaggtgagccacgtgcacaaagtggattgcgtgatcccctg

SEQ ID NO: 13968 - DNA, 782 bp, Homo Sapiens
tgagagaactggaaggaatggtacgggggctgaggcagggtggcgtgtccctcctaggccagccacagcccctgacccaggaacagtggcggagctctttcatgcggcgcaaccgagaccctcagctcaatgagcgagtgcaccgtgtgcgggcgctacagagcacactcaaggcaaagctgcaggagctgcaggtcctagaagaagtgctgggtgaccctgagctgacaggagagaagttccgccagtggaaggagcagaaccgggagctgtactcagagggcctgggggcctggggagtggcacaggctgaaggcagctcccacatcttgacctctgactccacagaacagtccccccactccctgccctctgaccctgaagagcactcccatctctgccccctgacctcagagagcagcctccgacctcctgacctctgaccctggccagcactctagctcctgacctttgacccgagggccacctcaaccccagcttctgacgtgtccaggacagagcatccctggattctgttcagggtgggaagtagtactgctagtcatggtctcaccccgagctgacccctctgcctgggctttgtgccaccctctcccttgccaaagaagaaactctccccccaaatcctccaacctctggggccacagccctgcccctccagttccttggcagttctcccccaaaccaggtctgtacaggtgttctttattttacatgagggctactttccaaccaaataaagtcaatttttctaagaaaag

SEQ ID NO: 13969 - DNA, 1322 bp, Homo Sapiens
tggaccggtccggaattcccgggatggctgggtatccccacatcactcatttggggggtcaagggacccgggcaatatagtattctgctcagtgtctggagatcatctacccaggctggggcttctgggacaggcgaggacccacggaccctggaagagctggtccaggggactgaactcccggcatctttacagagcagagcatgatcacattcctgccgctgctgctggggctcagcctgggctgcacaggagcaggtggcttcgtggcccatgtggaaagcacctgtctgttggatgatgctgggactccaaaggatttcacatactgcatctccttcaacaaggatctgctgacctgctgggatccagaggagaataagatggccccttgcgaatttggggtgctgaatagcttggcgaatgtcctctcacagcacctcaaccaaaaagacaccctgatgcagcgcttgcgcaatgggcttcagaattgtgccacacacacccagcccttctggggatcactgaccaacaggacacggccaccatctgtgcaagtagccaaaaccactccttttaacacgagggagcctgtgatgctggcctgctatgtgtggggcttctatccagcagaagtgactatcacgtggaggaagaacgggaagcttgtcatgcctcacagcagtgcgcacaagactgcccagcccaatggagactggacataccagaccctctcccatttagccttaaccccctcttacggggacacttacacctgtgtggtagagcacactggggctcctgagcccatccttcgggactggacacctgggctgtcccccatgcagaccctgaaggtttctgtgtctgcagtgactctgggcctgggcctcatcatcttctctcttggtgtgatcagctggcggagagctggccactctagatggcacatttcctagaggcagaatcctacaacttccactccaagtgagaaggagattcaaactcaatgatgctaccatgcctctccaacatcttcaaccccctgacattatcttggatcctatggtttctccatccaattctttgaatttcccagtctcccctatgtaaaacttagcaacttgggggacctcattcctgggactatgctgtaaccaaattattgtccaaggctatatttctgggatgaatataatctgaggaagggagttaaagaccctcctggggctctcagtgtgccatagaggacagcaactggtgattgtttcagagaaataaacctttggtggaaatattcacccaacacaatcacaacgggg

SEQ ID NO: 13970 - DNA, 485 bp, Homo Sapiens
cgggtcatgcatgtgttcaacattagcccccaagcaaggggggacacaccttcactggggggagtgtgactctcctactagcccggcaagtgaactattcacacttcaggaaggagacatgcttaggaatttccattaagcagtaagcaacgtctttgatcttttcacctgcaggttttcgaggtgtgtgtgcatgtgtatacgtgcacatgctacacagagctcctcgacaagcacctgggagtccgcctgtgctgataaaatgacttacgtagaatcagggcagggaggaagtggcttttgccttggagcctcttcaagtctaggtttggcttgtctctcgagaagggtctatacagctgagagacacatggacagttctgacaggaggcaagttcatctcacaactttaaacatacccatatgttctcatcatttagctcccacttataagtgagaacatgcacaaagaggggaacaacaca

SEQ ID NO: 13971 - DNA, 456 bp, Homo Sapiens
aatatgatgatgaaaccatggaattgattctgccttctggtgccagagtgggtcatcgctccttgatgagatactacaaacagcgatttggcttgtcaagagctgtggcagttgccaaaaatcggaaggccgtgggccgagtacttcagcagtacagagccctgggatggactggcagcacaggagcggctcttatgcgagagcgagacatgcagtatgtccaaaggatgaaatcaaaatggatgctgaagacaggaatgaagaacaatgccaccaagcagatgcactttcgggtccaagtgagattctgagagtctgctgggattgagcaatcatctcctgcccaagtttcctccttgccctgaggaccagtgaaagacagatcataggagagacccttttgctgctacttcattcgttctgacctaataataaaagttagaaccataaaaaaaa

SEQ ID NO: 13972 - DNA, 364 bp, Homo Sapiens
cgactctagcaggatctcccgggtgatgatgtggatgaaggaggaatcaggagtaatgccaagaatgagaaatctgtataagcagttcagaaaaggggcgtcatgagtcactctcctcagtgctgcccaagagttccacagtttgttccttacatcattcacttggataaaacctttcaatgtctctccatggccttcagagttaaatcaaaactattccttggaatgacttaaaacccatactacctctaaagcctcatctcttgactctctcgcaccaagctcactgagcttccagccctactgaatttcttcagtaacaaactctcacatctcagagcctttgcacatgcatgcacccagg

SEQ ID NO: 13973 - DNA, 869 bp, Homo Sapiens
  misc_feature (780)..(796): n is a, c, g, or t
acaaatccgtggtggatttgacaaagaattatttaatccacatgggatcagtattttcatcgacaaagacaatactgtgtatctttatgttgtgaatcatccccacatgaagtccactgtggagatatttaaattctgaggaacaacaacgttctctggtatacctgaaaactataaaacatgaacttctcaaaagtgtgaatgacattgtggttcttggaccagaacagttctatgccaccagagaccactattttaccaactccctcctgtcattttttgagatgatcttggatcttcgctggacttatgttcttttctacagcccaagggaggttaaagtggtggccaaaggattttgtagtgccaatgggatcacagtctcagcagaccagaagtatgtctatgtagctgatgtagcagctaagaacattcacataatggaaaaacatgataactgggatttaactcaactgaaggtgatacagttgggcaccttagtggataacctgactgtcgatcctgccacaggagacattttggcaggatgccatcctaatcctatgaagctactgaactataaccctgaggaccctccaggatcagaagtacttcgcatccacaatgttttgtctgagaagcccagggtgagcaccgtgtatgccaacaatggctctgtgcttcagggcacctctgtggcttctgtgtaccatgggaaaattctaataggcaacgtatttcacaaaactctgtactgtgagctctagactctagatagtnnnnnnnnnnnnnnnnngtctacatattttgtaaaagtaaactgataattgtatgataagtggcactgtaagtaaatagcaaacaccaaa

SEQ ID NO: 13974 - DNA, 225 bp, Homo Sapiens
  misc_feature (151)..(170): n is a, c, g, or t
  misc_feature (186)..(186): n is a, c, g, or t
cctgggtgcatgcatgtgcccgggctcggagcccacacccggagatgctgggtgagatgggagggacagaatggggagcagggaagcagatccagagccaaagcactgccaaataacagcagaaaccccaggccatcagagcatgcacctnnnnnnnnnnnnnnnnnnnngccatgtgcacactcnagcatgtgcacacacatgtatgcacaccatgctgaggat

SEQ ID NO: 13975 - DNA, 243 bp, Homo Sapiens
gctctgtgaacagggatgggacatatcagatgaaacatcattaagtttcctggtagaaagcacgatgagcccttagttccaaggaaagaagacatttagattttatcctcttattttggagaccaggccagggtaaatcaaattctgactttacattctgccttttccaatgaaggaatgcagtctccaggagagaagtagcagagcagaggagtcaagaccacatgcatgcacccagggggt

SEQ ID NO: 13976 - DNA, 457 bp, Homo Sapiens
ttagggtgatgcatgtggtgaaagcaagtggggtctgaggtttaacaccggggaggggagaatgcgtctattggtagggtatgccaatttccaagggttgaatatccccatcatggcagatttcaaactaccaacgtgaagcccctgatgagggagttgaaagaacacatgcagaagtctgtcatcctgctttcaccacacagatacaagagacataaataacctcaagggcatagactgctgaaaagtgtagaaaaatgactggaaatcggtatgttttaatatgtattactttcgtttttaatatgatttatttaaatgttcagcttatatcatttaatttagactaatggttgtgttgaacaacttggttgcaaaagccctgaaaatggaaccgtcagctctcatgatctgggatgcgctgtctgcagttcagcgctgggttcctcccactttc

SEQ ID NO: 13977 - DNA, 527 bp, Homo Sapiens
cctacctggcctctctcagagctgaccaggagaaagaaagaaagaaacgggaggagcgggagcgtaagcggcggaaggaggaggaggtgcaacagcaaaagttggcagaggagagacggcggcagaatttacaggaggaaaaggaaaggaagttggaatgcctgccccctgaaccttcccctgatgaccctgaaagtgtcaagatcatcttcaaattacctaatgattctcgagtagagagacgattccacttttcacagtctctaacagtaatccacgacttcttattctccttgaaggaaagcccagaaaagtttcagattgaagccaattttcccaggcgagtgctgccctgcatcccttcagaggagtggcccaatccccctacgctacaggaggccggactcagccacacagaagttctttttgttcaggacctaactgacgaatgacatttttttcttcctgtcccctcctaccccagtccctaaaagaaatggggaaaaaagaaaacaacagcaagtcag

SEQ ID NO: 13978 - DNA, 215 bp, Homo Sapiens
  misc_feature (133)..(172): n is a, c, g, or t
gctggttccgctgggtcaggcgctgacgggaccgggctgcggcaatcgttagcgggtcatgtcggccgcccagggctgggacaggaaccgccggagggcaggaggcgccgccggcgctggtggcggaggtagnnnnnnnnnnnnnnnnnnnnnnnnnnnnnnnnnnnnnnnnactggccagctcaaccgcttcgtgcaactctccgggcggccgc

SEQ ID NO: 13979 - DNA, 1195 bp, Homo Sapiens
agctcggtcgtagaaggaagagggagggagtacaagagagagggaatagtgggatcaaagctaggaaaggcagaaacacaaccactcaccagtcctagttttagacctcatctccaagatagcatcccatctcagaagatgggtgttgttttcaatgttttcttttctgtggttgcagcctgaccaaaagtgagatgggaagggcttatctagccaaagagctcttttttagctctcttaaatgaagtgcccactaagaagttccacttaacacatgaatttctgccatattaatttcattgtctctatctgaaccaccctttattctacatatgataggcagcactgaaatatcctaaccccctaagctccaggtgccctgtgggagagcaactggactatagcagggctgggctctgtcttcctggtcataggctcactctttcccccaaatcttcctctggagctttgcagccaaggtgctaaaaggaataggtaggagacctcttctatctaatccttaaaagcataatgttgaacattcattcaacagctgatgccctataacccctgcctggatttcttcctattaggctataagaagtagcaagatctttacataattcagagtggtttcattgccttcctaccctctctaatggcccctccatttatttgactaaagcatcacacagtggcactagcattataccaagagtatgagaaatacagtgctttatggctctaacattactgccttcagtatcaaggctgcctggagaaaggatggcagcctcagggcttccttatgtcctccaccacaagagctccttgatgaaggtcatctttttcccctatcctgttcttcccctccccgctcctaatggtacgtgggtacccaggctggttcttgggctaggtagtggggaccaagttcattacctccctatcagttctagcatagtaaactacggtaccagtgttagtgggaagagctgggttttcctagtatacccactgcatcctactcctacctggtcaacccgctgcttccaggtatgggacctgctaagtgtggaattacctgataagggagagggaaatacaaggagggcctctggtgttcctggcctcagccagctgcccacaagccataaaccaataaaacaagaatactgagtcagttttaaacacc

SEQ ID NO: 13980 - DNA, 390 bp, Homo Sapiens
tcgcatggagacaccaccaccttccaggtgatcatgcaggaagtagaacatgcattaagttcaggcagcatcgccgccattaccgtgacagtcattgccgtggtgctgctggtgtttggagttgcagcctacctaaaaatcaggcattcctcctatggaagacttttggacgaccatgactacgggtcctggggaaactacaacaaccctctgtacgatgactcctaacaatggaatatggcctgggatgaggattaactgttctttatttataagggcttatccagtagaattaataagtacctgatgcgcattgaacgacaatcttaagccctgttttgttggtatggttgtatttgttttcctccctctcctctggctgctacaact

SEQ ID NO: 13981 - DNA, 440 bp, Homo Sapiens
acgaggggagaatcaagggtccatctgagcctctgagtaaagatcccaatgttctacctctccctgtccctcttgtaggggatagggaggcagagagagccagcccctaccctcagagtatctggacctcagagaccatgttgtgccaggggtggtcccacctaaagatgctagcccctctccaggtgggcataaggagtaacagatggcaaaaccacaaactattttgatggactgtgctgcagtatcaccagaagacacttacggggcagtaggcccccacacaaaaccttcaggcttgaattttaaaggggaggactttctgccaacttttcttgtatgccttgggaaagccagttgccctgaacccagcagacaccatggaatgtcctttgcacgcattaaatggtacagaactgaagcctcggaagcaaaaagga

SEQ ID NO: 13982 - DNA, 393 bp, Homo Sapiens
catttgagcagtcctgtttctgtgtacgaacagcagttgcaaatgatggatgtacgtgaaagaaaaaagcatttgatctgtatataacttagaaagggtaacatttctaaacactgactttataagaaaacatgaaggacatcttacactcaacaacaatggtttaaaaggaggatataactgtctgaaggatgcaggggcaaaatgccatggcctttgttttcaacttgctcttaacctatgttgggatgcgttcacactgctggggtttcctgcaaaatctagcaccaatatatggatcaaattttgtctttgatctgagtcctctatgtcttcagttttgaaagtattgaggtatgttttctttggttgctgttgaaaagaatatgtagt

SEQ ID NO: 13983 - DNA, 436 bp, Homo Sapiens
ctgtgttttcctttttcttctttctcttcgtttttaaaacaatatagtgcagactgcacttctcacagtagaatataatggtcaattttagtataaaaaaacattctcagagatttgtaaatgcacttagtgcttgaccaggcctcggagagagatacagtaccgcttccagagcgccagaggggccaggacttgaggacttcgtgaggggactcctgcctatctttccctgccttgatcgtgtgagacaggccttggagggtggtttgcaggaaaggagttggtctgggcctcccagttaaaaccaggagggtcccaagagatccctcgaagaaggcaaggatgggatctaagattgcaggcccactgttagcccctgtggtgcctttgtgcgaacaggaaaatgacgccccttcctcaagatgcagaaaattgt

SEQ ID NO: 13984 - DNA, 363 bp, Homo Sapiens
gcggccgcgcggggaccgacgcgcgggctgaccgagtgggggccccgccgcggggcgcctccctctccgcgccgcgcaagcccggggactgctcgcgggtcgggtttcccgccagctcaggtgggtttttgcccgggcccctcctctgcctccgtcacaggtgagtttagttccaggccctacgagcagtgcccacaccctcccagttccgcctccgcccaggtgcgctgcacccccgcgggtcaccgggagccgcacctcgcccgccccttccgaggtgagcaggtggggtgttttttacctcacctggtagactcagtctcgcgtttcctctcagtccaggtcatcggactccacctcctc

SEQ ID NO: 13985 - DNA, 537 bp, Homo Sapiens
agccaggccatgccctgaacttcccaacctgtgaaaccataagctaaataaacctctactctttataaactacctagtctcagatattcttttatagcaacagaaaacagactcagactcttcccttggtatttgctgcactaggaaaacaaaagcaatcaggggtcatatcttttcatcaccaaacccatcaaacttcttacatctcctccttaatggactcaccctttcccgccattgtaatgccctgctgtgtcccaagtggctagctcagggcctggcacacagtaggcactcagtatttttccagtgggatgaataaggccaacctctcaagcacttaaaatttgcaattcatccctcaaaattagccctaatcaattttctgtcttgattgcatcataaccatcattatacaaacatgctatattttctttcatccttgaagaaaccctactttgacctttcatccccctcaaatttctaccacattgttcagttcaactttataattaaacatgtccaaagaactgtcta

SEQ ID NO: 13986 - DNA, 442 bp, Homo Sapiens
gctccccgccgccctccagcttctcgcggttgagcttgaaggaaccgttggcgccggtgcccttcacctgcagaagcgtgtcgttctgcaccagcgccttgatcgagtacttgaggtaggtgcgcccattctgctggtcgaaccacggaaccttcttggcctcggtgtagatcttggccagcgacgagccgttgcgctcgcccagcctacggatggtctccaccaccagctggctgtacttgcccggctggttcttcttcttgctattcttcctcttcttagatggggacaacgccgccgagccgccagccttggtcaccttcttggccattccctcggcggtcgtcactggcagggcctcctcgagctccacggacatggtagcaagaggattgggtggcgggcggcgcgcggaagccgggggccgcgccgggaagaggga

SEQ ID NO: 13987 - DNA, 515 bp, Homo Sapiens
ttctgactttttattcttaatggcaaatgcacaaaaaatattctaaacataacaatggccaattttcaatcatatgagtttggcagtggttaactttacacttgataattattcttatgaccttctgcaatcccaggggtgcttttgaggtggaaaatagcaagaacaaaaccccaagaaatcatggtttcttagtccatttgtctagcacacaactctctttatatattatgttttctgctagtactcaagaaatccttcaccattaaagcagctgccagtggggaatcgtgtacctaaagtctttcatgttaagtagttttgggcttatagttccagtatctagaagaaaagtgtgaacagaatagaagggataaaagagaaaggaaagtccttgaagccagggactaattcaactccgtatcatgcaaaattcactggacatccaacgctgtcatatataatgtggtcccttcataaatgttcttgataatagcctgttaattttgagtccc

SEQ ID NO: 13988 - DNA, 578 bp, Homo Sapiens
aaaaggggccccacacaagggggaaaaaacggtttccaccttgggggggaatccccaaccgtcggtgagggcacatggaagaaggaagccccagaggttgggcactggcaaatgtctcctccctcccatgctccttggcttctgaaggctgaagctcctttggctgggccaagaaggatctagtctgcccactacattctcaaacaagaggacttggaggaaaagagctgctatacatcatatgcagaggaagcttctacgcgctagagaggatcaaggggccacactggaccatgtgaacagccatcctggatgatggaagccaccatattgacttggggtataggcccaaactgccttcgtttggtccagggccatcgtgggtgatgacgattgctctcttgcactcaaggacatttgatgctggtagtatggattatgagatggactagcccctgccccagcccagctctcacattcccctttgttttttcccataccaactgcttctaccctcccctattacatacatctttcaatgtccaaaaagttacaaagtttatatgaatgtaacatat

SEQ ID NO: 13989 - DNA, 560 bp, Homo Sapiens
caccgagtcttacacgaagccctggagtgccttcctaccaaggagcatgtgatgtcattcccaagtttgcccagctgaagtttcagatgggggatgcagagcgggccaaagccatttttgagaacacgctgagcacctacccaaagcgcacagatgtctggtcggtatatatcgacatgaccatcaagcacggcagccagaaggacgtccgggacatctttgagcgggtcattcatatgagcttggcccccaagagaatgaagttcttcttcaagcgctacctggactacgagaagcagcatggcactgagaaggatgtgcaggcagtcaaggccaaggccctggagtatgtggaggccaagagctcagtgctagaggactagtggcaggctggctctgtgggacactgtcaacaatgggccagcccggccccgcctcgagtgcctgggcactcggaaaactgttacctcaggactctatttaaatgctgctttttctgcagcacgcttggggaaatcctgtcaggatgaaaaggaagttgagattttttaaatccctaa

SEQ ID NO: 13990 - DNA, 487 bp, Homo Sapiens
  misc_feature (76)..(76): n is a, c, g, or t
  misc_feature (125)..(125): n is a, c, g, or t
agccgcaaacccagcggagggcgggaagaaggaggaggcctctagggtggtcgggggactgggggccccgccggcnagaggtccctcggcctcctgactgactgactgcggccgcctccggcagngacgctgggagctgcctgcgggaaggtgcggggagcggagccatggcctccggtgcgtataacccgtatatagagataattgaacaacccaggcagaggggaatgcgttttagatacaaatgtgaagggcgatcagcaggcagcattccaggggagcacagcacagacaacaaccgaacatacccttctatccagattatgaactattatggaaaaggaaaagtgagaattacattagtaacaaagaatgacccatataaacctcatcctcatgatttagttggaaaagactgcagagacggctactatgaagcagaatttggacaagaacgcagacctttgtttttccaaaatttgggtat

SEQ ID NO: 13991 - DNA, 312 bp, Homo Sapiens
aactcaggggcgagctgcagctcaggcccctgggtcccaaatttccaggctttgcccctcctcctttatcagatacccgggtaacagtcctcatagtccagatatccgggactcgggtcccaacctctctaaacctgggtctctgtttcatagaatttcaaatatcaggttcaggcccctgcgtgcaccagtatccggggttcattccccgggcgttcaaatatcggattcagtctccatcccgttcagatattcggggttcagaccccacaatcagaaatccggaattcgacagctcgccctgagttggcc

SEQ ID NO: 13992 - DNA, 524 bp, Homo Sapiens
agaggatcccttatcagagcataccctatacaggttaagattatttcatccaagttttcttctagcatgtttctagtatctagcatgtttcttctagcaatgtgaaaaaataaaatttctttcactaagtaacttatctcagaacttaaattctaagaatgtcttcactaacccatttataaaatggatataatgacaactgtccaaaactggtcttcagtattaccagagagatcaaatgaaaacacaagcacaactgctttgtaatagttaagaagtgctctgcaaatataatgttacatgtgactcaaaacaagcagtcaggaggtgatagggccaagtcactcaccatgggctgatcctcatcagtgggatgtgggaagcaggtaaagaatacagtgccgaggagaaagggcttcctcccccacacatcagacagggcaccaatgagtggggcactcaaataaagagagcagcccttgacaccttgaatgagaccattcatgaggaatctgtgttgaata

SEQ ID NO: 13993 - DNA, 464 bp, Homo Sapiens
  misc_feature (247)..(271): n is a, c, g, or t
tgtggagtgtggcagtttggcaaactctccaccacacgtaatgaaacttggatttgctcagtgtctggctgcagagcagtgggcctggccagcaggtccccagctttggctatgagggccttgagtcccccaaaacaccgggttccagcaccacactcagccctcattggctcttgaactgagcttggaagcttctggtgaccttccaagagcctgagagtgaggtggaattattttaaaagataannnnnnnnnnnnnnnnnnnnnnnnntccctgaaggaaccaaagcgaattttaaaagatgcaatgtagaggggaaaagagataatgaaaatatttaaaggccctatctgtttacagtgttccgtggttaaactcgctcactgctaagaatatttgaatgtatgcttcatacagggatggtgttcaaaaaacttgtaaataaaggaaccataatgcaaaa

SEQ ID NO: 13994 - DNA, 505 bp, Homo Sapiens
cgaggagtttacctgcccaaaaatgtggcaccaatgtgtgataacatcatcaggctggaatgaattctccctaaaaataaaatgatgtacgatttgttgttggcatcccctttattaatccattaaatttctggatttgggttgtgacccagggtgcattaacttaaaagattcactaaagcagcacatagcactgggaactctggctccgaaaaactttgttatatatatcaaggatgttctggctttacattttatttattagctgtaaatacatgtgtggatgtgtaaatggagcttgtacatattggaaaggtcattgtggctatctgcatttataaatgtgtggtgctaactgtatgtgtctttatcagtgatggtctcacagagccaactcactcttatgaaatgggctttaacaaaacaagaaagaaacgtacttaactgtgtgaagaaatggaatcagcttttaataaaattgacaacattttattaccacaaaaaa

SEQ ID NO: 13995 - DNA, 485 bp, Homo Sapiens
aacatgtggcatgcaatgaagagaaaatgtaaagctacagaggttaatgtattgtattataaaatattttaagtgtactcaaaatatcataattgtacagtttatgccaccataatttgaggcctatagatttagcttaagagaacactgttctgtttgaaatgctttctgtcactgaaattggcttaattagtaaccatggataagatgctttagatcagactaggttttaatcattaacttccacaaagaagtcatactttgcgttaggtgtgctggttggatgtgcaggaacttcagcaagcagtaggttttactaagcagatggtcgggcactgcagggcaccaggcaggatcctagggcgcctcttattctgcgttagcatctggtttgctgtatgaccttgcacaagtcacttccttctgagcctcaattttctcatctgtacaatgagattcaaaagttgacctgaaagtcaagtgtg

SEQ ID NO: 13996 - DNA, 636 bp, Homo Sapiens
ctagacattctcccctcggcccaaaattcgccacgaggccagggaaacgtccaactttgccccaatcaggccccttgggttcaaaggccgaaaccaagttcccccaacccgaatggccgaacttggcaaagaccttccagcaaggaccttatcccacaacgattatggtctccagtttaacccaaggaatcctggggttccaatttccaaggaccttggccgccactgtaacaattaacgctttcaagggcttgtctcaagcctttcctttagaaccaggagaggaaagccgccctgttttggagagagcccagagagcacccccgggaaggcgtcgcgaaaggccacggtcagcacaggcacggtcccgctttccttagtgcttggagcaatttccataaaacattcaccagaaaccttttgcacatcggtctctgccacacgcagtagaatttccgcagggctgtggctcggccagcagcggttccaggagagtgccggtgcccacgggcctccagccgtgccttcccacaccaggccccgtctcctcggcctgctgcccagtgcactcagccccaggtagcagaactcacgttcccactatagcaagaaataaaggcaaaagagaacaaaaaa

SEQ ID NO: 13997 - DNA, 454 bp, Homo Sapiens
gtggctggccgggaaggtggattcgccttggctaggtgccaggcaggtccgcctgtgcggtgcccctgacttcgacccctagcttatgtcacagcccgaaccagatcgactggtctggtagcagcctgtcactccagactgtcctccaccccagacttccgcaaactgatgggctctttgcgccgtgcagggtgggaggagaagaccaaacgaagtaacgtctgtaaaaccccttcctggacagcgtaaggcctccacatctaagttcctgtcattaaaatggagacagcaaagccgaccctatccagtccttgggactgttatgaacagaaaatgatgcaatgtatgaaaaactgctttgaggagaaaaacaacacagtgtgtttttggaagatgtgattgatttgtaaaccgcattaaatgctctgaaataaaatgaaagtaaaaataagta

SEQ ID NO: 13998 - DNA, 519 bp, Homo Sapiens
cgctctagaggatcttacgggtgcatgcatgtggtgggcaccaccctagctgactgatgccatggtaaccggaactaggcaagaaagtattacctactagagatacttacattacctgctttcacagagataagaactgttcaaattagcatattaatatttgatcccaaacaaataacatccctgccttgtgataactatgcgttcatgacccagatgcacatttcctcatgaatatgtattttcattctaatttgctcagcaaatccttttcctagagtccgagaaggtaaactgcaggctgctcctacgacaaccactatggttttactccccctactactcaagtcccaaaccagctgccagaaggccaggaccttgggagtgagctgccacaaaggacaatactcttacttctggcactagagaatacactatatcaacaacgttactcagatcattcatctgggctcagacacagttcacacttgcatcacatcatcaccgatgatctctgat

SEQ ID NO: 13999 - DNA, 643 bp, Homo Sapiens
  misc_feature (223)..(325): n is a, c, g, or t
ctgcttgtcctgcctctgcctctgggcctttgctttgtggcctcactgccacacaaagttccaccaggaggcgtggttcacgtaccctaccacggcaagcgaggtcccagaaggccagcggtggttccaggagcaacagctcccaaaccctgagcaaagcaacagatgccacccatcatccaaagactaaattgggaagagaagcctcctggcttggtgcccnnnnnnnnnnnnnnnnnnnnnnnnnnnnnnnnnnnnnnnnnnnnnnnnnnnnnnnnnnnnnnnnnnnnnnnnnnnnnnnnnnnnnnnnnnnnnnnnnnnnnnnacctggcttctggcacacagctcggccactgtgtcccatcctgcctccctggcaggtccttctaggggccctctcctggctggctttccagggcattccttccactctatccagggtccttcccaagaccacacccaggtccagtcattccctaggacttggcagagagctgtactcacagccaagatcacagcaaaatcagcaaagggaaaaggcatgcagagtgaagtccagaggcaaccagacagaagcatccagaatcctctcacagtggggtcacacaccccatgcttaactccccaaacaatgagttgtaac

SEQ ID NO: 14000 - DNA, 369 bp, Homo Sapiens
  misc_feature (41)..(53): n is a, c, g, or t
gatctagacgatcccctggggtgcatgcatgtgaaggacannnnnnnnnnnnnaacatctttaatggccacacaaaaataatcatatggaacagccccatccccaagacactgactcggtcctcagacctatgggcttcctatgacccacctctcaccagtctctcagaagtacatcagtatttcctttacctgattgattacatatgagttctctgatgagatccttctaaggatggaagagatgagctctttctaaagatgaacggaactaccctgagctcaggtaatataacgaaataaaagaaaacaagatccaggggaactaagagaaacgggaatgcaatcaagccacatgcatgcacccagg

SEQ ID NO: 14001 - DNA, 410 bp, Homo Sapiens
  misc_feature (206)..(216): n is a, c, g, or t
ccactctctagtcactggggaggagtattttttgttatgtttggtttcatttgctggcagagctggggctttttgtgtgatccctcttggtgtgagttttctgacccaaccagcctctggttagcatcatttgtacatttaaacctgtaaatagttgttacaaagcaaagagattatttatttccatccaaagctcttttgaacannnnnnnnnnntttaatccctcgttcaggacgatgagcttgctttccttcaacctgtttgttttcttatttaagactatttattaatggttggaccaatgtactcacagctgttgcgtcgagcagtccttagtgaaaattctgtataaatagacaaaatgaaaagggtttgaccttgcaataaaaggagacgtttggttctggaa

SEQ ID NO: 14002 - DNA, 634 bp, Homo Sapiens
agagtcaaacccctgtctcaaaaaagacacagtctgtctgatgggaggctgcacagttcggggggcccttgggtttgtggtgccagtgcagaccctgttccctggaaaccgtgttcccgatgacctccagggtgtgtccttatcttggcctcgggaggctggttcatcaggtgctgaggaaagcgagtatctgcctagcttgtgcctgcaatgggcccagcacctgaggtctttgctgggagcaaagggcagggtactgcttatacctgggttgctgcatgtgtggggaggggaccaaggagggtagggggaccatcgaccgtggcttaggactctcctgtctgcagggacggccccacacacacacgctcatactcacagtcatgctcaccatacatggacagatgctcacacatgcacacagttacagtgatacacatgcaaactcgtgcacacatgctaacatgcacacatatgctcacacatgtactcatgctcaaacatgctcatatgctcatgcacacactcaacgcacatgctgatcacatgcacacgtacatatgctcatgctcacactcatgctcacaggcacaaactcacgctcacccatgtacacatgcatgcacccaggggt

SEQ ID NO: 14003 - DNA, 378 bp, Homo Sapiens
cgtcctgctggagacactgagtttgcagtggcaccaaatcctctgtgtgtgccctttgttgtggccgctccacatttccaggatggtctccacccagaatttgatttgaacgttgagaccacataatagggttttctggagagagcagggccggcttctcaagctggtctgaaaatgaaagacagggaagagaaaggagaaaggagactggtctggggattgtatggtgattagcggttaggtttgggcgagggttccgtatgggcaggggcttacatggtttgaaccttctgctgcagccaagcgggagagcatccagactttcttatcagcttgcccagatgtggggcagaaggggaagagcgagggatggggctt

SEQ ID NO: 14004 - DNA, 415 bp, Homo Sapiens
ctgctctagagatcccccggtgctgatgtgaaggcatgttgtttaggctcctgggacagatggtgcttcactgccacttgcttcagggagtgaggccatctccgccagtggcgagctggaaggattctgcgggctctcctgatagaccattttccttgaattgcttcccaagggagtattcacaggcattggcattctttgtttatcaggtgatggtggcacggaggcaggtccttgcagactgaccatgacaggcacactgccactctgttgcatgggcattctctgggagtcggggttcagggggccccttggaggatggacattttgagagactggaagcctaactgatttgggatcctgctgcatcatgagcatcatcatcatttgttgctgctggtgttgctgctgctga

SEQ ID NO: 14005 - DNA, 383 bp, Homo Sapiens
aaattcatttctagactcaaaacctggagatgcagctactggaatggtgttttgtcagacttccaaatcctggaaggacacagtgatgaatgtactatgtctgaacatagaaactcgggcttgagtgagaagagcttgcacagccaacgagacacattgccttctggagctgggagacaaaggaggaatttactttcttcaccaagtgcaatagattactgatgtgatattctgttgctttacagttacagttgatgtttggggatcgatgtgctcagccaaatttcctgtttgaaatatcatgttaaattagaatgaatttatctttaccaaaaaccatgttgcgttcaaagaggtgaacattaaaatatagagacaggaac

SEQ ID NO: 14006 - DNA, 468 bp, Homo Sapiens
agctgtggcagcgcatgctctcttagcctctgaagaggtctctgggcgctcacacttgaaaaaccatgaggttggaacaatcatgttaatgcgcctttttggttttggtgaaaatttcagacagtgtgacattaattatttatttgtctttgcacagaatgatgatgctaaagccagccccatacagtcctgatgctcagtacttccagcatgggctctgtccaccctgctctctgggtctacatccagcccttcagttttcactaggcaaatctgaggtgagtcaactgagtttgcaaaatgtgcttattagcagctgtgggatgttctactaccttcttcagagccacagcattcctgttccttcccacatcatttcactaagggtctgaccactcatctcccaaccattcagacacagagaatatactcagctctcacacagagcaaaatagtctgtaatcacca

SEQ ID NO: 14007 - DNA, 875 bp, Homo Sapiens
ggttctgtgcgatgcagggcatggaacctggacaccctcgagctctcctgctttgtgcctgtatctacaggggcatcgcccattgggacttcctggacctcttctgtcttttgaggcacaggagaccgagctagatcctttcttctcacctttctgcctttggaacacatgaagatcatctcgtctatggatcagtgttgacaaactaagttttgttaattttgtcccattgaactcctagcttggcaattttgcacagttcatacaagaaaaactttgtaatgaaatgatttcattgagtcatgatggatggcagaaactgctgagacctatttccctttcttggggagagaataagtgacagctgattaaaggcagagacacaggactgctttcaggctcctggtttattctctgatagcactgagctccttccaccagtaaggcactgcctgcaggaagaagaagatctgatggccgtgggtgtctgggaagctcttcgtggcctcaatgccctcctttatcctcatctttcttctatgcagaacaaaaagctgcatctaataatgttcaatacttgaatattctctatttagttacttagctgcttactcgtaatgatctagtggggaaacatgattcattcacttaaaatactgattaagccatggcaggtactgactgaagatgcaatccaaccaaagccacttacatttttcttgagttagatgggactctcctggatagttgaacctcttcactttataaaaaaggaaagagagaaaatcactgctgtatactaaatacctcacagattagatgaaaagatggttgtaagctttgggaattaaaaacaaatacattttagtaaatat

SEQ ID NO: 14008 - DNA, 759 bp, Homo Sapiens
ttctaggtcatggtaggtactctagaacccatatgcctggcccctgagaaagccgaacccaagcccgacaacacagcataggccagtcctggagtacccatcaccctcacacccatgggattcagatctgaaatggtcatctcaaggcatcaacagtctcactgagacacagtgttgggacccagactgtattctagatcagcaattatgcccacaacctcaaaaggaaaattagttagggccccaatttagagtttcagtttgggtacagaggtcccagagattggaaacactttcagcacacagtgcagccccaaagacaaagaaggctacaaggcggccccagttggggcccccttgaaaaagttcatcggagacctgggtgaagcgttgttgggctgagcctggggtcacatgcagctgagccgccagatcagagaaggtgcgccggaagcgggtctcgaactcatctccagctgcccgcatggcttggtgcagcgggtcagctgctgggccctccccggggccagctccacagacataacccttctgcctcagcttataacctacaaagtctgccaccagagcccgtgtgtctggggccgaggctggggtcgccatccgggcggccagccgggatggcagctctcaagacacagcactggtggcaaggagcccccagctggggcctttcatcctcctggccagcgtggagccgggtcaggccgctgccgggatccgggccgtttcctggtgcag

SEQ ID NO: 14009 - DNA, 322 bp, Homo Sapiens
attcagcccagggcaaccccaacgaggaagtggcgaggttctatgctgcagccatgcatgtgaatgctggtgagatgcttcatgggactgggggtctcctgctcagtctggccctgatgctgcaactctggctccttggctgagttcagtcctcccagactacctgccctcagcttggataaccaggctgggctcagctcagctcccacaaatgacagccccttaagcatgcttctattagtcacctaaccctctgtcacccagtctgttgctgctccatggtggggccaagagtcacttctaataaacagactgttttcta

SEQ ID NO: 14010 - DNA, 371 bp, Homo Sapiens
cgagcttcggtaccccctgggtgatgcatgtgctttatctgccttgtcaaactctataatgaatacccaaaccgaaaattgttcatgctggtcttagcacttcatgagcggaggccccaacattatcttaaaatctcacagactccatgcccccaaaaacttatcctcttcccagtcatcgagtaagtgccttttcctttggttctctccttgatgaaggcacgaaccatccacccacttggatctggaagtcatccctctatgtttccttgccacttaccaagtccagcttttatctgttactttccttccctacctatcactttagtttggcccttcccacttctcatttggattatagcttcctaaaa

SEQ ID NO: 14011 - DNA, 373 bp, Homo Sapiens
  misc_feature (78)..(244): n is a, c, g, or t
ggctgatgtctcgctatagtgggagctacataaggatgcatgacgtaaatacaggaacactagaactgtggactacannnnnnnnnnnnnnnnnnnnnnnnnnnnnnnnnnnnnnnnnnnnnnnnnnnnnnnnnnnnnnnnnnnnnnnnnnnnnnnnnnnnnnnnnnnnnnnnnnnnnnnnnnnnnnnnnnnnnnnnnnnnnnnnnnnnnnnnnnnnnnnnnnnnnnnnnnnnnnnnnnnnnnngtagagctactgggaaggcttaaaggggcaacatgggtaaggggacggctttgatccatttgatttccctgagaagtgcccttccttcctttgttgagagacagcagctccacatgcatgcaccccggg

SEQ ID NO: 14012 - DNA, 379 bp, Homo Sapiens
gtggtgctaaggatccccggtgcatgcatgtgactacgtgctagtcatggaatgggtgtacttccataacaagtttccctttcacctttttttccagctggttggaatgttacagtgacaagccacctagaacactgtgatgcaggcaacccttgcttaaccactgttttgtgggtctctaaaggaggaactgagctgtatcctgataggtacaatgttcaagactggttcagtgttgaacacacaataggcactccttttctccctgggaaagtgaaaaacagtcatggtctttgcctttttctccaattagagcttataattgagtgaggcagacacacatgaaaataattagccaaaaggtcaattataaatgttt

SEQ ID NO: 14013 - DNA, 553 bp, Homo Sapiens
aacatggcagatctcggagtacaggattgcaatggggtgcccggcatggttgaactgcttcggacatctgctaggcatcccatgtgccctgtcccctcttcaatgccagtgagtcacaatggcctatgcttattcacagcaataatacttagggagtccccatgaagcccttttgtcctggtccctcactctgcgtgggtctcctggggaggcagctgctgagtgggtcagttcatgagaacctgcatttatgaagccctgggctgtgtaggcatcaacctgggatgcagacaggttagaggcccaggccttaggggacccatggcagggagagtgccttccaccctgaggccacccagacctggaggagatgcaggccccagctctgataaagggcctcttgagatgggtgggactgtctcccagttgtgcagctcttgagaaggacacacgaccggtttgtgcgcccattgcctgttctgtgtctcctgttggtccctctgtctcttccttttcacatttgtgcacataaaatatactggtgtttgtgttc

SEQ ID NO: 14014 - DNA, 338 bp, Homo Sapiens
tgcaaaatttaagcctgggttctagataataccagatctacctaaacctcaagtctatgttaaagttgctttcctgctgttaaataagctatgatattaagatattctgacttgctccagtgtcaagggaccttctgggagcaggtgctaacatagtgttcagaatcaatatgtgagatgaaaaggatcccctccaggaggatcctgagctgttcagaaatcatttaagtttacagcgttgttccctttgcgtttgcagtgcgttttactcaagtagccagaaacaccccacgtttctgaatttgtttaaactgtaacaataaagtaaaatagaatgc

SEQ ID NO: 14015 - DNA, 848 bp, Homo Sapiens
  misc_feature (227)..(265): n is a, c, g, or t
tagcatcctcctggaggagctcgggaataggatgagtgataatccacccagaatggaagtgtgtccttactgtaagaagccatttaaacgattaaaatcccacttgccatactgtaagatgataggaccaaccatacctactgatcaaaaagtttatcagtccaagccagctacactcccacgtgctaaaaagatgaaaggaccaatcaaagatttaattaaagctnnnnnnnnnnnnnnnnnnnnnnnnnnnnnnnnnnnnnnntctaagttggtggtggacaaaccagaacagacagtgaagacctttccactgccagctgttggtttggaaagagcagctactacaaaggcagataaagacatcaagaatccaatccaaccatccttcaaaatgttaaaaaatactaaaccaatgactactttccaagaagaaaccaaggctcagttttacgcatcagagaaaacctctcctaaaagagaacttgccaaagatttgcctaaatcaggagaaagtcgatgtaatccttcagaagctggagcgtctttactggttggctcaatagaaccttctttgtcaaatcaagatagaaaatattcctcaactctacctaatgatgtacaaactacctctggtgatctcaaattggacaaaattgatccccaaagacaggaacttctagtaaaattactagatgtgcctactggtgattgtcatatttctccaaagaatgtcagtgatggggttaaaagggtaagaacattattaagcaatgagagagattccaaaggcagggatcacctctcaggagtccctactgatgttacagttactgagactccagaaa

SEQ ID NO: 14016 - DNA, 315 bp, Homo Sapiens
gcggccgcggcgggcgctggggtcgcgcgatcgcggggaaggcgccgggacgcgaggggactgattgcgcggaggaaacgggccccgagcgccgcgccgcctgcgccggactcagtcttcctcccccgaggctaggcgagcgcaggcgcgggcggcgggccgaggcgcgagtcccctcaggttgttgtcatctggactcatcgtcgttcggaacgcgggggcggcgaggctccgggccgcggccggagcaggaaagtttctctcacggcgcgcagacacttccggcagttccactccccaactctcttgacagtc

SEQ ID NO: 14017 - DNA, 1283 bp, Homo Sapiens
tttcctttcaactgtcctcccctccaagcagaccacctgtccccttctatcccagctcagagcagctgacccaactcagaatctctttcctacaggatgaagtgccttttgaatgttattttaagccgagagttaatttttctacacaacatatttccagacatcttttagtcttttattgtcttagatactataagaagatgaacatgacaattttctagaacctggtagcgtgtgtgtgtgtggcggggggtgctgagggaggggagtgagtcacaggagcctgtcccccaacaggtgtgactgctctgacaacctgtggcatgctgcagggtcaggctcctgataggaggatttcatgactatgtcattgtctccactcatttttgacccagtttggaatgtatctgcaattgtgtggctcaacactttaggaaacaatagattattttatattattatttctgatggtgacaagtttgtcttgaggtcacattttctccttgaaaagtgacatcctgtcacttctgctctcacactactgccatacatttgtgttttttgttgttattgtttgggtagagcagttacaagaaaccctaaaacccttggatataaaagaaatctgtttattgatttttaaatctttcctttccaaaagctggatacacatggagctgtttgggaattttccttgctgctaccgcgctgccaccaaatggaattgaccagcggctgttacactgttctttgccactgtgcctatgctcagaatatgctcactgctaagctacaaactcggacagggtcagaaacagaggtgtcccatcccattgcagcctccaccacctgtaaccccttcctggcattggccactgaagggtacaaaggcaaaaggaccacagcaccacttaggtgtagcatggattttaaactgcagtcagtatcagatcctgtttgataaataagctgactgttctctcttgagaacctgtggcctcaaccagccaccaagctgatgtggcccaagtccatctcttggtcttctcctttgaagcacagcctatttctgagccaagggttggggaagcctgtctagatgtgggactcattgccccaaaccagggagaggaagagctcccacagggagagcccaggctctctttgcagcctttcccagtttggtgtttaagcagtgccatgttccttgtttgacaacaagacagtctgtaaagtattgctcttaaaaacaattaaaaagaaccctttcatattggccccat

SEQ ID NO: 14018 - DNA, 474 bp, Homo Sapiens
tgctaaagccattaacttaagaatttgtcagtgtatcctttccaaaaagagtaatagttgattactagggtgctagatgaaaagcgtgcaatatgctttaaagctatcaacaaaaactgaatagtataagcaagcaatatcatagtaactggcagattagctcatatactatacagcatcgtttaaataggaaaaatttaatgctagcaaaaaaataaatttagaaatatggcatgacatgaaaatacaatcttatatttacaccagcttttcactaatattttgtacctaaggtgatggggaactccattcagataataaaattctctttcagctagagaagttaacaggaataaatatatgaacaaaaaagctgcacggataaatgcggcgaaaatgatgagaattagctaacatttttaagcttttttaaactttcttcccctcagctgtacttaatatttagtggaaagt

SEQ ID NO: 14019 - DNA, 528 bp, Homo Sapiens
  misc_feature (205)..(205): n is a, c, g, or t
  misc_feature (230)..(230): n is a, c, g, or t
  misc_feature (411)..(419): n is a, c, g, or t
  misc_feature (448)..(451): n is a, c, g, or t
ctttcctgaattgtattagtccaaaagaactaaattagggtacttgtgctgtaccaaaatggtaattataacagacagtattagaattactgaattaacaatgagaaagagagaagtgtatctgttacgtggatatatgggccagcctggatatacaacagagtagtaacgtttgacttggtctcgctgtccggttaacacagangattgtccaaacaccttgtcattanttggggcaggcactgccagggtggctcctctctgatatgcccaagttgggggtaattccctcctgggcccggtagttgcatataaaaatgtgctccattgggagaaagaccgtcaaagccagaaactttagggcaaaattgaactgcgcagccaaattttgtaactatctgccacacactnnnnnnnnnaatggcacagaacttttgctatacagccnnnngaagaatatacccgggaatcgtctccccaccttttgttgtgggcgggaagaacccaaaaaatggccagaccctcccc

SEQ ID NO: 14020 - DNA, 366 bp, Homo Sapiens
tccttggagaggaaagaggctctgtccaccactctaccccacaggagggccgcccgccaccaagcctcacctgggggccacagggacactgctctgcctgcctggccctcaaccttccatgaccagcgtgtgcgcagggcctggtcttcctcccccaagccaggcccctgtccccaccccaccaccttccagggtgccaggcagggctggcctccaggcctgtccccgatctgccattggcaacaggtggccctgcagcccccagccctccccacccaggttttcggcccagtgaagaggccatctggccaggcctcccaggcaggtgttttatgttcagcaataaaggttctatccgtaactggg

SEQ ID NO: 14021 - DNA, 369 bp, Homo Sapiens
ctgagggcacatagaaggtaccagataaccgttatagcgcctccttttccccttctacttccagaaaccatggtgagaggccacagacaaatgcgactgtggcccggcggctggtggcccgggccctgggactccaacacaaaaagaaagagcggcctgctgtccggggctccgtgccgccctgaggcctggagacccaactggcctggatctgcgtcccgacgtagtggcgcccccaacaccataagccttcacagacgccagagcagccccgcaccaccctcgagcttcaccatggggtgtggtgggctttagtttagtcccagaaatggagaaaaaataaaaactcacgttgttctaatgtgaaaa

SEQ ID NO: 14022 - DNA, 415 bp, Homo Sapiens
catcttgtgttgtatatgtgtgcgcgcgtgtgccctgagacccaggacagaagccacggtcctaagagccggttttatcctcgtcattctgcggtcctcccccacgccacctgtgtcggggctcagggtctcctgctttatatgagcccccttcctttcctcccctcctttatgctgcgggtccaggacttccagccagaagcctctgcccttgcactaccttgtctgtcaccccatcccgtgtcccctcgtcccccagcctgactcctgcctcatagctcctgtgtccccatgctggtcatcctggcccaggctgcaggagccaggctggggggcctccgcacccccttgctgcgtgtgggtaattgtgttttgggggaaagtggggaatttaataaatttctggtgctctggc

SEQ ID NO: 14023 - DNA, 564 bp, Homo Sapiens
  misc_feature (200)..(214): n is a, c, g, or t
tggctacaaatagcactgtgcatagtagccctgtttccccatggtgttggactgtggtaaagtatgttgtgacatactggaattctaataatcctgttgtaagtatgtacagaatctatgtaacttattgttgacatacagaggtttgggaagtagtctaatggacattccttacaatagaatggctgggaagggaaagnnnnnnnnnnnnnnnctacctaactccaatcttaatgttgtagttttatagcaaacaaaaattgtcagctttttgtattgaaaggtcagtggtggtaagacaaggtgtcttgtaaattaagattttaagaagtgcattaaaatgttttagaattactctgggaattctgtatatcacactaaaatttttatatcattatgttaataaaagttattgactttgtaattctgcattttgaaatgtgtgaaaagggtctttaaattaccccgaataggttgtatcttattttgctttttttctgactataaaagcagttatgcttatagcataaaatctagaaagcacattaaagtataaagaaaatt

SEQ ID NO: 14024 - DNA, 264 bp, Homo Sapiens
gtcagtcaaatgccccttgccccagaaaccttccacaagtcctgaaggcatcactgaaccccatttccaggatgagcccacagcactgcatacaatgagttgagcagtaattatttgtatctggtccaggttcccaatgattaactccttgagagtaggaacactatcacgttcatcttggaatcctcagtgactgacacagagcttgctgtacaagaagccctcaaaaaatgtgtactgaatgaataaaatgcatgtcctaga

SEQ ID NO: 14025 - DNA, 434 bp, Homo Sapiens
ggcacgagcactcagactgtttcaggctccaggacaggaagtgcagtgtaggcaaaattgcaaaaattgagggcacaggggtggagatgggggggttgaataacaagctgtgctaaataattacgtgtaaatatattttttcatttttaaaaattgatttcttttgcacattccatgacaatatatgtcacatttttaaaataaatgcaaagaagcatacatccaagccactgagctcatttgtcttctgttttgataaagtggtaaagaaggaactaacatgggaatgcattgctacaatttaaataagcataccaagataaattcatttatggtgctttgagtatatgagaccctcttctaccagacagatgatcagtgttagatttatagagaagggattatcaaattcccatggccaagaaggtcagaga

SEQ ID NO: 14026 - DNA, 311 bp, Homo Sapiens
ttgccagaagtatgatccagttgtcagtaataagatatacagggagacaggctaggcatcctctaggaatactttgctttctagataaacaacaataggaacacaacagtatcttttcttcttcctgactcaaatgcaatggacacaatgacttcaagccttgacagccattcagtaaccgtgagaaccacttgctgcttagaatggcagacagaaacacacagagcctggcccttgctggaaccactgtgcaaacgaaccatgtcgtgcaaggaaaaacaaaccccaatctgtttaaggccttgttggtc

SEQ ID NO: 14027 - DNA, 544 bp, Homo Sapiens
atattgctgaacaccaatatgtcactttattatttggattttttttcccatttgtcacatacctgtcaatgtttacacaatgagggaaatcaaccagcattggaagcaactgaccaaatcagttgataattctgtaccctcttaacacacatcaattttcacttggtagggattatctttaattcggtctcacagctattcttaaaattggtgtcaagattgtcacatctttaaatacagatagaattgccagaagtacataattatatatatatacacacatacagaaaaatacaagactgtttttccacaatatttaatttatacactactgtaactatatgcaacttttgaagacaggttaaggggtacaagtaactgtttagagcaagtaagtagtttggtccaatattatcttaatgtaatggtttttcgctccctcccttttatgtgacgacatactatgacatacaaaacatgcacaatcattcacttataaacaaaggagtaagacaccactcagactgacatttgtataccccaa

SEQ ID NO: 14028 - DNA, 425 bp, Homo Sapiens
tcccttccatctctcagccgcagaggaggccctgcagcgccccgctgtagccatgcaaccccgaggagtcccgggcaccttcaaccccaccgggaggggccacaaggacctggcctcggccaccaagctttgtcccctctcgctgtggggggctagtgattctcctccgacctgacgattgcttggttttttcaaaagggagttttgtgcggtgagaagtgtgtttctgtgtggctaactctgggctagcgtgccgtggccattgaaggtgtggcctgcgtgggtgcagtgtaagtgacgctggattgtcagcgtggcagcaggggacccctgctgtgtcagtgctaatgaaacatgttggttggtttctaaaataaagccaaacaagccagcacatgcagaggcttggaccctgatagaaaaaa

SEQ ID NO: 14029 - DNA, 861 bp, Homo Sapiens
  misc_feature (52)..(52): n is a, c, g, or t
  misc_feature (65)..(115): n is a, c, g, or t
gtgtttgtgagacagtcttgctctgtcactcaggctggagtgcaatggcaantctcagctcactnnnnnnnnnnnnnnnnnnnnnnnnnnnnnnnnnnnnnnnnnnnnnnnnnnnttaattaattaatgggcaaacctctaacaattggaaattttacactgcatcttcctccttaagcttgtatttccattccacttccttcagagaatttgtcctaatgtaacagtttaatgctctaaagtctttcattgattactctgtatttaatttgggaaaaattctcaaatcttcagatgctacagttcctttctatcttaattaatctaactattttaatagtactgtaagtatcagaaaaaaaagagtaggaatgaattcaatgttcatcaccaaaaggaacaagtaaattattgaagactacacaactagtaatagagcaaaataagacttaacatgtgggtcttcttacattcaactcactgttcttttcactatgtcacactgtcactgattttttttaagtccatttgtaacagtttgaaatattcttggaggagaaagctttgaaatatttctttttgacctccgaggtattgttatatgaagtcttggtgttgcaagtacaattttacatgtatctttcatggaacctggaagacctgtctctccaggcactgtttttccatttccttccttaactttctgttgcgaagtcccttctgttgtcctctcactatcagaaaccattaacaggctgccatttttaataggaatacaattagtactgagagtctcagcattagtattttgaaattgttcatcagcagaatcaacgctttctaaaacaaacgtgtcctttt

SEQ ID NO: 14030 - DNA, 509 bp, Homo Sapiens
  misc_feature (167)..(167): n is a, c, g, or t
  misc_feature (170)..(170): n is a, c, g, or t
tgatctagaggatccctccgggtgcatgcatgtgatccagctactagggaggctggctggtttcctggcactgatagctccttttccagatcactggttcacgcatcagctgtaagtagtgctctcttcctaataaggctgactggttttgcgcacaactccttaantgnacctcccgtaactccccatacccaagacttcaagtttgggtacagtcacttcaaaccaggttgctatttcttgacttgggaccagatacagtagcagttgataagagccgagggactgtgttgtaagacaaatatttatcttgaaaatctagacccgtcttatgcctggtgtgatgctgacactctgagaagctcgagggaactagatggagacaggaaggagcagactgaatatctcttgactcatttccatgggatgcagggaagatgaacttgaccacataattctttgcttttcccagtcgaagctgagcctgtctgcacatgcattgcacccgg

SEQ ID NO: 14031 - DNA, 287 bp, Homo Sapiens
caactgtatattattttcactggaagttttgaaattccagaaatatgcttggaaatccccgcttgaaatctccttggttggaaaccagtccagtgggtgactggcccagaatgatgcttctcctcggtggaccccctgggctgagcagcctgtgttcctgcctcaactcccctgaaccctcctgaactttctacacacatgtgggcactggctttgatactggcatttggaagggcacttgggaaattcagagaagtacccattattaagataaatgatgttttatc

SEQ ID NO: 14032 - DNA, 192 bp, Homo Sapiens
cgacgctagggtgatgatgtgaaaaccttaagtcataattgatctctgtcccatcataaatccatgggagcagaaatacttcacccatgaatatttaattattgttctggaacaaaaattcctgaactattgaagcacactcacgtcggcaatatgtggcccattcctagtgaattatatcttttaacaaag

SEQ ID NO: 14033 - DNA, 327 bp, Homo Sapiens
gctcaggcaattctcccaactcagcctccagagtagctgtgactgcaggggcatgccaccatgcccagccaatttttaaaaaattatttgtagagacagggagccatggtgcccagcaacatttctcttttaaacctgtgaacattccctattaactttcagagaagaggtgtctttataaagaagcgcttggaatctcagcattttaaccattctctattctggggaattttttatggacaaaccttagattcttctgaatccatctgttccaaaataaagactcaagtcaattgcatggagttgaacagggtatgaaaactttga

SEQ ID NO: 14034 - DNA, 455 bp, Homo Sapiens
gcatgtgttaatggagctggagagtgtcacaagttgctgtctggggtgaagtggcaggggagccggggcacaggccccacggatgactggctaaatgagtattctagagcttcccattaatctggttcttacagtacaaattgggtaaatgagcccctgggttgccaaaggtaaaatatataaaagagaagcctctgacttggttcctgcttctggtctctctccatcaaacgcattctgcccactacttatccttcccaaagatgaactttcatcacatgacatcagtggttcccaactgcttctccgataaagtccacaaagcctttctgtcctggcgctgcccactcatctaacttcaccttgcaccctgtgcccatgcccattctccataactcaaaccagtttcctgccatccagcttccccacatcagcaccagggcgatcctctagag

SEQ ID NO: 14035 - DNA, 503 bp, Homo Sapiens
cccctggggactcaaggcagaagtgccactccctccgttgaccacggctgggaggggtgcctgtctcttcagggaagaggtggggagactaacaggttccctcccagctcaggtctacactgacttcagtcgtaactggttccagcatccctcaacccagttttatcacgcggtctaggcccaaggtccagggctctgggactccctccgatgctcccacccctggcccctgcaccttctggcttctgcagggaccgctgggccatggatgaggcctctcccacctcgctggaagaccagagacaccttcggatgcccacctgaaccctgaagcggatctggacctagcccagcagctcccaagtgactgtgtttccagcagcctgatccttgttgaggcccagggaagtgtcccaggccccgacttgccagacgaggctctattccggctgctgcagcccacttttctcctttatttaaataaatactcattctgtgctgta

SEQ ID NO: 14036 - DNA, 471 bp, Homo Sapiens
  misc_feature (20)..(20): n is a, c, g, or t
cgggtgcatgcatgtgaacnagaatatcgggcaactgtacaaacaaggaagcagctctttatgtcccaataatgagacatccttcaagatgcatcattacatggagaaaagattgaaaactctgtatagtagctaccgcttgtgagggaaaagagagaaaattatatgtgcactatattccacacgtattaaatgaactggtgacattaatggccccagggaaagagtggccaagctggcaggctttggaacagtgctgagagggagacttgcactgtggactcatttttgaaccttcagaatttgagccttgtgaatgtatcactgtattacattttcacaaaaccttcacaggaataaaacactgcatctctgaaatgagcaggataccatgatagaaacaaatggagaacataaaaacatttgcaaattaaaatccaggctgccccagtccatcccccacccaatgtc

SEQ ID NO: 14037 - DNA, 545 bp, Homo Sapiens
cctgctgtactaatgtattccatctttcaaaaagaaagacatgattttaatattacttaacaatatgttaaaaaagtagccaggcaggcctccgtgttaatacagtcgtacactctataacagacttgatggtgtgagtactgggtgggcttgtttttaactttctcgttctgcaagggatcttacacaagctggctacaagtcagggggatcaaacacaaacaagcgcaacgtgtacactcggagacagtagattgtggagaacaaaggaggcctgccccgcccagccccgcctagggtgaaaccccagggcacaggggaacctgagtaacggcccgtaacccggtggaggacacattgacaggaccagtggacattgcggagaggaacggtggccactgtggttattgacaagcccctattcgggacacggcccggggctcccagagggccggtggtttgtgaggctctttcgggaactaatgttccaatccggcagcgagaggctcaatgcgaggggtttgtgacagagtaacgcaaacgat

SEQ ID NO: 14038 - DNA, 458 bp, Homo Sapiens
  misc_feature (38)..(38): n is a, c, g, or t
aggatccgcccgggtgcatgcatgtgggagcagatgtntggcatgtgtcaggctacttctgggaatagtctgtattgaagaaaggaaagtatgcttcagatctttacacataatttatgcaagtgaataaggatttctcacaaaggaagaatgccagacagactattatatttagcaagataaagtgtgctgtgtgcaaattcccacaagtcggccagtatagcagaggacaaagaaatattaataaattcctgttttataggagattagttctctaacgagcaaacaagcaagaaaataggggagtctcttagggttttctgaagatcggttcacctcccttaggctaaccatttgttttcattgtctttatgagagaaagtctttcgtacggatttaatgtgcaccacaggaaaatgtttacatatcggaatcttaaggttcggagggactttcaa

SEQ ID NO: 14039 - DNA, 384 bp, Homo Sapiens
tgtaatccagtagtgtgtaatataaattcaaaccatatccacacacaacaactaattgtatgaaacttttatatcctaatttaaaagctgtgaaattagttttcacgcatcaaaccggattgtttatatgtttaaacattttatgctcttatttaaagaagactttgagctatttttttctgtaccctgtaaaatattgaaaactaacataatatgttgaggttgcttggaaatgtacataaaactaaaattttctgaatcgtgtgtttatgtttgaaatctgtgttttaactttgtaagtaaattctctgcctttgtatttatattttacaaaaattttcttaaaaggcaataaaactgttgaggaaaggagaaaattgaaaa

SEQ ID NO: 14040 - DNA, 209 bp, Homo Sapiens
aacttgttgagccctttcgcatgaatagcaataacgaaatcgtattttggacaaagcgttacatctccagtctaggttaggcgtgaacaacaacaaaaatatgaattctgcccctccctctgagtgtgatactcacttattttagcgccgagtggaatggtggaacagttataagcagatgagaaacctgacatttgccataagatccg

SEQ ID NO: 14041 - DNA, 232 bp, Homo Sapiens
cagcaagacagtcatggtattgttgagtgaaaaaaagttacaaaacagtatgtacactttgatcccattaaaaatatctataaatgcacagaaaagtctggaaggccatatacttaaataacagtggttctccctggatgatggaattatcagtgatttttctttctcactgaatcttttttctttttgccaacagggctatgacttgtattataaaaaagcattaacaatt

SEQ ID NO: 14042 - DNA, 428 bp, Homo Sapiens
cctgggtgcatgcatgtggacttgcataaagaaaatgcgctccatatatatcatggaatactatgtaatccatatacatcatggaatactatgcacccataaaaaatgagaagatgtccctttacaggtgaacagatgggagcccaaggtcattatccttgccaaactaatgcaggaacagataaccagaataacacatgtgcccacttataagtaacggttaaattatgagaacacatggatacagagatgggaagaacagacactagcccttacttgaggttggagattgggatgagggagagaatgagggaaaataactaatgacgtaacaggcttaacacctggataatgaaattatctgtacaacaaccccccgcaacacaagttacatactgtcacgagacctgcacatgcatgcacccata

SEQ ID NO: 14043 - DNA, 451 bp, Homo Sapiens
acccctgggtgcatgaatgtgcagggacccctgctgcctttccgaagcccttttgctggcagactgcattggagtgttaccagcagactgggaacacctcagccccttcagcaacagcaggagcttaacctcaaggggccagagaaaaaaggctgttgggcctggtcccaggtccccagggttagagcacacagcctaggaatgctaagctgagcctctggccccctgcaatcagccagacatgaagccaatcaagttatacccagcttataccactgtcaaaccctcaagggcatcaaagaatataaaaagcaaaaagccctatatgaaggacagcaactttaaagattaaagaaacatcatctccacacagatgagaaagaaccagtgcaaaaatctggcaattcaaaaagccagagagtgtcatcatacctccaaatgaccacaattc

SEQ ID NO: 14044 - DNA, 524 bp, Homo Sapiens
tttgatcatgcatgtggcaaggagcagtataatacaaaaggcaaagaagttggtttctgtgttcacagggcaaagggccagtgcatgaaggatgtgagcttatccactgtaaatgaactgggcatacctgggtccctcctttaccaacaatcttttggaggccctttcttatttcttggtcagcatctcagcttccctgttcatgcagtgagttcataatatctacttctggggcaacagtgaacaatctgccaagcctgagcctaaggcccaggggtattctctggatggtgacgtgagaagactcggggcaaagagcacgcccagctcctcacatggtaagtcccgttggtaaagtgcacggggatgctgaagggcaaggagtggtggaaggggttacgcagcaggatggacaccacttccatgcgtgatggcctggcttcccgctccctggtccgaagggtccgctccactagccgctggcagcaggtggcatactggccagtttcacttctgggatctgc

SEQ ID NO: 14045 - DNA, 513 bp, Homo Sapiens
  misc_feature (345)..(353): n is a, c, g, or t
ccttccagtgtgagctggaattagactgaacatgtgctgggcctgcctctccctagacgcagttgcggggcactccagggaatgaaccagctcaagtgtgtccctaacagcagcctggagctacccccaatccctcacagcctgaccctcctcattccatcagatgcatttgtagaatcggggcaaatttccttatttatttatggcccatgcctttccccctcttcatcctgatcccgttttgctttgaagagaccccagtaaccaaaaaacagcctccagaagccaaaaccatgcctggatctcccatagcttctcctttgcttccaggagaaagttcactgnnnnnnnnntatcttctggcttcttgtgtgtacagagacaacagaactcggtggggaaacgggaatcttttctgcaccaaagctgcttctaaagcagaaagcagtggggctcttggtgtttcatgctgccttatttatattaaaggaagaattaaatcttgcaaggagt

SEQ ID NO: 14046 - DNA, 467 bp, Homo Sapiens
gcccttcaagagttccaagggaacacttgaaccatggacaagactctctcaagatggcaaatggctaattgaggttctgaagttcttcagtacattgctgtaggtcctgaggccagggatttttaattaaatggggtgatgggtggccaataccacaattcctgctgaaaaacactcttccagtccaaaagcttcttgatacagaaaaaagagcctggatttacagaaacatatagatctggtttgaattccagatcgagtttacagttgtgaaatcttgaaggtattacttaacttcactacagattgtctagaagacctttctaggagttatctgattctagaagggtctatacttgtccttgtctttaagctatttgacaactctacgtgttgtagaaaactgataataatacaaatgattgttgtccatggaaaggcaaataaattttcaacaaaaaaaatgc

SEQ ID NO: 14047 - DNA, 208 bp, Homo Sapiens
  misc_feature (45)..(46): n is a, c, g, or t
  misc_feature (50)..(51): n is a, c, g, or t
  misc_feature (62)..(62): n is a, c, g, or t
  misc_feature (66)..(79): n is a, c, g, or t
cttgacagcgaggacaggagggggacaaggggccacctgggcagnnccgnnggctctccccnccannnnnnnnnnnnnntcacatcatactccaatcataaccttgtatattacgcagtcattttggttttcgcggacgcgcctacctaagtaccatttacagaaagtgactctggctgtcattattttgtttatttgttccctatgc

SEQ ID NO: 14048 - DNA, 310 bp, Homo Sapiens
ttcctcaggctttcgacgcgccggcgggagaccgaggtggggccgctgtaagagcccagtcgatcccgcctcgtgccctcagccgaggccccgaccgcgggcaccgacgcgctgctcgcccggcgccgcagtggctcctgccgccgcccttcggggtccccggccgcctgctccccagccgacgagacggaggtggcggaagccctgccgtggcgctccatgggcgcgccgagccggcccgctcccatccgcagcagcagtcgctgccgcccgagcaagccccccagcgtcggattccttctcgcctcct

SEQ ID NO: 14049 - DNA, 558 bp, Homo Sapiens
catatatatatacgcgcacacacttgttcagaagttatgttttggccttggatttgtttttccccttggaaatggttcttaactctgggattttagaaggttagaatattttttcaagagaacagtggtactcaaaagaatgaaaggtggtccctacattttctgtattcatcacttaaaatttttaatttttccgagaactacaagtaacatttgaaccatgctgctgttgtaccttaaacaaaaactcagtgataaccagtatttagtctattaaaaatgctctttttgaagaaaaaagtttggaagtctctgattagccagagtatagtatgagtcttcactgagaaatatggtgacccattttctttgtgaaaacctgggaaaatgcaagtgtgggtatgaagtgtgtgttctgtttgcattgaaacaatgtaattttgtgtcttctttttgctttaactgacttatttcagaaattgtacagtgttgagggggaaagtcttttctgttaatatatttgcaattcattaaaggatatggaaaatccaaaaaaaa

SEQ ID NO: 14050 - DNA, 543 bp, Homo Sapiens
  misc_feature (173)..(297): n is a, c, g, or t
  misc_feature (341)..(429): n is a, c, g, or t
  misc_feature (452)..(476): n is a, c, g, or t
tggcctccccagctgaccgcaggcagggaacaaggcagaccctagagggccaggccacagcaggggctgaggatgcctggtgaatggatgcctgggagaaaggatgccagaattcgtgctcgaggacatgatgaaacagggaaagactcaatagaataaagaaggaaggggannnnnnnnnnnnnnnnnnnnnnnnnnnnnnnnnnnnnnnnnnnnnnnnnnnnnnnnnnnnnnnnnnnnnnnnnnnnnnnnnnnnnnnnnnnnnnnnnnnnnnnnnnnnnnnnnnnnnnnnnnnnncatttagatgggcatggtgtcacgagcctgtagtccccccctcnnnnnnnnnnnnnnnnnnnnnnnnnnnnnnnnnnnnnnnnnnnnnnnnnnnnnnnnnnnnnnnnnnnnnnnnnnnnnnnnnnnnnnnnnacagagtgagactctgtctcagnnnnnnnnnnnnnnnnnnnnnnnnngaaggaaggagaaggatggaagcgaatctcaatgaacaaaatgcactgggacctactatgtacccag

SEQ ID NO: 14051 - DNA, 450 bp, Homo Sapiens
taaaataaggctgaaaaagtcttcatctggtactgtcggaccctttgtggtagcaggtggtggagcacatctttgatcatctaatctggatccttgacattttacaaggatgtcaaagaaatcttcatcagcctctttgttgtcattagtcatcaggtggctaagtaccgactggctgttttgtgttagacgaagccctggcaaattactgaaactagccctctggtcatccagacggcgactctgtgagctggcaagaagatctaaaaactcatccgtgttgggggataccacaggaacagatgatgtttttagcatcattttagggggagtggaagttgttgttgaagctgtatggcagttcttttcttgtaagcaacatctctgatcatccatcctattgctttgaaatcggcttaataagtcaaagaacccttcatctccaatagt

SEQ ID NO: 14052 - DNA, 518 bp, Homo Sapiens
ttggatcccggaccaattcacctgcaaatcaaggttatcgaaccaagtgtcctacatcatgacatgtatatggtcatagtaccagtatcatgtaggggtcatgaaaacactgacaacaatgatcagagctaccactttaaagtaggaaagaaggtagacaagcaggatgccaatcaaagttcctgtacagactttcctgaacaatcgaaacgtatctagctgacggcagcttgtcttgtttccttttgaaaaatggttctttccttgtgtcattccattttgatgtatgtgagcaaagattgcttgtatgaagatcagacaccattttgtgttaacactaccaaagaaaagttctgtctgtcttattctcatgtttaaaaaattctggtgatggtgatggttatgttttaagaagtacttaaaagaataagactccaaaggaaataaatgtcttttattctggagtcaaagctttccattccttttaaggatctaatgaatcaaaataagcaggaaat

SEQ ID NO: 14053 - DNA, 1146 bp, Homo Sapiens
cgagtctcgctctgtcacccaggctgtacccaggctttcttgtgcgagcaccacaccaagggcaggttgggcttgaaggagcccttgaggaaacacgggttctccgaggggtacaccagcagggcctttagcttaaagtccccggctgcgttgccaccgagcaatagggtaaggaggtctccggcggctttgacacagggggccgacctcatcttccaccaggaaaatgaacgttcctctcggcaggcggcttacagaggaacctgggctttattcatgggtgaacaaccaaccagagctttattcaatgggtgaacaccagccagagtgtgtaccccccctccggggatcacactgcgcattaacgctgggttcttgcacgctgcgttcttgggccgctggccccgatgctgctcaagctgtggcgcgccttaaagccagcgaatcaccctcgaccggccccgaagctctcgggctaggcgccctcgccctgctcctgcttgcggttctcgaacgggctgtgggctttctcccgaatgagcaccacactgaggggcatgttgcgctggctctggtcctccatccgcatgctcagcagctgcatccatgttctccatcaccaggctgcggccacgcgtcaacttggtggccgcctgcagtgtggcctcctgggaactcgcccagatcttttccttgttgtcacgaatggtggccaaggtggagttggacagccccagcgccttcccgattctactgagcttctctccggcttcaaagcgccacagcgcctcgagcttcacctgtaggttgatggccttgcgatcctaccagatgcctcagtaatcgcgagcgttcagcggcctcttcaggcccgacacggtggagcgggagactgtccgcgccgcttcctccagacaccgcaagggggtgcttgtgttcctgctactgagcccgctgatctcagcacttgttgccactaaggccccagccatgactcgcgcttcgggtcgcagtgcgagccgtctgctttagctgggctgcggggcttcggcccttccccatcgccccgcctcacagtgcagttttccggaccccccgagcccaggtccatctcgccgcgaagggggaagttgcctggcgacgccg

SEQ ID NO: 14054 - DNA, 337 bp, Homo Sapiens
gccaccgacgcgcgcacatgcggcgccgcctgtatatttgcgccggctgcggcagggacttcaagctgccccctggcgccacggccgccactgccaccgagcgttgcccggagtgtgagggcagctgagtcccgcagggctgcgtgaggggcgcgctggggcttcgacctggctgcactaacccaggctcctcctcgccccggcctccgggtctgggaaattgaggggacggcaggcccggctgccctggaactgggagacagggagaatcccctgccggggtccctggaaacagtgcccaccccacatcactacattccctcggcccgtgttagtg

SEQ ID NO: 14055 - DNA, 316 bp, Homo Sapiens
tttacataaaccaggcagccagaacaggtgggcgtgtcatggagttcagacatctgccatgacaacagctcatcattgggcccatccacatagaatccattggataccaggcaaccacacacagggtgtaaacactagcacagagctggaaggaggtgttggtgaagggacccaagctcagcaggaattgcaacagaggagaggtgtcacatatcctctcctctattttccagtcgctcactctatctgctcaacagggacccaggagacagtgtctgtctcttctgggtaaggtggcatggctaacagacactac

SEQ ID NO: 14056 - DNA, 542 bp, Homo Sapiens
aggccagcatggctggagaggcaggcataggcagggaaccgagcagcaggtcagagcaggcgagctgacattctgcagcctggacggccatggcaggaagcttttagttggagagatacaggaagcctcctagggttctgagcagaagaggggcatgagctgattcacattctgaaggacctctctagctggccagtgctgaggaggttggagagagaaagggtgaaagcagagagaccagtgcagggctgttaacagggttgcaggcgagagactggggtgctgggctcccctagactaggactccagtgccctcctctcccaagagacaaaggccattgcattgaaggaggtgggaaatgattagattctgaacatatgtaattatttttcagtctttttcaaagatacaaatatttacatagttttaatcatgtaatatatacaatttaatgtcctagtgttttacttaatagtgtatcatgttttccctgttggtatgtagcctggataaatgctcttaattataaaaaattctgtcg

SEQ ID NO: 14057 - DNA, 361 bp, Homo Sapiens
tgcggccgccatggcagtaccttccgcgagctgcacctgctcatggccagtctggactgaggaaagcagtgggcaggggcgctcggcagcccacaggccctggcctcagcccccactcctgttccttgtgcacccactggcccatgagcctctgcctggcccctgctgctgtcctgtggccgtcctggaggaggtgatgctggtccctggccacctctacagccctgaactcttgagacaactctctccagcaatagctgcccagctttgcccaactgttgcttcttggggcagcgaactgagccctggggctgctgctgtaatttataaggcaaattttattaaatttgtaactattccc

SEQ ID NO: 14058 - DNA, 370 bp, Homo Sapiens
  misc_feature (42)..(43): n is a, c, g, or t
ttgggtgcaacaggaaggttttatttaggtggccactgccanngcggattaacatccaaaggctgagcccggaacaaagacagggcttgacttttatacatgcatcaggcaggggcaagtcgggtttttggcgcaaaacctgcgaggtgagaaagcagtcttacagaagcagaacaaaggcagttaatcataccgttgacaggttttacaacaggatttgcaacatgagcctaccttacttaaacatgtcttgtgaccttgccatgctacagaaagaaaaacaagaacttacaaaatctttacagacttgcagaaatagttacaaaaatagttgtgagagcagaacaaagaataatgttatggggagaga

SEQ ID NO: 14059 - DNA, 581 bp, Homo Sapiens
tgtggctcaactagcagcagaaagcagggagttgtctgaaggagcagcttcatttcggctgtttctctttccagcctctccccaccggtcactgttagcctcgagtttgaccctcaacatccccagaggatgcctcctaggactcgaacctcatttagtgtctctactgctgatggacgccatgagtggagctgtcgaccaccttgggtgaagtggtggtctccacgtcccacctgggcagcacgatggccacagaaaggttgtatttaccccagccagcccaacacatgcagaaatttcaaaaaagactatataagtagatgagcatagatagataattctgggagaacatccttaaaaggagttgggttctttgttggctttgtgtgggttttggtctaaataaactagactgctttaatatactgcctcttttaatgaaataaagtaactgtttccttagctgtgtgctaggaaagccaatacaaagacatataagaaaaaccccacagacctagattcttaaaaccattcatatttgatcccattctcaagatatctcattatatacatgcaaatag

SEQ ID NO: 14060 - DNA, 344 bp, Homo Sapiens
  misc_feature (103)..(115): n is a, c, g, or t
attccaagtcgccacacagggtacattcagcagtcactgcgcctgcagtcggcgacagtttaatgtgaggcaattaccgctacagacatcttgcttcatcttnnnnnnnnnnnnnttttcaaagcatctcacaggccaaagagctaagcaggaccctcactcagacattcaagagtgtttccgaggaaaactcgaggaggaggccacacggacctcggtgcacagcttcagcatcagcagcatggtcaggatcatgatggcgcttgccacagcagcggggactcaaagcgccttccaaaccagaagagtatccgcaaaatgttggccaccagcagcacccctcc

SEQ ID NO: 14061 - DNA, 844 bp, Homo Sapiens
cactgcctctgtgtgcccctttgcgtcctgtgaaggccattgagaaatgcccagtgtgccccctgggaaagggcacggcctgtgctcctgacacgggctgtgcttggccacagaaccacccagcgtctcccctgctgctgtccacgtcagttcatgaggcaacgtcgcgtggtctcagacgtggagcagccagcggcagctcagatgcagggcactgtgtccggcggagccaagtccactctgggggagctctggcggggaccacgggccactgctcacccactggccccgagggggtgtagacgccaagactcacgcatgtgtgacatccggagtcctggagccgggtgtcccagtggcaccactaggtgcctgctgcctccacagtggggttcacacccagggctccttggtcccccacaacctgccccggccaggcctgcagacccagactccagccagacctgcctcacccaccaatgcagccggggctggcgacaccagccaggtgctggtcttgggccagttctcccacgacggctcaccctcccctccatctgcgttgatgctcagaatcgcctacctgtgcctgcgtgtaaaccacagcctcagaccagctatggggagaggacaacacggaggatatccagcttccccggtctggggtgaggaatgtggggagcttgggcatcctcctccagcctcctccagcccccaggcagtgccttacctgtggtgcccagaaaagtgcccctaggttggtgggtctacaggagcctcagccaggcagcccaccccaccctggggccctgcctcaccaaggaaataaagactcaaagaagcc

SEQ ID NO: 14062 - DNA, 528 bp, Homo Sapiens
  misc_feature (378)..(378): n is a, c, g, or t
  misc_feature (380)..(380): n is a, c, g, or t
  misc_feature (409)..(409): n is a, c, g, or t
  misc_feature (481)..(481): n is a, c, g, or t
atggatttattgctttataaaaaagaagtctaataaaactgaagagaaaataactaaaaatccaaacacaactcacccctctaagcacgcccaggaggtctcaagacacacttctgggggcagtcaaggtgggcgggttggtgggccaggcggacgggcctcccccgtcatcagctccagggccccacggagcccgccggcagggggtgctgtgggcctgtggccttggacaagctcctggccccacgccaggatggctcctgggcactggcccagctgcaagcctggcggctcccgcctggtcagtggggataagggctaactcctagagcccaccccgaccccacacacacctcggacccacccacgtccccaccncngcctggacctccacgtctgccggccacancctttcgtccacctccacaaaagcagctgtgtgtatgtacggggtgccctggcggcggtcctcaaattcccntcaggtggcagacagaacgagggtgacagtgaaaacgtgtccgcggc

SEQ ID NO: 14063 - DNA, 727 bp, Homo Sapiens
aagactaaaacattttctgtgagctttagtcattgtactctattccacctgtgtactaagtgtgcagtatagcatatcccagcattctgtgtgtgtgatgtgcacgctgattggactgtctagagaaagtgctgtgcatatgtcaatattgtagctctggggatatctttagaatgcttgagaaagttgctaggtgtgtgccacattggtgcaggtaaatccatgctgttcacagccaagcagcatttgcagagaaaaggagagtttacatagaccccaggaaaaacagtactaacctggttgatggccttggtggtggaattttgtttcagccagaggctactcattatatcagaatgatgttcagtataacactatctgatttttagattggtcgatttctgttgtaatcaagtatttaggatgtaatctttttaaagtcattgctttaatctgaaaagccattagaagggagaggaatcactgttccacaggatatttaaaactcaggagttcaaataacctcacatattgaacataaactgttaacttattccacaactaaattctaacctgatacttatgaattgcaaagtgattgctgcaaactttttctaaggtggctgaagatttaaaatagatcattctaaagggaaatcagtaaaatgtcttgataattggtatccaaatcacttgtgtgcctgagaaaataaaaggtaatatttta

SEQ ID NO: 14064 - DNA, 388 bp, Homo Sapiens
aaatttttggacatcacatgaataaaggtatgtatgtacgaatgtgtatatattatatatatgacatctattttggaaaatgtttgccctgctgtacctcatttttaggaggtgtgcatggatgcaatatatgaaaatgggacattctggaactgctggtcaggggactttgtcgccctgtgcactaaaagggccagattttcagcagccaaggacatccatacccaagtgaatgtgatgggacttaaaagaagtgaactgagacaattcactctggctgtttgaacagcagcgtttcataggaagagaaaaaaagatcaatcttgtattttctgaccacataaaggcttcttctctttgtaataaagtagaaaagctctcctcaaaa

SEQ ID NO: 14065 - DNA, 392 bp, Homo Sapiens
aataagtgctctgtaaggaattgtgtgaggacctaaggagaaagattgcaacaaatagagttaagtgttaccaaacagcacaaagagatttgtcccaaagtcctgcttgtacctaggcaatttaagtctattaacctaatgaccccaaaatactgacagttaatatgatggggcactagggttctcagaaagttaacagacattcctaactacatacctctaaccatataatcaaggaaatttcagtggagaaatcaaagtgaaatgttgcattgtttcatttagaagtgagactctcaaaaacctttggacagacagaagtgatacattctttttggcttctctgaacactgaggcctgagggatatggaaggaaattagaaaagcaatag

SEQ ID NO: 14066 - DNA, 441 bp, Homo Sapiens
catcattagaatccgcatcctctctacagtcttgtctgtggtgaccatggcctctcagatctcctgctccacggagcggaagtgactgacaggtccccctgccttcccaaggcatacactactgggtttgcactgaagccatgcttctctggcactactcccagtcagtgagcgggcacagcacggggtgttggtggtggcacgttcatggaagatgtaggactcctctgatgagcaagtttggcttggaaacacctgagccggctggttgaaactttctgagaactatgctgcatgcagcctgaggctcttgggcccagttcccctctcctttcacaggtgtcagacctgtattatgatatgaagtctcccttccctgctccggcttccttctgtttatccttcacaggagttcccttaataaaactcttgcacattgaa

SEQ ID NO: 14067 - DNA, 499 bp, Homo Sapiens
  misc_feature (423)..(431): n is a, c, g, or t
ctcccttccctgggccccttctctcctgggcagccacaccacagagcggggaggggcaggtgggggaatggaggctgcaggactggctagaaccaaggtcctgccggtccaccaggcggaggtgggacaaaggtcctaacaggagtcactggctcaggaccccagggagaaacgctctccccacccacgccatgctgaccagaggtcttgcagcccctgtggatgcccccgccgaggtcccccgatccccgcacccggactgctgctccctgccccaccattgcgggtcccccaggaagccaggtgaccccaggtgggaggctgtgtgtggaggccatcctggaaggaagtttagacctgcccaggtgtggagcgaggggcacaggggcatcctaacctcagaaactgaaataaagcctttgnnnnnnnnntctgtaaaacatcaacccccaatcagaagatggcaaatggggaataaaaatagcaggtaacacgtcaa

SEQ ID NO: 14068 - DNA, 214 bp, Homo Sapiens
gcacgaggggatcgcttgaggccaggagttcaaaactagcctgggcaatatagggagacccccatctctacaataaataaaaataaaagctttcatttacaatgatggtagaccaagaaatttgtcctagatcttcactgagaacatctagaaaagctggcagctgaacaaaattttaaaaacatctgggctgggcacggtggctcacaccttt

SEQ ID NO: 14069 - DNA, 496 bp, Homo Sapiens
ggacggtctcttttcaaaagctttattctccctgggaggggcacacctcacccagccaagggctgtttttgactggatgaagtccccaaagggggatgccatgtacacattttcattttctaactccaggccatcacacagctccttcacttcctccaccagcctcacaacgtccacagacccggcccctgacttgaaaaaatcaggggagtcttcaacctccaggactttgggggaggatccgctgccaaaaactccgcacagcctccgcagtaaccagctctgccttctgtcagctcaaggacactgctggctgccccctaaaaaaagttcgaggccaggatcattttgccatcctccagctgaatattcttcaccagcagcattttgtcatcattcccaaagaggatgagtcctgctttggtgaccacccctggccgatgggctcctgggatgggcaaagcgtttccctcgggcaccaggcctgaagtgttca

SEQ ID NO: 14070 - DNA, 293 bp, Homo Sapiens
ggcagcctctagaaatcccgcttctgtggccaacctcctagagaacccgggagaatgttccagaagtctgtcccctcctttcctccctgggcacactggtgagggaggctggaaccaggcagggagtggggccctccagacccaggctggtgacaccttggcttgggctctgctcacaccaaatggcgctgaaagttcccacccggcctcctcctctgagagcaattgttctggtgttttcacatcccttaattaattagccattattatgattttgcaaagacagtgcaaaa

SEQ ID NO: 14071 - DNA, 705 bp, Homo Sapiens
  misc_feature (162)..(162): n is a, c, g, or t
tttttcggcttggaacccccggcagtttttttcttccactttttggaactgccattaccctgatgttcagcggaaattgcaaggagattgatccgttttggcaatttaggccccaccttacctaggatcccttggttcagatgaggtaccttgacatgtggntgaatgaaacactcagatttttccccagttgctattggactggagaggacttgcaagaagcctgtgaaatcaatggggtattcattcccaaagggtcaatggtggtgatttccaacttatgctcttcaccatgacccaaagtactggacagagcctgaggagttccgccctgaaaggttcagtaagaagaaggacagcatagatccttacatatacacaccctttggaactggacccagaaactgcattggcatgaggtttgctctcatgaacatgaaacttgctctaatcagagtccttcagaacttctccttcaaaccttgtaaagaaacacagatccccttgaaattagacacgcaaggacttcttcaaccagaaaaacccattgttctaaaggtggattcaagagatggaaccctaagtggagaatgagttattctaaggacttctactttggtcttcaagaaagctgtgccccagaacaccagagatttcaacttagtcaataaaaccttgaaataaagatgggcttaatctaatgta

SEQ ID NO: 14072 - DNA, 483 bp, Homo Sapiens
  misc_feature (177)..(177): n is a, c, g, or t
aattggagaatgcgtaaagattcatttttcaaggagaagagcctgcaaatggccaatgaaggaggtaaataaactaagatattccgagggaagggacccaggccacctcccttccgcaggtctgcagatgaagggttttttgaatgaaatgccactgtgcattttcagaaaaaaaantctctgataaacagactttgaatggatgtttgttcctcctgattctcttttctcttcgtggcgacttagagttggcggatattcggaactgtgaatgtacatagcgttgagttaaaccccttgtgtgtgagacaggacgcagcgggcccctggtggcctgggggccagacccgtgggcaggtggggcatgggccctggcctgcggggacctgctggggtgtgagggcagagggagggttgccatgaaggaacttgggattttcaatggaataaataaaacataaagtctatacttgggaaaaaaaa

SEQ ID NO: 14073 - DNA, 475 bp, Homo Sapiens
gcaggggcgtccccgggcacagctcagacggccacagttgggggcggggagcatcagcctgtgcggagctgggagcctggcaagcaggaggccagagggtggccccttcggttaagtgtctggggagcggcccgggagcccagaggggtcgtcgggggaagcgcggggcacgtgctcgcaggtgatgaggtgggtgggcagcgcctgggtgtcgtggaagatgacgaagatgctgggctggcagatgcagtccacggcgctgtcgtagcgcaggagcacgtggccaggaccccgcagagggggcgcccgcagaccgcggcggccctgcccgtagtcgccagtcagcacccgtgccacgaacaccgccttatggccatcggcgttggggggcgagtagcggtcctgcaccgacagggaggcgcgcctggcgaaatacacgctcttcccgtagaccgtggacgaacgacgcggatgc

SEQ ID NO: 14074 - DNA, 262 bp, Homo Sapiens
actgttctgaaagactttgagtctgtggttcaccaccagcccatcagtgtttctttgaggtgattgcattagggaagttggctctgggattgcaaaaaaacacaaggtggaacatgttttccttaaaaaatggaaggttttagaaaatatactaggccatctggttagaaaaaacagaccagactagaaaaagctgtgaatttgattttgtagattaaacaaagccagatgattaaaatgtgatttatttataaaggaaaaa

SEQ ID NO: 14075 - DNA, 561 bp, Homo Sapiens
ctccgcaggtctccggcggcaactgtaagtcaaaagccctcaggcattattgcagcgtcccacattgtttgaggttccaggaagtcgctcgtacgctcacttgtaagtcttcgtgctgttgtaaaaattgaggtcgtggttttccacgcgatttggctggcgaagagaccacgaagccaccccccacgttttcaactgagtaaatatctaaatatttttgcttgctatccagatcctgggttcgaagtctttgggattagaaacttccaagcccatttcagaggcttcctagtccttgggaggagtgtcttttaaagcacctgccagccttaagttcgcgtgctttcggaaaggggccgacagggtgcgtctcaggggagccttttgaaatgtggattgagaattgtgtgagtgtctctaggaacctccattaactccacttttcctgagtgtagctccgagcctggccacagcggatgctaccacaagccaggcgcagccgggcctcgggagaaagccggaagcccgagagggtgtgggcgatccgggagccaaacgcgg

SEQ ID NO: 14076 - DNA, 465 bp, Homo Sapiens
ttttggccagcttaaaaaagtttaattgctgaaaacatccaaggcaggtgcgggccagtccctgcggggctcacaccccccttattggaccatcagctctgtgatgcccccttctcctggctacaaacctgggaagtagggcagctggtcccagggccctgagactggtgctgctctagaagggcctggtggggggccagcccccaaggcccttgaccagaactggaacagcaggcaagatggggcagcgtggggtgaccaaagatccgggatgaggccaatccaggctgggaccagcccaggtcagcagtgagaccaggggagacagggtgcccagggcctgcccagggacatgctgctgaccccccgccaccctgcacccctggccacatgctagcgggcagctgatgagcagcagctgaccccagagacagcagaggtgaaaacagtccctgggaactgcca

SEQ ID NO: 14077 - DNA, 676 bp, Homo Sapiens
attcctattgcttccttgcgcaactctcaaaaacgatgaaagtcagaaggctgtcaactcaaatatctttgcaaacactgtttgaatactgtgaattcattacgaagaatgttcgagagaaagcaggggtctaatccaaaagaaatgtcattaaccaatactccaagtccttgagttttgttatatctgaactagttgaactgtgactgacaggtaatcctaatatatccaaatccaactgaataccaaaatgagatggcaaatttttgtttgatataagttagcttgttagcatatgccctagagggcctccatccctgtattctaatgtttttactcaaagctctagcctttaggataggtgaatatgtaaatcttttatcactttctcaaattcaaactaaaggggaaagatcaaaccccttcccttcctacctgttttctgagctggctgacttgccagccacaagctgctcttgcagagttcttaccattcctgtaaatgttttgacttgttgcagaaattcctatctactttattaagcagtattgatctgactgtggaaacatcctctcacttgcattcttttaacttaaaactatttaagaactgatgttccgattattgtatatatttttctaaaaaccaaataaagctacctatgaaaatgaaaaa

SEQ ID NO: 14078 - DNA, 494 bp, Homo Sapiens
  misc_feature (60)..(110): n is a, c, g, or t
ctgccgtcctggcccaggccagctcccactgtcacctctgcgtccaggagattcataatnnnnnnnnnnnnnnnnnnnnnnnnnnnnnnnnnnnnnnnnnnnnnnnnnnnacctggggcaatggaatgaggaagagggcaggcgaggaaggtagaagggcaggtctctggatgcataactcccgagcccgggggctggggaggaagattccccaggcgccccgccgcctgcgtggcgttagctcgtcacgtagtgtttggtggacggctgcccatacaccctgtagaaatcctggtggccgggctgctgggaggcgtcaagccagtctctgaccgccaggctgggaagggactgggggacggagggtgtgggcgggagcgggtgtgagtactcctgcgagggcactgtccagggaaagtggccggagcgggggtagggctggtggccgccatggttggccacggaagaacagtaacagttgtccacagaacaga

SEQ ID NO: 14079 - DNA, 372 bp, Homo Sapiens
tgcacagcatctttcccaccgggaagagcgggcctgctgccttccctcctgcggggtgggggtgggacagaccccagtgggggccagggccacactcagcgcagtgtgggctggacccgcctctgtgctccaggggctggccggtcttcgggggcgccggcttccaccactcgccgccccacccctgcactccgtgacctctgagaacccagctggcccctcgttagccccagggtctgccgtctagagggagcccaccggcctccggacactgtcttcccgctagagccccgtcctcctctgcggggctctccggacccccttccccctcacctccaggcagggacagaataaatgtttgtatggatttta

SEQ ID NO: 14080 - DNA, 548 bp, Homo Sapiens
aagatgaccagctttacaaagactgcccgagaacagtatgaaaaactctccaccatgcacaacaacaggatgaagctctatgagaatcttggagaatacttcatttttgactcaaagacagtgagcatagaagagttctctggtgatctcaacaacttccgaactttgtttttggaagcagtgagagaaaacaataagagaagagaaatggaagagaagaccaggagggcaaaacttgcaaaagagaaagctgaacaagaaaagttagaacgccagaagaaaaagaaacaactcattgatataaacaaagagggtgatgagactggtgtgatggataatcttctagaagccctacaatcaggtgcagcattcagagaccgtcgaaagcggattccaaggaatccagtggtaaatcatccctgtgcaacaagggctaatccaagatcagctacataaacggcctgagtgctgttttaaacaggattgggtgatggtacaacatgactttttaagataatcaagtagtaaaagtttctagtggaaacatg

SEQ ID NO: 14081 - DNA, 363 bp, Homo Sapiens
  misc_feature (185)..(185): n is a, c, g, or t
attagaaagattgttaatcctatgaactcccttttgtaggagagaaagggccaatctgtaggggtagccctgtccaggtaaagttgttttcagcctcatgtctactgttaggtgagggagtcacagccagacagagagtattgctggagggtgagagaattgtggagaccaactaccacatagcnaagagcccagctcttgggagcattgagatgtaagctcagggttacacagttccaaatcttgggaaggggcttttcagacagactgtttgctttctgctgagataaggaatgcatcactctgccagagtatgactttttacagattattaaataaagctgcatatgtctcattgttaaa

SEQ ID NO: 14082 - DNA, 559 bp, Homo Sapiens
cgtacacacacaggtgagaagaaatttgcctgccctgagtgtcctaagcgcttcatgaggagtgaccacctgtcaaaacatatcaagacccaccagaataagaagggaggcccaggtgtagctctgagtgtgggcactttgcccctggacagtggggcaggttcagaaggcagtggcactgccactccttcagcccttattaccaccaatatggtagccatggaggccatctgtccagagggcattgcccgtcttgccaacagtggcatcaacgtcatgcaggtggcagatctgcagtccattaatatcagtggcaatggcttctgagatcaggcacccggggccagagacatatgggccataccccttaaccccgggatgcaaggtagcatgggtccaagagacatggaagagagagccacgaagcattaaaatgcatggtgttgagaagaatcaggagagggatacaagagaggagatggggtcccggcacccatctgtatcatcagtgcctctttgaaggtgggaaacattagtgaaaattctgttggtgccacgc

SEQ ID NO: 14083 - DNA, 631 bp, Homo Sapiens
gggcgtcgaaggagtgggggagccaagtcctcacttggagggcaatctgtagagtctgagttcagggtccgagcccccaaggcctggacggggaaaagggcctgtagacaagccgagaacgagctagcaagggagcgaggaggaggaggcgcgtggtgaaagagagttgtgcggtgagggagggggtccagagctgactttcaggtccacgtttgactccctaattttgttttagggaatcaaaacacatcaattgtgccagtgataaatacagagtgtgtgattaggggagagttggtggggagcgagggagaaagggagagaggggtggcagggacagtcctggtcactctttctgcttctcctcttctgtctcttcccgcttttcctcttttccgcccaggctgtcggcggtggcccctccgccgccccccgagagagtggatgtgagattagattcttttttccacttcatccggcggttctggaaccagattggtgatctgtcgctcggtcaggcagaagcgcgttggcgatcgtcggaggcgccggcgccgcgttaggtagcgattgaagtgaaattccttctccagttccagggtctggtaccgcgagtagatctggcggccgc

SEQ ID NO: 14084 - DNA, 481 bp, Homo Sapiens
tccaccaaccccaacctcctgctgatggagcgcgccagcacccgggaccgctggctgcacaagcccagctacactcgcttcaacctggacagccatcgctccacagagcttacgaatttctaccagatggtccagcagcatcggaagtactatcaagacaagacaggcacagtgcctcgagtcccctactttgcgatgcccgtgagggagccggaacggtaccccctccccaccgtcctgcctcctctgtgcccaaagaagaagtggcaccttttaagactagcccccgagaacctgaagacctaccagaccttcccatcagggaagagggtctctccacaggagcggaaaaagagagactgctactttgagttcagagcatgagacttttagttcagagcagagcctgatgcctgagatcctgggtcgtgaccagccgggcttgctttggaataaaatctctagccatgaaaaacaaaaa

SEQ ID NO: 14085 - DNA, 445 bp, Homo Sapiens
gggggctatacactgaaaatcactgttagaagactgctgaattggacaaaggcccctcaaaggagaaatgatccagcacttggtttttctgcttccctgaaaccctcatctcaacaaagatgccctgttatctccactgtgggtcctgaagccttagacaagtacagaagtgaaatgtacatctacataaaaaaatgatacacagtactaacttcatgcctgtgggtatagagccagaaatgtcacagcacacctgcatatctatcacattgtcacagcagcccctagatgcaattattcctgaattacagagaaacaaatggaggtaccaggcagctgtgactgttgtctacagagaagacacacgtggaaggcaatttttcttggtcatgaaaattgtcaaatgtacataaaggtgaaataaatagtgtaataaatccccaaa

SEQ ID NO: 14086 - DNA, 667 bp, Homo Sapiens
  misc_feature (596)..(596): n is a, c, g, or t
  misc_feature (599)..(599): n is a, c, g, or t
agtttgatggcctttactctagtatttcttatctttttcttgtgttcgttcttctcagtgccggctgaacaggtgactgaatctaaaggtcagtgctcgccttggcggtcaacaccctgatgcgggcagagttgcaggtcttgcagaggatgtgcccatccaaggggtagcagccttggttatctccttcagacaggagaccaccgcaatcctcgcatcggtagcagtgaacatggaaatctcgatccaaagccacaatacggacagtctcctcctggcccggggctggcataataggctccttgcacacagaacatcgcggggcaaatttcttgtggaagtcctcaatgcagtgaatgagcccgccagcatccacagtgaatgggatcccatccaggctgcggtggcacatcaccgcagggtgaaacaggtgaggatgattaggccttcccggtggctcggagaatccgctccatgatgggcttggaacacacattgcactgctccagagtattaatgtagcagggctcgcagtatgctttcttttccacagcataaaatggctgccctcggagcttgttgttgagatgatgcangtnaaacaatccacgtggaagacctgatccatggcagtgcattctgtacctttcccaactacgttttctcc

SEQ ID NO: 14087 - DNA, 337 bp, Homo Sapiens
aaaaggctgagttcagctttggggcatgtcggtccagggagccacagaccccagggaaaatgctcgacaacacccatacggtaacttaagtgtgcatatgtgtattgggaggatttaggggtgagggtcttgtgggtgtatgtacaggtggtccagccacaatgagactgtcagcagtgccccctcattctcccaggttccaggggccacccatctaaggacagtggggatatgcgtcctcactccgcagccagcagtggccctggctgctctggatataaagtttcagctgcgaggccttgccttgcctcacctgtgctccggtccgagaccaaat

SEQ ID NO: 14088 - DNA, 561 bp, Homo Sapiens
tgcctcatcaccttcgcagattccaagttccaggagcgtcacatgaagcgggagcacccagcggacttcgtggcccagaagctgcagggggtcctcttcatctgcttcacctgcgcccgctccttcccctcctccaaagccctaatcacccaccagcgcagccacggtccagccgccaagcccaccctgccggttgcaaccactactgcccagcccaccttcccttgtcctgactgtggcaagacctttgggcaggctgtttctctgaggcgcaccgccagatgcatgaggtccgtgcccctcctggcaccttcgcctgcacagagtgcggtcaggactttgctcaggaagcagggctgcatcaacactacattcggcatgcccggggggagctctgagtgcagcttaagcctctccacggtgacgggtggctctgtggctggtaggactcacccatgatatggggtgcaggaactctgggggccctgaaggatttgcttccctcccctgggaaggcagagggctcttaataaagaggacccagaagattcttaaaaaaaa

SEQ ID NO: 14089 - DNA, 445 bp, Homo Sapiens
gcggtggctgggcgtctcacctgaccctggctgagctcctgctgatcttggagaaggaagggtggggccagactctggatggcttggagcccccgaccaggttccacactgggaagaaagcaaagggaagttaaccactcaaggttctcacactgttttctcaagtaagaaagtaaactccctaaaccacaagaccagaaaaaactaggaaggaccccacggcccaccaccatgcggcaccatacctaagtgttcctgaagttcacagaagggatgtggtagagaggggaaggacgttaccaggttttaaaacatattttaaagtttaaaatttttttgcgttagtaatagtgataataattgtacatgctgtgggttcacctatgttaagtgtataagtcaatggtttgtaaaaaataatacataattatgcaactgctactac

SEQ ID NO: 14090 - DNA, 324 bp, Homo Sapiens
ccctccagtggggaaggctgcgatattagatttccttgtatgcaaagtttttgttgaaagctgtgctcagaggaggtgagaggagaggaaggagaaaactgcatcataactttacagaattgaatctagagtcttccccgaaaagcccagaaacttctctgcagtatctggcttgtccatctggtctaaggtggctgcttcttccccagccatgagtcagtttgtgcccatgaataatacacgacctgttatttccatgactgctttactgtatttttaaggtcaatatactgtacatttgataataaaataatattctcccaa

SEQ ID NO: 14091 - DNA, 388 bp, Homo Sapiens
ttgagcttccatgccctcctgcaaagactgaaggtgtcttaagcaacaaggcctttattataacacaaatcagggcaataggtggcaggctgtctgagattcatgactggcaggctggaaaattccatcttaagaactctgtgagatccaaaagatccctgaaaaaggtagtccattttttcaagttatcagaagagtcctctgtgccaaaaatgagtcaggttcatggcctaactcattggagagaaagaaatgagaatagaatgagtgctgaggatactaaaaaatccctctgttgaatgaaacaaaatcaaagttacttctggatcatgatgagttaggcgaatgatgtactgtgggcacctgccaagtggtaaaggtgaaatgc

SEQ ID NO: 14092 - DNA, 896 bp, Homo Sapiens
gggtgcacaacggggccgagttacccgagctaatgcgtcccagtttatattcaagttggaggttacagtaaactagtcccaagtagtcaatacaatgggcaaacagatggcgtaggttgaagcaatcaaagagctcatgcaatcatcagcctttgccccgtcctttggtttcctccgctcgaaccgatcgacccctgttaactccacagggtgccctaatctgaatcctctgttcaatggatcgcctctaatatatttgaatgggaacccagctgagccaggggccagtttcttgtacagggttagcaatcacggcccaccagatctactacccttctctcaagtgctacctccaacatgaggatgtggttattgatcatctactgtggagtgctgggcttctttgtggtccatcacactcactcactccagggcttctagcctcaccattttcatttctggttatgaacttgctcggaaagcgtaggaccaagatgaagatgcaggcgccattatacagtatcaaagcacaagaaatggaactttgggcagagatcatgatagaatcaagtggatgatgagaccaattacaggcagtctctctagcacagcacagaaagttctcaatcactgaaatgagtaactgcaaaataaatagttgattgtactgttctcatgctataaaagtggacaggtactctacaacaaatctgttttctcatttttatcaaatatatgtatcatcaaaggttgcatctgtacagtatgtaaatgctattaatgtcgtcactcacatgcacgacagtccttgttcccccagagaaggcctggtggccccagcacacacttgggattatgtgtatacataaataaatattgggctgtttccctcttaa

SEQ ID NO: 14093 - DNA, 447 bp, Homo Sapiens
  misc_feature (390)..(400): n is a, c, g, or t
gcccaccactgtgacggcagtgcactctggaagcaagtgactggccctggaggtggggcccggggtcggggctggggaaggggagccccagggtcgccagagccgcgagccactccagcgagaccccaccttgcatggtgccccttcctgcataggactggaagaccgaagtttttttatggccatattttctactgcaattctgaagtgttcatttctcacaaactgtactgactcgaggggcgctgatttcataggatctggtgctgtatatacgaatcttgcaaagctctaactgaacggaccttcttattcctctcccctaacaccatcgtttccactcttctcagtgtaggtaaccgtctatggtgtgttttttcattaatgacnnnnnnnnnnnggtttcaactggattatttaaatattggtaaatattgtgcattaaaa

SEQ ID NO: 14094 - DNA, 485 bp, Homo Sapiens
aatagacagaagaatttaatacatgtgatgctttgccttccatttacactatcataaattacaaagtattgttcacttcacaaaataaaaccatttccagataattttttgacagtatcaagaagtacataaactacaacaaacaaatctgtacagttgggaggagggataatagcagggaagaggtcaaacctccctgtgccaatggagtccatctgcatagcccttgggactgtccaggtcaacagtcacacaatgatgctccacgtaaaatagtcattctcttctgctcactccaaagcaagactggtgagtttacacaaatcatctcaatcaaaggaaaagacattgcagttggattttttaaaaatctagatttacagtttttgatgttttaaatatttcacctatgttacaaaatatagaaatcttggtgtgaaaggctcatgctaagataaatataaccaagtgactggaactgtagt

SEQ ID NO: 14095 - DNA, 712 bp, Homo Sapiens
  misc_feature (468)..(478): n is a, c, g, or t
  misc_feature (495)..(540): n is a, c, g, or t
agtgctgcctttccatgtgctgtgagtgctttgagttcagactgacaacagagtgggtctagcttctatgctttccatgaagatctcccacaaatgtcatccatgctcgtgagatggatcaacttgtatcctgaacaagcaaaactgtttgggactcactgccttcaggcagtcccttggaagccaaggactctgggaacttttcagatgggactggaaacacttgggcaggagttcccctggtaggaggtctgttcacctgtacagcctaatggatgtcctgcttgaggtgccctaatattgcaaattctttgtttacaggggtaccacctgtgcccctgggactgtgcttctgtacatgaccacaactctcatgatgtcccctcagccctggaaagcatttgggttagcttccgcttactggtcagagttatactgtgcctgaattgatgcctcaggtcaggttgnnnnnnnnnnnggttcagacagcaattnnnnnnnnnnnnnnnnnnnnnnnnnnnnnnnnnnnnnnnnnnnnnnaataaacctttctaatggaacaagtaaaacacatgcagtggatgctcagcaggccttgagtgtgtgaatgaaaaatatttgaacttgtttttactggttgatttcattgcttaaaaaacataccttagctggacgcagtggcgtgcgcctgtagtcccagctactcatctct

SEQ ID NO: 14096 - DNA, 299 bp, Homo Sapiens
ctaggtctccggccctccccagccgctcctgcgcccttgccggccccgccgcccgcagccctggcgctccatgcgggccccgccgaggccgcctgcgccctgtgccagcgcgcgccccgggaaccggtgcgcgccgactgcggccaccgcttctgtcgggcgtgcgtggtgcgcttctgggccgaggaggacgggcccttcccgtgccccgagtgcgccgacgactgctggcagcgcgccgtggagcccggcaggcccccaatcagccgccgccttctggcgctcgaggaggcggccgc

SEQ ID NO: 14097 - DNA, 372 bp, Homo Sapiens
gcaccagctgctggggtgggacttgggtctccagatcataaactacgtaatccctcttgacactcacaatctcgttcaccacgtgggcctggaactctaactccatcgctgaggggtgggaatgagaactatgaaccaggaaggagagatcccagctgccaagtctgggggtagcagactggagcccaggggtgatggagacttttgatggcttttggcagggacagacttggacacaaaaccgatccatagaagggcttcccaaaccttgttttgcaacatcccaaattgtctccagttgaaggaaggcctttatcagattcatagatgagctttcattgtaaaaataaatgtactttgcaccacttcaaa

SEQ ID NO: 14098 - DNA, 543 bp, Homo Sapiens
gcggccgctccaacatcagaatggccccacacagggcaggcaccccacacagggcacagaccccacgcaccccacacagggcagggatcccacgcagggcacagatcccacgcagggcagggccagcccaaggccaggcccctcccctgtagatctcctcccaggcaggaccagagccacagtcacttccacactatctccttccctagaaacctctgcagactcttcctcctctcctcgatacacaggggcccctgccacagcctgactctctgccacctcgtgagtctctggaaagcagggtcggcctctgaatacagaggacttgggtcctgccggaggatgcttggccagtgggtgctggcacgtgagcagcccccggggagtcagagtggggctgcagcgaaggccgtggtggtcgaggtgagggtggtggccaggtcttgttgccgcagtgaggattctggggttaccctaagagccaccacattcaggcactcaagaaaaagcacgtcaaaataaaatattttcacatgattaaga

SEQ ID NO: 14099 - DNA, 471 bp, Homo Sapiens
  misc_feature (166)..(166): n is a, c, g, or t
cgcagcaagcaggagctggtgcgagactacctggagctggagaagcggctgtcgcaggcggaggaggagactaggaggctgcagcagctgcaggcgtgcaccggccagcagtcctgccgccaggtggaggagctggctgccgaggtccagaggctccggaccgaanaaccagcggcttcgtcaggagaaccagatgtggaaccgagagggctgccgctgtgatgaggagccgggtacctaggggtgcctcccagcctggtggacccaaggagaaggtcccatttcgtgcacactcaggccagctgggtctcaaggaggcaggtggcagatgaaaaccaccgtcaacaccctgtgcgccctgagaacagctaaatcggttcagactcccacctcaccgtttccatagttggctcttttgtgtcatcttaccctttacagagaaattaaatggccttggtgagaccaaaaaaa

SEQ ID NO: 14100 - DNA, 486 bp, Homo Sapiens
ttctgatgacttgcctgtcattctgttatcttttgtaggatggatctttatttcacgaacagtccaagaaatgtgtccaggctgcgaggaaggagtcgagtgacagtttcgttccactcttacgagactgcaccaactcggatcatcagaaatggttcttcaaagagcgcatgttatgaagcctcgtgtatcaaggagcccatcgaaggagactgtggagccaggactctgcccaacaaagacttagctaagcagtgaccagaacccaccaaaaactaggctgcattgctttgaagaggcaatcattttgccatttgtgaaagttgtgttggatttagtaaaaatgtgaataagctttgtacttattttgagaactttttaaatgttccaaaataccctattttcaaagggtaatcgtaagatgttaacccttggtatttagaaaattaaaaccttataatatttttctatcagatgacttcatac

SEQ ID NO: 14101 - DNA, 516 bp, Homo Sapiens
tgtatcccctgtcttgtcctgctctggaggacaggaatggggagtaaaagagcttcccttgcgaaaagcatgccccattttcgcaacagtcttcgggctgcctgtgcaagccttcctctcccgtcagtcaaatgtctggcttcccccacctggcactaatcctccccgccaaggagacagggtggggaaaggaaggaggaagccccttgatagagcaggtcctgctgagactgcaggggggccctcagacttcaccgattctaggatccaagccaggggcccccctcccgttctctgcacaggcgccaggatgggcgcgccactcaactcctcagcctggacctctgcactgcccagtgcgaggcccaatgaccttcactgggggcagctgcaccaccagccttggctgccctacaggtgaggcctgggtcacttgggaagagcagggcaggaggaacctagaggaaggtgagctcttcagaacggtatggaggccagagaaagacaaagagccat

SEQ ID NO: 14102 - DNA, 471 bp, Homo Sapiens
attaacctctcatttgacaaccgtactactaatcacagaccacaagggtaatgatcacatttatgtggtttttgcactccatagttgtcttagcccaatctttctatactcttacgattacttgggttaacgcttctgtgaggaccttctggctcttgagataccctaaatatttaagatatttagatatcttgaagatagtataggatatagagattgtaccaaataggaatataaggagtatgttaaaatgaccagatacctgtttgatagtttactgacctagcagatgtgtggaaaaggaatcagatcttgattcttctgggtttatactggttgtaaaacagaatgatacagaaaatgttttccttgtttaactggtagttgaacatagaacttgggtattatagatcacttttcactttttggaatgttttgtattgaaacttaataaaactttaacatggcaaa

SEQ ID NO: 14103 - DNA, 438 bp, Homo Sapiens
  misc_feature (216)..(228): n is a, c, g, or t
ctgacaaaaaggttagaggaattggctaactagaataatcagtgtagacaggggacaaaatatgacccgatggaggctggtaaacccacgcatgagaactttcccggagcatacaccagtatcgacagccagatcaaacacgcgaaagaaaggataggcgacaggggattaactcaataggattactcgggtagagccacattagaagaaagaacnnnnnnnnnnnnnttataaagaaatacacagaggtgattactataagtcaaagagttacttgttcagggggaaggagggagctacgattgagtcagggcatgtggtggggtttcttccggtggccggacacagttctatttcttgactacgaggtggtggctgataacgcgctatttgcctaatcataactctctctctactgtaaaaaggccccggggtttc

SEQ ID NO: 14104 - DNA, 414 bp, Homo Sapiens
  misc_feature (229)..(229): n is a, c, g, or t
agccgccacgcgggatggcgggcgagggcagcgcggggccgtcggaggccggcgaggcgggagagtccggggccaccgtgccgttgctgtgctcgctgcgcagggacgacagcgacgtgcgcagcggcgagcgcaccaccacggccatcccgtagggcacgctctggcgtactccgtagccatggcgcatgccagttggtgaactggccttggtacgtccctccatcangcataggtctcggtgccatagcccgtcttgcaggccattggtcccaggtgccctcatacttggcaccgctgcttgagctctgccggattccgaaagcgtcccttgagccaattgtgtccactcgccccttggagagccagcgcccctttggtctctatgcccagcatttcccgtttgcctgcttc

SEQ ID NO: 14105 - DNA, 497 bp, Homo Sapiens
  misc_feature (276)..(323): n is a, c, g, or t
ccagaggggggatgtcttactcctttccgtgaagcaaaccctttgagtacggtttgcgtccacaaagcgtagggtgagaaccttgggagcgactgggcccgtctttgctccctcggtggggtttgtctcctggcttcccccaagtgcgaggcagttggtctcgcccagccgggtcctgggcgcggcggcggcagccgcgtcactggcgggcgggactccctccgctctggggaggcagcgctggcggcggggctggggccactgaggaaatccatnnnnnnnnnnnnnnnnnnnnnnnnnnnnnnnnnnnnnnnnnnnnnnnnggaggaagacagcgccgcccgcgcaccgacagcgacctccgccgcagagtcccaccgccacaggcctcgggccagcggccaggagctgcctcccccagtggaaacaggtcgtgaaccctgattctaccactcactatcggcaccacttaggacacaaaacgatggatacgcgta

SEQ ID NO: 14106 - DNA, 335 bp, Homo Sapiens
ttcatctctcattcatggtttcataagaggcttaagaaaaccatgactgttgtgcatctctcagctgaagtcagtctccaccaccaagctccaaatcccactcttacaactcgtgagactaagctcttacttctgagggttttaagtagctagacaactcttacaagatcgttaagtttatttatctgttcaagtctaccatcttcactctctacgaactccagaactggatgggaaaatggaagcccagcaatcaatcatgaagctgagcacttaaaacagagatcccagcagtgtagaagaacccataaggggccgggcgcggtggctcaggc

SEQ ID NO: 14107 - DNA, 522 bp, Homo Sapiens
actcccacctggagaccctgcagctgctgaggactgcacagctcccagaacaggtcaccctcagctacggtgtatttgaggggaaactcaacgtcattaagctacagggccccttctccccggaggaggacccctccagatttcgctccctccattgtctgctctatccagatacaccctggtgtccccagctgggtgcccgatgaatcctgaactgctgggcaaaggttgggcagagacttctgggtgtgccttgcctcccaaggtggcactgtgggtccctggcaagtgtcttgtgataggcagtccctggcagggccttcgggtggttggcaagcccaggatctgagtggcaattggcactgaaggcacccaagcccctggagcctttcttgcggttagggctaacatggaccagctttggcagaggaactaagcaatccaataagatgttcttggaaagttttgagccactcccatcttctggcaaaatgtgggttgaaggcggatctgggcagcact

SEQ ID NO: 14108 - DNA, 325 bp, Homo Sapiens
gaacctccttgggtctcttatgtggtaacttatgtcagtacattaatgtaggaagttagcaaaaactgctgaaacttcataaaaataatatttatgcacattaatttcatacagagaaaggcacagcacagcaacactatagtaaatcagtaagagctgaactaatgttgcattttattccctcaagtcactgtagtgcctagctctgacttccttctggattgaccattcttgtcatgggctatgctttgtgtttgtatttcagtcttagccatgtaagggtttgggtccaaaatatgatcttgttaatgtaataaaatttaac

SEQ ID NO: 14109 - DNA, 583 bp, Homo Sapiens
gtaagtggagaggaagagctgcccagagaaagcttcaaagaaggtactggaaaaccaggagacttttttagaccttaactgtgcagcctggtcactcgagacccagaggttcttaatggactgtggcgtcgacctgacagcttcttgtaacagtgagcccaaggagcttgctggggaccctgaagctgtacccgaatctgacgaggagccacccccaggagaacaggcacagaagcaggaccaaaagaacagcaaggaagtcgatacagagttcaaagagggaaacccagcaaccatggaaatcgactctgagactgtccaggccgttcagtctttgacccaggagagcagcgaacaggacgacacctttcaggattgtgccgagactcaagaggcctgtagaagcctacagaactacacccgtgcagaccaaagtccacagattgccaccacgctcgacgattgccaacagtcggaccacagtagcccagtttcatccgtccactcccatcctggccagtccgtacgttctgtcaacagcccaagtgtccctgctctggaaaacagctacgcccaaatcaag

SEQ ID NO: 14110 - DNA, 937 bp, Homo Sapiens
acccagaagacactctgggtcgcttataagaatacagtatagaaacttaaaagatcataaatttctcatgaggagatattattgatctgtgttattggcatgtatttgcaaaacattttaacactgcaaaacattagaaatttgaagactgggcatgggaaaaggtttacactctactacaatgatgctggtgtacttctacacaaggcctcttagtgacgtcaatcaattggaggtaggagtttaccaatgaattgcttgacatccatcatttcctgttgacacgaactgtgcatcataccttcataggttttaaaggtcacattggctggattcaccaatgtttttagtttttccaccgtaagagaaccaaacatcaggggaaccaaagggtcacaatccccgtggcactggagaatagaaatatctctattagcaccaccgataggaccctgtggaaaggaagcccgaagtggaagccagcaactgagtgcagtgacacctgccagtttctgctgtgtggtaagggcagtatataaagataaagctcctccctgagaaaaccctcccaaaataattctgttagaaggaatgccattcttcacttcttgatcaatcaaagcttttatattttctgctgcctgtttaatcccagattcatcctcctgtgaatctggtgaaagcccaataatatcaaaccatgaaggcatagccacgttcatatttaatgtaacaggcctaacaggcgcatgcgggcagatatatttgatatgtgaacttctgatacctgcaaaggcttctgcccatccgtgcccagtatctcccaatccatgcaggaaaatcaccgcagcggtggccttccgggcggcgggcaccacggcgggcagcggggttgacatgttattgccgcacatacaccgcctcagctcacagcgca

SEQ ID NO: 14111 - DNA, 255 bp, Homo Sapiens
gtgggtggtgagtcagagctcaggtttctaattaatgatgagtgggagagtgacaggcacaagatgactggtatagtcaggtggctcgagctgcccaggagctgggtgagaataatagtcccaaacaccttccatccaaaggtttcctgcctctgggttatttattcactaaagctattgagcagtacctgcttggcacagagcatactacttttactactagtaaaaatggccaggccaagccctgtggttcat

SEQ ID NO: 14112 - DNA, 178 bp, Homo Sapiens
ctcacagcgtaacacctgtctttataaataggatgacatgtaacttattatccacaggtggtcacttttgagaatcaaagggggtgcttttaggccaggactgttgcttgcaaactggggtgtatgattgtcctatttgtaaagaacaggtgttgctgtgaacccagagtgtctgtct

SEQ ID NO: 14113 - DNA, 1328 bp, Homo Sapiens
ggactggtctcagaacatgtatttcaactgctcagaagacaaccccagtcgagagcgctgctctgtgccttactcctgtgcttgcctactcctgaccaggcagtgatcaacactatgtgtggccaaggtatgcaggcctttgactacttggaagctagcaaagtcatctacaccaatggctgtattgacaagttggtcaactggatacacagcaacctattcttacttggtggtgtggctctaggcctggccatcccccagctggtgggaattctgctgtcccagatcctagtgaatcagatcaaagatcagatcaagctacagctctacaaccagcagcaccgggctgacccatggtactgagaatccatcctgcacctcctcaccatggaaactggcaagcctcataaacgaacagcagtgggtgctgaaagcagcaccaaatggagatttggattccagccccccagtgacagcccagtgggaagaagcaaactccagatgggcagaaggcagggtgcacaggtggctccagtctcaggaggatgcgcctcctctcccccatcccagtcctcagcattgtgccagagtgatacccttaagtgtttgggtttatgttttcagttttgtttgggaaacagcagttgcacagagagttgggggtactgctgctgccttttcaccgaggcactgccaacaccagctctagcagggatgctcctgagcttggcggaacatacttagatcctaacgtgccagtgagacctggctgtggagagtagcactgggcaggccctgcctggactccacttgggcatgataccagctccagaagggaagggagtggagcaggcagtgaggagagagcctgggggtcggctggggacagccgtatgtgctaggtaggagtggagggagatatgtttaccaaatgcctgtcctgccatcctcccaggtagtcagagtgagctacatcctgccccaccttcatttccatggaaacatggcagctaggacacggggtacaacagcagccaaattcttccacaactcccttacttcgaaaaaaagtttggaaccctggtccctatactctgcagtccagaagtgggactgagccatacatgcccttgaattcctccctgtctggccctccctctccagcaagcagggttttctttaacttggcagtgtgcagaggagaagtggtaacacccccaccccattcccctgcatcggagctcagtattcctacagggtaagaggtaggaatcttgctgggacgaggggagccagaagtggcaataaaagcgtgttgacctgggcta

SEQ ID NO: 14114 - DNA, 452 bp, Homo Sapiens
caggcggatgctggctagttatacagaggttcgcctggaatgctgtgagtattaggaggagcttcattctgaccactcagtgagacttcatgaagtaagactccaaagacaaacaacattaacatagcaacctgcaaacctcttgaatcttcagaaccactcagaagcttctgtgatgtttcaggtctctaaaaccgatcagtggagaagtaacgcttaggcgatggaaaaaatctaaagacgcagatcagaaagctggcgtctggcgagggcatgtacccacttgcataaggcggctgggggtggctgctgggcctggcacaaagccttcctggtgtcggtcgtcctgcaaggcccgccgggatgggtggctgcactcctccagcacacggacgctttactggccaggctacttttccttcagctcaaagcagctggaatcactccactcc

SEQ ID NO: 14115 - DNA, 416 bp, Homo Sapiens
  misc_feature (88)..(117): n is a, c, g, or t
actgaatatgaacattaaggactccatgaacctgggctaatgggagactacgaatttaatcaaaaaagatccaccagaggacatcttnnnnnnnnnnnnnnnnnnnnnnnnnnnnnnaaggactaatgaagctaattaaaagaagcattcaaatctgctttctaccctcattaacaattagcagggcactggccagagtttgtaccctgtgttttaccttaacaacattctatttgctctttgtatatttaagtgttgtaaggaaacgtgtttcaatcaaaactgaccatgagataaaggaaagagatgtggcttttgtgatattctatcacaaacacttattgtatctctgtaaaatacaatgtatgtatgcatgtaagtgtttttgtcctaatgttgctactcccatggcaaag

SEQ ID NO: 14116 - DNA, 337 bp, Homo Sapiens
acacacaaacaatcacacaatttatgtggtcactgagtgctctaatagtaaggagaaattaagaccagctggctgttagtcttaactctagccaagacaaaactccaattcagctacttacctagtaatgagtctcaggctgaagtctgctctctcccatcctatgaagcaggaaaaaactgaaactcatcttccctgctggaaacgagctcaaactccagaaaggagttacctgccttccatcatcatggacgcaggaaaatttgccttccttgttggaagcaagtaaaactccaaaaaaggagttgcacagcaaaataaacttcagatctcaaca

SEQ ID NO: 14117 - DNA, 343 bp, Homo Sapiens
gtaggcccgggcgccgccaggctccgcctgagcccgcacccgccatggacaactacgcagatctttcggataccgagctgaccaccttgctgcgccggtacaacatcccgcacggccgtgtagtaggatcaactcgtaggctttacgagaagaagatcttcgagtacgagacccagaggcggcggctctcgcccccagctcgtccgccgcctcctcttatagcttctctgacttgaattcgactagaggggatgcagatatgtatgatcttcccaagaaagaggacgctttactctaccagagcaagggctacaatgacgactactatgaagagagctacttc

SEQ ID NO: 14118 - DNA, 320 bp, Homo Sapiens
  misc_feature (46)..(74): n is a, c, g, or t
gaagagaactctgcacctgcactgcagggccgttctgaccaggtgnnnnnnnnnnnnnnnnnnnnnnnnnnnnncaggttggtttgtcagaggcacagctgagctgcagctggcctgtgtttctttccagaatccagagaaaatacttcgtgcaggctgaaagcagaggaggacccgctttggggccaacacaacttaaggttgttataggggaaccgccaaaggaggcctaagaagtctgcagccaggttctgctcaagaagtagcagggccaggattgaaaccaggcctttctgctgggcgcagtggtccacgcctat

SEQ ID NO: 14119 - DNA, 388 bp, Homo Sapiens
gacagactagattatatttagtaggggaaaaattgggctcaagaaccattcatcagtacgtgagacaagcagttaatagtatgatctttaaagttttgacaatataaaataaacttggtaactgttttacaaatataaaagtataataaatatgcagcccagttaaatattgattatctgtgatggtaaagaacaacagtggtgccagtcatcaaacatacagtgcgtcctattgagtcactgctaatttcttgagcctggtatttgctgcctattgtatttgtggttgttgagaggcattttcaaaccctgtataaataatccatgctgttggtcataagttaactgtattaagaacagtaaaataaataaaaaccaatagtactaa

SEQ ID NO: 14120 - DNA, 472 bp, Homo Sapiens
  misc_feature (53)..(107): n is a, c, g, or t
  misc_feature (133)..(156): n is a, c, g, or t
  misc_feature (388)..(420): n is a, c, g, or t
ctatagtcccagctaactcgggaggttgaggcaacagaaatgcgtggaacccnnnnnnnnnnnnnnnnnnnnnnnnnnnnnnnnnnnnnnnnnnnnnnnnnnnnnnngatgagagcgaaactccatctcaggnnnnnnnnnnnnnnnnnnnnnnnntgtaaggtgaccaaaatagttaactccggtgtggtccttgtcacttctcaagcaggtgtctttccagtctacaactcgttgaccacaggtggaattcataagctctgttccctgtcctgcttgggtcctccagagaaagaaatgttgaattatcatcttggtgatggtcaactctgaaagcctaaattttcatgatcaccaaagtgtttggatttaaaagggtggctcactnnnnnnnnnnnnnnnnnnnnnnnnnnnnnnnnnaagtttcagactaggctgggcaacaaagcaagacccggtctctaccaaaaaa

SEQ ID NO: 14121 - DNA, 518 bp, Homo Sapiens
aagccggctttagttacgatgactacagttcccacgtgcgcaactctgcccttggctcaaggattccgtgatgttcattttggttttctaagcgagaggctccgagccttccaacctctgactggctggtcctgtgagacccctcgatcagggatgctgctgcaagtggtcatggcagttgctgacacctctgcgaaggccgtggagaccgtgaagaagcagcaaggcgagcagatctgctggggtggcagcagctccgtcatgagtctagctaccaagatgaatgaactaatggagaaatagaaagtcttcagtgatggcctacgccaaagcacaggatggggcgggcaggaagccctctcccaagatcgagttggccgaggatggatgattgtggcagcagaagccgttgcagccccacgttgtgctctaggcagggacctttggcccctttggggagggagagacagacgggcggtttgacttggacacaaagaaagccttggaattctaaaaaa

SEQ ID NO: 14122 - DNA, 398 bp, Homo Sapiens
  misc_feature (196)..(270): n is a, c, g, or t
  misc_feature (326)..(334): n is a, c, g, or t
ctttaaggaaagttttattttactgttcattttactttcttggtaacaaaaactaaaataaggaatagaaaagctgtttttcaggctgacagtccaattaagggtagccaagaccttgcatggtagagtaggaatcatagtgtcagtgaggtcccgtgagtctttgtgagtccttgtgtcatcgttcgggcactgnnnnnnnnnnnnnnnnnnnnnnnnnnnnnnnnnnnnnnnnnnnnnnnnnnnnnnnnnnnnnnnnnnnnnnnnnnngatattgaggtcttcctagtgttacttaaattaagatcaaggtaagaaacattgtnnnnnnnnnttacaaaagtgctatttgtttcctaaaaacagtgatttctattaaaaaggtgtcagaactggag

SEQ ID NO: 14123 - DNA, 546 bp, Homo Sapiens
agtacttgcccatattctctgctttagccagagtaaacagactgatggtctgtagccaacaacttggcaacttccactccgtcgcgctcgtgagattaagggctgtgaaaagaaatctagtctaactccaacagaaatctgtctctgttaagtgttttaccttctgtaagtagagatggtagagccaagatttgtcttttggtaatttccctgtctataaagtgagaccaaagggatatctgttccctgttacctttttggagaattcataacatttgaagatcaaaaaattgaatgataaatatgaatggcttttcaattctgtggactttgtaccatttggcttcaccttgtactgcaagatgaatttgtaaacaaaacaaaattggactgtcaaaaaagctaaagttctgaaatatggaatgtactgcctctaatttttctttgtcttcctctaactggcatttttttctctcccagttttcttaagaataatgttttttaaaggaggctttttgcccatcaagaataaaaagaaataaaacc

SEQ ID NO: 14124 - DNA, 290 bp, Homo Sapiens
aatggaacattgaattttctttattgcaaattcttagggtttctgtcaaaagagatttgaaatacaacatgaaatgatgtactcacatccctcaccaccatctccaaataactgaattacataaataaaacattatatgaaaagtgctttgctacaatttatgggaggtaaatttaagaagagctggctcattgtaggaaaattcaacttatcttttcctgatccttttatttaatacagggagagaaatttatggcagttaaaaaaatctattactgtttctcataact

SEQ ID NO: 14125 - DNA, 549 bp, Homo Sapiens
  misc_feature (197)..(279): n is a, c, g, or t
tgagaccccctcttcctcatccgtagtgacagggctggcctgaccgtggagaaatcagatttgatcatgatagcttccactccgtgactggtcacgatctgccaggcgctgtgctaaaacactttcataggccttgtccccctccatcctgataacaccccagtgaagcaggccctgctcttcactccactccacannnnnnnnnnnnnnnnnnnnnnnnnnnnnnnnnnnnnnnnnnnnnnnnnnnnnnnnnnnnnnnnnnnnnnnnnnnnnnnnnnngtttatgggtttaactatcatgttgtggccccaaccccatttgacctagcctggctggtgggccttcttgcagtagcttcccctggagaagaggaaaagcaaaccttcattgagacccaagcggtctctcctgtgctctgtgacaataataaagttccagcccttggctcctgtcctgtttctttctgggaatttggggaaggggggaggtggcgaaggcagggaaagaacctgacaggcccagctgaacacccccaagtggatccaccc

SEQ ID NO: 14126 - DNA, 480 bp, Homo Sapiens
tcattacagcaggagcggggagagctttcttcactgccctgcccctaggctgaggacgactaaggccaggtcttcccaaccttggggctgtccttgtccatagcctgagtctccacccccgctccttatattcctcaagctcccctccaatccacttccctgcagcccacttccctgcacccagggaccaggacaacctgctccatacgtgagcatacatacatccttgaaatttccaaatgccaaactttctgtgtgtctctctagagccatcgaattctcctgagacacactctctgggcctggccaggggtgtgggcctgagccaggggccagtaggggagctggagccttcttggatggagccaaatttcttttgagccttggaagccttggaggaagccgccctgcagtcctggggcagagaagactatgccacagagagggcgaggggctggcttgtggtcaaaaggcccagag

SEQ ID NO: 14127 - DNA, 501 bp, Homo Sapiens
agaggaaacagaccatgtgcgctggagaaaaaggatggccagacttgcagaaacctggaattggtgattggctttagaagtggagagacaaaaaaggaggcatagaaagtgccaacatttggctacacagggaagaaagacgtaaaataataaaaacattggcatcacctgtagactcaaatcctgtgagtgaaggacctgagcaatgaaggatggattgaactcgtgattagccttcttcagcatatgtaaaatgatgtctgcttttcttctctatttgtcattttaccgactttttatatatagtagtttccccatatccatggaggatgtatcccaagacccccagaggatgcttgaaaccacagataataacaaactctatgtatcctatgatttttcctgtacatccttacctatcataaagtgagtgtataaactaggcacaggagattaaaaacaataactcataataaaatagaacaattagtacaacctaaa

SEQ ID NO: 14128 - DNA, 429 bp, Homo Sapiens
  misc_feature (110)..(110): n is a, c, g, or t
cattccaagctgtcctcttgtgtggcagccttggtggccttgcaggccaaaagagtggctagtgtcactaaggaggatcagcctggccacacaaaggatctctcggggcncactaaagagagttctaaaggtagccccaaaatgcccaagtcaccaaagagtccccggagccctctggaggccactagaaaaagtatcaagccatcggacagccctcgtagcatctgcagtgacagcagcagcaaaggctcaccgtctgtggctgccagctccccaccagcaattcccaaagtgagaatcaaaaccattaagacatcatcaggggaaatcaaacggactgtcacaaggatcctgccagatcctgatgatccaagtaagtcccctgttgggtcacctctagtgagctgcctgcaggagctccctgcgagt

SEQ ID NO: 14129 - DNA, 336 bp, Homo Sapiens
gcactgaaccgagatcccgccactgcagcctggcaaagagtgagaccctgtctaagaaaaaaaagaaaggcccctgatcattgggagcttttggaggcaccgtgacaggcagggtgccaccaagcatgtgtggcctcccaggagctaagaccccagagttcttcaggctctgctgagtgcctcccatttgcacagcctctttatgctgttaggaatgaagaaaagtctaaactgaagctgccccaggcaggaggccaggttttctgctttttgggtttactgaggctctgctttacctacagagtgtttggaaataaagagaagactggaaaaaaa

SEQ ID NO: 14130 - DNA, 386 bp, Homo Sapiens
gtaccggacgtacctagtgtcaaaaataaatacacaagtttaaaacatggacagctaagcttgtcatgacagacagtgggaatttcattccatgatgcttcatttttgcattaaatactgaagatgactcagtgcataattgctttgtggtccatgagacgctttcgtgaaggcactcctatctgaaggacaggctgggtgaacacctagcactgtcacttgagacatcttggctggtcaccaaggtgagccggcatactgtctccatcaccctctggtgagtctttcccctcaccgggtgggaggagaaggccatcccttggggtcgtggagccactctctcctcaccacggtggactgccctccccttcctcacttgctagtcc

SEQ ID NO: 14131 - DNA, 971 bp, Homo Sapiens
aagatgaggtgaaggttttccaaagcttggactgaggggcctggatcagaaagagagggacggaaagaggctgtggcaggggcctgggagagcagggaggaggggaagctcgctctggggcctgcagcgagctgcactttcagcttatttggactgtggggagcagcgccccaggtcagttggtggccgctggggaaggccctggagtggggtgagcaggctccctcctccctcttgctcagtccagagacagcatggttaaagagacagaggtagattaaaacatcgtgattaaaagcagattagttatctaggcttctcagatttaaaaaccaaacaatcgagcaatcatcccaaaaggtagcttcgtggtacctctgctgaccccacgtgtgacctgggctgtccctgtccctgccctgtccctatcgtggcccgggagagtccagcactacagggcccagccctgacagccacgcctttggctggggctggaaagaagtggaagcagtgcctggtggccccggctgaggctgttatttccgcaggtagcgctgcgccaggatggccgtgtccaaggaggtcatgggctgtgcgtcgtggcccagccgtcgcaccggtggtgcgctgccgaactgccgcttgggtacccagctccgggcgtcatggatggagctcttctcctcggccagcagcagctgctgacgcatgtagttctcaaactcgtactgtggagcactcctccgtcaccttcgcctcctgggagctatccgcattgctcatttggtcatcgaatgtcaggaaccacttgcaaaggcccactcagagacgacagggactgccatgatgcaatgatggcactgagggcctccaggacgtcggcggcggccaggcgctgctgggggtcaaggaccagcagcttccggatgagacacacggtgttctcagaaacccgtccatcctctcgacgg

SEQ ID NO: 14132 - DNA, 573 bp, Homo Sapiens
atcattaaaatagatgctcccaattcagggctcaaggcacacaagctattctccaagttgtttcctcctatagaacactccggtggctcagactgcagatgtaatgtgtttaaagttttagtttgcaatttatgttctgaatgatgcggttcagtagagaatactttagtagtaatatctgtatcattaccacagtctaacccagaagaagactgggggattactgccaacagacaatgctaccaaggtagaagaggaagaaaaactggtttcaatgtcaagccctgctacatccattccatcacctgagtcatcatcttctgattcaggtgattctcctaaagtgagcccttgagtatcttctttttccttttccaattctctagatagtctgtgaaaatggccagaaactgtgatacggtctggttcagaagtgatttcattaattcgtgtccacttagtaaactctgatttgggcgatcccatcattttagacaatacggtttttccttcagattccatgagttcatttaatggcctttgccaggggagaagaacacaactcagacctcc

SEQ ID NO: 14133 - DNA, 309 bp, Homo Sapiens
agcatccaactattactttatttatattactatgcttaagttacatggaaaaagacaacccagcagttctgtcccatctcagaaaaagtttccaatcaacaccaattatgtggtgacaaataactaggaatggtgacatctttgggccaagactgacaaggaagaatgggctctggtgctacggttcatctccaacaagaatatggcacaccggccagcacaagccatgctaacactgagcctttagcgctgggcacagattcagatctcttctctgaagctagcaaatcaagtgaaataactgggttt

SEQ ID NO: 14134 - DNA, 361 bp, Homo Sapiens
  misc_feature (112)..(247): n is a, c, g, or t
gtagaattcccagagcgcacataggtctaaggagagtcaagatcgaccttagaagagacatactagggagtcttaagattccatattctggcagggcgcggtggctcacacnnnnnnnnnnnnnnnnnnnnnnnnnnnnnnnnnnnnnnnnnnnnnnnnnnnnnnnnnnnnnnnnnnnnnnnnnnnnnnnnnnnnnnnnnnnnnnnnnnnnnnnnnnnnnnnnnnnnnnnnnnnnnnnnnnnnnnnngttccttgctgggtgggagtagagatgcggagggaactttcacttttaactctgcatatgtctgtgttatttgaatatttttttgcaatgaagccccacatgggggatcctcta

SEQ ID NO: 14135 - DNA, 833 bp, Homo Sapiens
ggcgcgaggccaggcagccgtgatcacaggtgatgacctgcaccgcgtcgtgtgggactgatcgcgggatctccgagggccgttcctcgctccacatgccccgggatgtaaacgcgaggcccctccctcctcgctggaacagcttccggctctcaagcgtcaccccaggggcgtcagtactacggactcaaggtcacctcaggaagaggcagggccaggtttctgggataggctttgacctccaggatgcgcgctgctcctgggccatggtgagctactgcccccaacctaccctctagaggggctgggaagggccgttctgggctcacctggcctgggagacccatctggtccctgcgtcctctgcccctcactgctctgtgcagatcctgtcgccctcagctgcctcctcccgagacctaatggtccctgactgggctcgacgtctgcatggcccggctgcgtgtgcattggcctcactgtaccagtggttccctctctgcccggattctgagctcacgtgtggtctttggtgcacaggggttggtcaggggccatggccaaggccctgcaacgcacgcccatccctcagatccactgtgagcaccaacctgctgcagtctcttgggcccctgctggcagctctgccacgtcaccgcctgcctggctcccacacagccatgcattgtcactctgcctccgggaccccagcttgggagctgtgggtctgccaggtcccacctcctctgtcccccatgccacaacctgggctcctggctacagcagggctccagggactccaaataaatgttcagtgactggctccaaggaaa

SEQ ID NO: 14136 - DNA, 284 bp, Homo Sapiens
ccctccacaactcccttaatctggatgcaattagaggaaaccagccaaaaaccccgcggcagctgttgccccgggattattcccagccagcgagaggcattagggcgataattcagtcattagacttctagccttcccaccgccagaacgtgcaaataggggataatcagccctgcacggccatcctcagcaatgctgcttatttaacccattttttaaaatgacacttaatgttattggctggcgtacgtgtgtgcgcatacttaaaagttgatgcgtggtgc

SEQ ID NO: 14137 - DNA, 296 bp, Homo Sapiens
gatttgagcccagagagatctaaaccaccacactcttctattaatacttctctacatcagggtaaccaattacatgcttaacttatgcccatttcacagaaaaaactaagactctaacctgacaatatcaagtagcttggagagaagggctacttgacatgagacaaagcaaggttttctggagaccaaatctcagcagtgttgctaaagtgggagtatgtgggcactcgatgcctgtggtattctctgaatgccagagccttggtaccaacaattcctcctctatccctcacctt

SEQ ID NO: 14138 - DNA, 188 bp, Homo Sapiens
ggcgttcggtcactgaggtgtagcagaggatgcgctggcggctgtgagtgcggcgacaagggcaaatgcagcgactcctcgctgttgggcaagagactctccgaagactcgagccgccaccagctgttgcagaagtgggcgagcatgtggagctccatgagcgaagacgcgtcggtggccgacatgga

SEQ ID NO: 14139 - DNA, 560 bp, Homo Sapiens
tgatctaaggatcccgcatgtggggcatactgctttctttgagtagtatctgattcttgtatagagatctttcacctctcgggttagctgtattccggtatataattcttttggtggctatggtgaatgggatggtgttctggatggggctctgggcttgatggtggtgggtatataggaatgttagttattttggcgcatggatttggtgtctggggactgggctgaagtggtttatcagcttaaggagattggggctgagactatggggttttctagatacagcgtcatgtctgcacacaggcataggtcgacttcctctcttcatattcgaatgcctttaatttcttgcctgatggctctggccaggacttaagtactatgtggaataggagtgatgaagatagggcatcctggcctggttccggttttcaagaagagtgcttctaccttttgcccattcagtatgatgtaggctgtgggtttgttatagcttatccctttattatatacgtgtatctgttggaaacagatgcatcatttcacactttagcatcttt

SEQ ID NO: 14140 - DNA, 693 bp, Homo Sapiens
  misc_feature (129)..(129): n is a, c, g, or t
cttttaaacatgctgtttacagcttgcagctgatctgaaatctggatgggaaagttctggaaagtgtattgcaccttcctagataggtagatagaaaatcgatccgggcagtaggcacgatctcccaanacctagactagcagtccaagctgcctgacatcagcagctcccaccgtggccagctcctctgcactgcagcatggcccagggggcttgaccttggctgccagcctcagtctgccctgacaagggtcttgtatccagggcagaggcctgaggtgacccaggcttgctttgtaggctgatgccagcaggcttggttctagtgggcaccactggtgggcaacctccataactggcccttaggccctaccttcctacacagctaggctataatgggcctgagtgagagggtagcttccccagccccaagcacaggcagaggggtggagagcaatttttggttttatttttgtttctgaagtggtgcctgtacctcccagccccagggggccttccctggccacacttctctgccccacccaggcatcgccatcccagcactttgctccatgtcacccgtaagatgccctttgctgaatgtacctgagtgtatgtatttaaaaggactcacatgggcatcagagaatttatggctctgtatccaataaaaaagatggtgaaactggtcaa

SEQ ID NO: 14141 - DNA, 276 bp, Homo Sapiens
ggtagtgcaggctgcttgttcagctagaaagaggctgttatgcataggatggttgtattctctgccacagttgtccggagagaaataagaagccaaactccaatcagccttttacctgcaaagagtgaagggtgagaaggtggacaaagacatagattagaacaaatactggatattgggggaagttagactagaagtattattatacagggtgattcttacgaaagaagacccaatcataaattataaataaactttttatttagctattaattg

SEQ ID NO: 14142 - DNA, 606 bp, Homo Sapiens
  misc_feature (492)..(492): n is a, c, g, or t
agcggaggagcaggcgccggagatgatgactttgaccagtttgataagcctggcgcggaacggtcgtggagaagaagagctgctgatgaggactgggacagtgaacttgaagatgatttacttggagaagatttgctatctggcaaaaagaatcagtcggatttgtcagatgaagagctaaatgatgatcttttgcagagtgataatgaagatgaagaaaatttcagttctcagggtgttacaattagtctgaatgctacatctggcatggttacatcatttgaactctctgacaacactaacgaccaatctggagaacaggaatctgagtatgaacaagaacaaggagaggatgaactggtttatcacaaatctgatggatcagaattgtatactcaagagtacccagaagaaggacagtatgaaggccacgaagctgagttgacagaagaccaaatagaatatgtggaagagccagaggaggagcagctntacactgatgaagtgttagacatcgagatcaatgaacctttagatgaatttacaggaggtatggaaacattggaacttcaaaaggacatcaaagaagaatcagatgaagaagaa

SEQ ID NO: 14143 - DNA, 458 bp, Homo Sapiens
tggtggaagatgaatcaaggaagcagggccctgtcttatgggtcacatgtctttggtgagtgagaagacctaaactcctggccatcatctcttatccaatacttagcagttggggattaaaccatccttgccttcagttctctccaatattaccaggcccaactcagtcttcagtgattttaaacagcattgacatcatctgtaaaaccatcatctgtaaaaccatctatgacatgagttttgagaaacaataatggggaaaatatttgggaccaagctgaagcactaatcccactaagttaaagacttctttccagtccaaggcaggcctgaatcaactgtctttaaataaaattttaagtgatgctgtattatatataggaaaaaatgcttaaaatcctgtcatttagaacagtgaaaagtatcttttgagattaaagtgactctttactgtagga

SEQ ID NO: 14144 - DNA, 582 bp, Homo Sapiens
  misc_feature (444)..(444): n is a, c, g, or t
tttaagaggaaaagtttcaagtcggctgacttccctacccggcgcttcaggcgccccctctccggggccgcgcgggcgcagagcgggaggggcgcgccccctcctttgtcagcctcagagcgcggctgtgacgtcactcattccactccctccggggttcttgttgtcatgttgttgttttttgttgggcaggaaggcgggctcgactttctctttttgccagcgggagctgaagcccgttcttagcgcccgggccgcggtttccatcttgagctggcggtctccttgaaacttccccaagtgtctgcacaacttaccttttcccgacttctcttcgacactcggctcccttcggcaaaccgggcaggccgaggacattagaaatttgggacgcacagaatgttcaagcctaggattttatgttgctgttttttttccagcggngcgtagggtggggcgcggtgctggggggactagggaaactttttccccaggaggacatggtctggcgggcgcgagcgcggcacaatttagtgcgtcgcacgcgtcgacactcgcgctcgctttgcagccggcgctctc

SEQ ID NO: 14145 - DNA, 574 bp, Homo Sapiens
  misc_feature (463)..(517): n is a, c, g, or t
gcggccgccagcgccgagtgccagaactacgccaaggaggtggcaggggtgagtctgccccccaaggagtgcagcccctgcccagcagatctgcggtcctccctgagctgcttctcctcagccctgtgggagcagctctcggtgacataagccttgaagtccgagtcctcaggcgtttgcccgaagcctcacaggcccctcgttgggctgtgaggcctgaggtgtctctcagggcaggtttcaaaaaggcagcctcccagccaggacaggggcagagccaggcagccctgccccgagggaggcgtttgacgttctaggttatccctccgcaaggggattctctgcctggcttgctgatgtcatatctggtggggagtggatttagatctgacactttttctgctcttcagaagcagaagcacaagcccagtatcccaattctggtttaatctcaaacttttgnnnnnnnnnnnnnnnnnnnnnnnnnnnnnnnnnnnnnnnnnnnnnnnnnnnnnnnattgctcgaggcagaaatttgagaacggcctggcaacatagcagaccgctcggtacc

SEQ ID NO: 14146 - DNA, 487 bp, Homo Sapiens
  misc_feature (60)..(60): n is a, c, g, or t
ccatgagccaggaatttccccttagggatagagttaatataccttgtgtttcccacaatncacagccactgtgacttttcaggagtttcgatacgatgaatttgatggctccatctttactatacctgatgactacaaggaagacccaagcccgttttcctgatctttaactgacgtggaaaaggatgccgtctaaccaaggaaagaaaatacagagaccctagaagtggatccaaatagaagggacaaatgctttcagtgaagaaaagggaattacacattgaatccgacacatcagtaataccgatacagtgaaatgggcctctaataagaatttcagcgagttttctgatgtgccattttttgtctttttaaaaatatacatattataaatgtaatagtttgacacattaatgaccctaagacctgcgtatgtgaagcagctatgagtgctgtgatttgtttttaaaaatttttacacttcttg

SEQ ID NO: 14147 - DNA, 266 bp, Homo Sapiens
gtggtatatgtaaatatgtccctaatatgtatttgcatttgaaattttgaaatcctgctctatgaacagttttgtattagactttttaaatcttgaactttatgaacattttctgaaaatcattgattattctacaaaaacatgattttaaacagctgtaaaatattctatgatatgaatgttttatgcattatttaagcctgtctctattgttggaatttcaggtcattttcataaatattgttgcaataaatatccttggaccc

SEQ ID NO: 14148 - DNA, 336 bp, Homo Sapiens
atcctggcagcttggccactggcccggctcctgtctgaccaggaaaggcatcaaagccggactcggatggaggctggaaaaccccgagacttctgctggactcgacccagccacacaccaggctgtgctcaaggccacggaatgagccttgaccctggccccagacggagccctgaccttgctggtcacaggctgagccctgctggcaatatgatgtactagatcccttaaaaggccttccagcaacaaccaacttctggatgaattactatgagcgtacatttttaatagactgttgtgtttccaagaaagtaaatatctccgagtctcccccaa

SEQ ID NO: 14149 - DNA, 378 bp, Homo Sapiens
tagatgacctttaagcttgctttcaacctggcattctggagttattagcttttcagctgaggtttttattaaatggttttatttgtcatcttctgtctgcccccttgtggacattgttttgggaagaaaataaaatatttaattgctcgaagaacaatataatgaccatctcaccctccaaaaattcacttgcatcacactgtttgttttcagttattcatgttcacttctagtcgtcgttcataaatgtacatcattttacatggttgaatcatatcagggacataattttgtactttcccccctccctgataaagatgatgtttttacagtaaaataaaaaaatgcttgtgattcaataagcttttaaaatattaa

SEQ ID NO: 14150 - DNA, 509 bp, Homo Sapiens
  misc_feature (201)..(201): n is a, c, g, or t
tggggacaggttggagctgctctggggctcggcgctgggggacaccagccccgggggcgtggacgactcatagccggagctggcggccggggaggattcagagccctgcggggaggactcatggacctgcaagacaaaagccgggaggggggaccagaggggactgggtgtgagtgcagctgctgtggggccgggccccgngggggagagcacccccagaaatgttccccccgccgccctggcccctggggaccctcccaggccggctgaggtggtccgggccagtgctgcaccggcgcctcggcctgcctcgccctcctcccggccgccgcgggtggtacctttcatgtgcttccgcagcgagctggggtgcgtgtaggacttgtcgcacatcttgcagagatagggcttatcggaggtgtggacgtgcatgtgcttcttcctgtcgctgctgttggcgaacgccggtcgcagccctcaaactcacactggaacggcttctcccctgt

SEQ ID NO: 14151 - DNA, 677 bp, Homo Sapiens
ccccaggacctgagctcccagcatctgcagacgacccccgcagcatttccctcggacccccctcgaagccccctggactgattcccacccacgactcacaggcattcctcccacagccctttcatttcctccccaccccactccccaaatacagaggtctgctttgaagcggagaccatttccaggccttattgagaccagaccccaagtcccccacccccatcctgctccagcgtttcctctaacagggaccagctctccgctttgcccccacggggttcctctaaccagaaccagcttcctagcctcgtagagaccaaaggccgcccccgcctgctggggttcctcccagcaccccagcttgctggctgccctctttgccttctggcctccagctgggtgtgggggggcggagcaaggcgggggacagacgcagcaccttcttagcgatctaggcctggcaagagctctggccccaaggcctcctcttcccaggggctgccaagtcctggccctggccctggcatatcaccccgcactgtggggccaggcaccactagcctggctcaaatattccccagggagactgctgtgtgctgcccgcctgcctgctggctctcccccagccccacatcccctctggaagagaatgtaaaataaacctggacacaagggaa

SEQ ID NO: 14152 - DNA, 1173 bp, Homo Sapiens
  misc_feature (1100)..(1117): n is a, c, g, or t
gcgagtgatagacagccaagcagagaaactgaaggagcttgacaaggagatccggcccttccggcagaactgggaggaagcagacagcatgaagagcagcgtggagtccctccagaaccgcgtgaccgagctggagagcgtggacaagagcgcggggcaagtggctcggaacacaggcctgctggagtcccagctgagccggcatgaccagatgctgagtgtgcacgacatccgcctagccgacatggacctgcgcttccaggtcctggagaccgccagctacaatggagtgctcatctggaagattcgcgactacaagcggcggaagcaggaggccgtcatggggaagaccctgtccctttacagccagcctttctacactggttactttggctataagatgtgtgccagggtctacctgaacggggacgggatggggaaggggacgcacttgtcgctgttttttgtcatcatgcgtggagaatatgatgccctgcctccctggccggtttaagcagaaagtgacactcatgctgatggatcaggggtcctctcgacgtcatttgggagatgcattcaagcccgaccccaacagcagcagcttcaagaagcccactggagagatgaatatcgcctctggctgcccagtctttgtggcccaaactgttctagaaaatgggacatatattaaagatgatacaatttttattaaagtcatagtggatacttcggatctgcccgatccctgataagtagctggggaggtggatttagcagaaggcaactcctctgggggatttgaaccggtctgtcttcactgaggtcctcgcgctcagaaaaggaccttgtgagacggaggaagcggcagaaggcggacgcgtgccggcgggaggagccacgcgtgagcacacctgacacgttttataatagactagccacacttcactctgaagaattatttatccttcaacaagataaatattgctgtcagagaaggttttcattttcatttttaaagatctagttaattaaggtggaaaacatatatgctaaacaaaagaaacatgatttttcttccttaaacttgaacaccaaaaaannnnnnnnnnnnnnnnnngtggggatagctggacatgtcagcatgttaagtaaaaggagaatttatgaaatagt

SEQ ID NO: 14153 - DNA, 199 bp, Homo Sapiens
ggcatatacctttttaaagactgtaattagtgcagtaacagtggggttttttttgtgcaactcttctaaaaacattcataatgcagtcatgtttatttttttctgttaaaatgtttttgacagttttaagagcagtcttttggctctgaccatttcttgttctgtttccaatgaaatcaataaccaaaaagaagtgctt

SEQ ID NO: 14154 - DNA, 703 bp, Homo Sapiens
  misc_feature (663)..(663): n is a, c, g, or t
tgatttgattgatttatttgcttagagtaataaaagcattttgtgcattcaatcttacaatagattttatctgatctttcactgtaaggcttatgtgtattttccatatatgtaaaacatacacatgtaaaatatatgtggccataaattaggcaataatcatctaaataaaaattatattggcagctaagctgcactgaatactcaacagaaatagtagtgatcaaaagtctgagatttaaattgcaatccaaacatattctatcatcaatcaatcaatggagattaactactgaagataccatttctcactgggttttagaacactccgcactaaggttaaggcttcacaaattcacttttaaaaacttacttgcaaatcaaaaccaaatataaatattatggcttagctgtgggaacagccagttttttatatgcgaatctgtcatggtaaatatactaatgtatttcacagttagttagttagttagttatgtccttaagaaaaaattccacgcactcttattattttcttttctcttccaaaaagaattccctggcagagaatctatcattccaaaaggtaacctgggtaccagccatccctatatggaaatctcaggcaaactagaaaccctgtgtctggcttcccactttaaaagnactgtcacttcatcttcatgacaagagtgccaaagtcatg

SEQ ID NO: 14155 - DNA, 993 bp, Homo Sapiens
tttagatcaacatctcaaactttataatacactcacatttatacgcaaatttctgtttacaagtacaaaaggcaaagaaacacaaagaagctaagcaactgcatcatcagccacattcaatcgaattaatactgttgtccccagtccgtagttttaatccagaggaaatggtagatgccatttcacacatggactccaccgttagttttagaagttggagactgtgtgtggttccgcagaagtctgggtttctacagagctgaactgagactccatcgtgttccaggccagatcagccagaagaaagtcatccattgctgtctgagtttcgttgctggtgaagaacaagctccccagggtttcaaacccagaactcatggtctgtgttttctgtactgttcaactgaactttgctttctagagcaggtatatttttagcagtggagactccttcagtttgggtctctgtgtcagatgaatcagtactcacggaaaagctggagtgttgtcagaagtacgttgcccagaggcagagtgagggctagctgtctaagaaagagagtttaagtgctgtgctgtgtctgtgtgtcaaacatgctcaaggcctaagaagttagaatttcccctacagcccataggactgagcagaggtatctgcgagtaagaagtccgtttgagtctctatgtccagtgactccaagactggctcggtggtcatggtgctaagttcactctcttcagtttgagtctggatatttgaggccgaaaagaactcttcgatatcaaaatcgattccggggttctgggctgggccagatgggagctgggtgtcaggtccaggatttgtgtcagacataagactacgatgatccatgtctgggcaggcagattacttgacaagatgttttcccaatcacttaataaatctatgcctttgggtctgattatctgtcatgttctgtgaaggaagcatactattctgtgcactgaaaa

SEQ ID NO: 14156 - DNA, 833 bp, Homo Sapiens
  misc_feature (645)..(741): n is a, c, g, or t
catgtgggcatcacggtgttctgggcccgctcactcatgtgatgcacccgggtgtagcggatcgtgaaaccttgtttggtaatgtattccatcaggtggaccctaagagaaacttccgggtgataatcacagggtccaaaagtaaaggaaacctggcagtctctggtgtccatcatgtgcttattccactgggtaaaataattggagatgccttctagtaaggaatggaccttagtggtgatggttagttgcgttatgatgacagccacggggttggagtacttagaaagcttccgagtactagacagctccacaacttcttcaaaagtatccatgggatacaaaggcttaggatcattgagacactgaatcaagggctcaatctggtaaaaatctgcttctttccgaagcagatcaaattccttaaaatccaacggtaaggtcaattctgaagttcttaagaagtcgaggacatatcggaaaagaggtccatctcgatcaataaagtaattgccttgagggtctcgagctgtggggaagtcccccccaaaaatagctccaagcatggaatccgggtaacgcgtcaatgtggtgagagacgttgtatacaagtgtccacctacatttaatgtgactgggtcagtnnnnnnnnnnnnnnnnnnnnnnnnnnnnnnnnnnnnnnnnnnnnnnnnnnnnnnnnnnnnnnnnnnnnnnnnnnnnnnnnnnnnnnnnnnnnnnnnnatatagccccagtctccattatccatctgctccagtgatgcgtcttcaagagcccaggtttcagggaaatgcgcggcggcggcggctgctgc

SEQ ID NO: 14157 - DNA, 494 bp, Homo Sapiens
tgggcaccacaaacttccccttcctccactgagaagactgtctctcccgcaggaccctgaattattgaaatcgaaggctgacttcctttctgcagtgagcccaggggctaatgttattatcctgtcacacttgcaactagtgacttttgtttagtgatagaagatttggggaggacccaaaggactcagaactttctctccatacctccttttactcttttcattctgtgtaatgtatcaacaactgtttaatctcccttctaacaaaccttgatataagctttctgatatcaaagtatattgacagttaacccttactgattttaaacttgactatccagtctgttaattacctaagattttgtgttcatttcatctctaattgttttgatcattggcagagaaagagtatttgaaattcatatcagttttgctccttattttaatctctttgaattaaaaataaaactttttcaaaatggaaatttgaaatt

SEQ ID NO: 14158 - DNA, 585 bp, Homo Sapiens
tagaggatccccgatgttgggctcacttgggggcttgtgggtaggggtcctattgtgcttctaactgaggcagtggcagctgtggtggtctgcgagacaggtgtggctctgaccaggagagtgacgacgtgggcacacaggagcaggacccacaaagggctgaggtctggtgtccagttgtgtctcatggtcatgatgcatgcgtcaggagctggtgagccgggctctttatctgtgaccaaggtcctcttctctggtgaaaggtgggggaggagaatggtaaaccactcccgctttttctcagtagctggcttttcctcagtagctggcttctcctcccgtagcatagcctgaagctctttcagcacttagaaacagagctgcgggggtcaagtgacaatccttccccacccaagctctcatgaccacaaatggttgtaagatgcttaccttagtccaatcttaccccttcattagggaaggcaaaatttgagacccaaagagagacatatggactcacccagtcacaccaggaaggcagtgctctcttcagcaccaagagctgcttctgggaagggcagtgat

SEQ ID NO: 14159 - DNA, 447 bp, Homo Sapiens
tagaggatcccccaccactcctatagatcagtcaatcattgttttttgacttcatttattatataaggaacctaactcaaattggcttaagcaattaataaatgtttattgttacattgttgtaatgtggctggaaatccagaagtcatacaaattgtcaggattggttgatacagtggcttaatgctatcaccaaggaccaactctccattccctttgatgttggtggcatcttcaggcttgctgcaaaggtgactgtagcagtttgaggtgtcactgtctgaggaagagggactgttttttcctccatcatttttaggattgaagaaccttttctcacagttctcttttggaggctgtccagggggcttctactcacatctcatggccattcctaaccaatcattggcaaagagaatgggttaaaactgatctataggagtggtg

SEQ ID NO: 14160 - DNA, 425 bp, Homo Sapiens
  misc_feature (55)..(55): n is a, c, g, or t
  misc_feature (409)..(409): n is a, c, g, or t
gcaacaccaaggtaggagagggaggcgtggtcctgattaaaaggtggggcagggncaagaaggaagacacagaagtggaagcacacacagggcgaggcctagggcagtcctgatgagtttctgaaaagaggccagccatcaggctatgccacactctggctacagtgcgactaaaatgatctgtgtaaataaaagagcattttattgggcaaatttatgcacatcagacttcataaagaacactttcagcaaagatcaagtctcatctctatgattatcatactccccctaaaaaactaagcagtacgctttcaaatttgtgttaaacatgcccggcccatgtctcacgcctgtaatcccagcactctgggagccaaggcagatggtcacttgagtcaggattcgagancacctgccaacatgtc

SEQ ID NO: 14161 - DNA, 699 bp, Homo Sapiens
gcacacaggttttcatcctttcggccagctaaataaagacatgacctatgcgcagttgtactccttcctgaactgcctccaggtcagccccttccacggctggatgtcttccaacaagacgttgcggactctcacttcagagagagcagagcaactctccaacacactgaaaaaaattgcagccagtgagaaatttacaaacttcaatcttttctacatggattttgccttccatgaaatcatacaggagtggcagaagagaggcggacagccctggcagctcatcgagcccgtggatggattccaccccaacgaggtggctttgctgttgttggcggatcatttctggaaaaaggtgcagctccagtggccccaaatcctgggaaaggagaatccgttcaacccccagattaaacaggtgtttggagaccaaggcgggcactgagcctctcaggagcatgcacccctggggagcacagggaggcagaggcttgggtaaactcattccacaaaccctatgggggctgccacgtcacaggcccaaaggactcttcttcagcagcatctttgcaaaatgtctttctctcaatgaagagcatatctggacgactgtgcaatgctgtgtgctcccgggatcagtaacccttccgctgttcctgaaataacctttcataaagtgctttgggtgccattccaaaa

SEQ ID NO: 14162 - DNA, 748 bp, Homo Sapiens
  misc_feature (279)..(279): n is a, c, g, or t
  misc_feature (298)..(298): n is a, c, g, or t
gtcgtccccggcaccggaagtgaccctggcgggttgtcttcaaatctcggcgagcaggagccgcgccggcaggtggtgttgacgatagaactgggcagtactggggccgtgagcggagagcaaagtgggctggactgggtcaggccctccttcctcgctgccgggatctccactccgccaatcccctgtgcctggcgttgggcggtttcccgaggagcttgggccgccgcagcttacagttgaacatgagtcttcttatgattagtgagaatgtaaaantggctcgtgaatatgcatngctgggaaactatgactctgcgatggtctattatcagggagttcttgaccaaatgaacaagtatctgtactcagtcaaagatacatacctccagcagaaatggcaacaggtttggcaggaaataaatgtggaagctaaacatgttaaagatatcatgaaaacacgtagagagctttaacactggacagcactcaccttgaaagcgcgcacacgcatgaccttccagcttctgagggagaagtctggtccatgcctgtacctgttgaacgaagaccctcaccaggacctagaaaacgccaatcttctcagtacagtgaccctaaatcacatggtaatcgtccaagtacaactgtcagagttcaccgttcatctgcacagaatgttcacaatgacagagggaaagctgttcgtagtcgtgaaaagaaagaacagaataacggaagagaggaa

SEQ ID NO: 14163 - DNA, 630 bp, Homo Sapiens
ccatgtgggggctcactgaaatacgacctgtctaggaaggacagtggcccaagcaccgtggtagaagatacacaggaaaaagaaaatcagcctgcaccccagcatcagatcatggtgaaccactttggccaacttctagccggtcgatggtaaacaggtccaaggaagaagtcacctcacacaaatatcagcacgaaaaattcatttattcaagtgcaaagggaagaaaagtcgtcatcaaaaagaggattccctttctgggagtaatagtgcttatttatcctgggatgatgatgctttcacggctccatttcatagggatggaatgctgagtttaaagcaactactgtcttttctcagtatcacagactttcagttacctgatgaagacttgggacctcttaagcttgaaaaagtgaagtccggctcagaaaaaccaggggagccctttgagtcaaaaatgtttggagagagacatcttaaagagggaagctgtatttttccagaggaactgagtcctaaaggcatggatacagaaatggaggacttagaagaggaccttatggttctaccagtgaaatcaaatccaaaaggcgaagtgcaaagcagcataaaagagggctttttcat

SEQ ID NO: 14164 - DNA, 489 bp, Homo Sapiens
cgtaaatctgtattcagacttctggactcgagacacgtagatccacctggtggttcttcagtcattttaagcccaaaactcaaaatctcccgaaatcaaaatgtttaaacttataatctccagggtgtgactcacgggggatgaggggagcaattctctccctccccgcattaaagctggttctcctgtctgctcattgaacggttccactgcgcatcacagcatctacatccctaaaccaacaccccagcattggcaacagatatcttcatcaccattggctgcttcaggacagggaagaaacatgcttgcccttttctgactctttagtaactctggccgaatctatcacattattttacatctctttacatctggactactccccgatcttggctgtgtgttccctactggcagtgatttttgtttattcattttggtaaactgacacttagttcagtgtccaatataagctcaacaatagtttat

SEQ ID NO: 14165 - DNA, 365 bp, Homo Sapiens
aagtaactggtctgtaagggcatatctctaaaacgtccccgcaaatgaatgagggccaggggccttggcagaggcaggtgtggcctcataaaggcagtgccggccgccccagggcatcagtgctgatgtgggagctgtgcttccacctaagccgttggtaggggactggggcatttaaaaatgtaaagagcgcatcctttttgatctcctgggcggagtgaacctgcaggggccaccccaaaaaccttggttctgatgcactgcaagcaagtaaccagcttctcactcccagtttcaaggggctattatgtaatataaattcaaagcacattgtgaatagaacctacatgaaaacatacactttg

SEQ ID NO: 14166 - DNA, 350 bp, Homo Sapiens
tgcagtaagtaactcagaatgactttactcaggaaatatgaccatgactcactggctaggagtgccccatgcccagttcttagagacccttgatagctcctagaagacaggaggctgccgtggtcaagaagggccaagccttgaagtctcacggcaccccctgtggtggaggtataaggctcaggggccaactactgggtcttgcagtccccatcgttgctgtgggctgtcttcaccttctttagttccttctgtagctcagactcggccaccacaacctcctttggcttctggtaagagatgatcagggtgcagttggcgtgggcaaagctcagcgaggcgtcatccag

SEQ ID NO: 14167 - DNA, 611 bp, Homo Sapiens
  misc_feature (561)..(561): n is a, c, g, or t
tcggtacccgctgcccctgaagaaggaatgagtagcgacagtgaccttgaatgtgacactgagaatgaggagcaggaagagcatacccgtgtgggcgggtttcacgactcctccatggtcatgacacagcccccggatgaagatacacattccagttttcctgatggtgaacaaataggccctgaagatctcagcttcaatacagatgaaaatagtggaaggtaattgcccaatcaagagaacttgacgtgcaagctaccttgaccctgaattttgctgtagttggtgctcaaagttgtcatcagtcagataatcagatttggtcttatttcttcattatctcgacctgaaatagtaatttggaaactgttggaaggtgggcacagtttagtctaagacagcagtagtacatgggaaaaacagtatgggaagagttctttgtaatgtaaggagataacaatgtagttctctagtaatttagcaaatgttgtacagtcacaaaaggcagcttgtctaatacagcagaaggctggttaactgccagaaaatgtacctccaggncctgcatgccgtcagtaacccgcccggcattggtgctctactgtctttgg

SEQ ID NO: 14168 - DNA, 509 bp, Homo Sapiens
  misc_feature (335)..(335): n is a, c, g, or t
atatctccgcctatattgggatgtgacgatacatttacacagaacgctatgactgattcaatttatagactcctttaggaatttgccccgagcccagaattcgcacggggagaaaaaggcttttcgagtgtgggacaaggtctgaatgtcagtgaacggaactgaaggagcaagacatggagcctggcctgtgctaagcagccaccatctccggatggcacaggctctgctaggttccggacacaggcttctgggggaagggtctcccttggccatcacgggaatggagtccatgctagaaagagctcagtgttgggctgggtttgccagtaganacactgcgttccagtcaccccagtcttgccagaagaaaccagcacctctttcccgtggctcctgtgttcagaatgtggtattggctctggcccagccttctcccctgttacccataattcttgcctctttccataatccgtggtttcagtttgactttgtatataaagttgggg

SEQ ID NO: 14169 - DNA, 289 bp, Homo Sapiens
agctgtcaagctgccctgtgttcatttcatttggaattgccccctctggttcctctgtatactactgcttcatctctaaagacagctcatcctcctccttcacccctgaatttccagagcacttcatctgctccttcatcacaagtccagttttctgccactagtctgaatttcatgagaagatgccgatttggttcctgtgggtcctcagcactattcagtacagtgcttgatgcacagcaggcactcagaaaatactggaggaaataaaacaccaaagataaaaaaa

SEQ ID NO: 14170 - DNA, 146 bp, Homo Sapiens
tggtttggtagtttcttaaaagtgaaaattagacctaccatgtgacccagccattccactactaggtgtctacccaagaaaaataaaagcatgtttccacacaagtacttgtatacagatattcatagcaactttatttgatagcc

SEQ ID NO: 14171 - DNA, 325 bp, Homo Sapiens
cgggcggccgggcaggggaaggggcctggccgccacctgctcactctccagtccttcccacctcctccctacccttctacacacgttctctttctccctcccgcctccgtcccctgctgccccccgccagccctcaccacctgccctccgtctaccgggacctcagaagcccagacctggggaccccacctacacaggggcattgacagactggagttgaaagccgacgaaccgacacgcggcagagtcaataattcaataaaaaagttacgaactttctctgtaacttgggtttcaataattatggatttttatgaaaacttga

SEQ ID NO: 14172 - DNA, 449 bp, Homo Sapiens
gaaaagttgtaactttaaaagagaaaaaaaattacaaacacctgtttccaaaccttgacagaaaactactttgagtctacaaagaggaggcgacaagtccatcagcagaaagtcacctgtctacatagaccaaatggagcaccaaggccaagcggacagaggggccatgggttgtaggattgaggaacggaatctgccgactcacatgacagcccattctttctttctgggtgatctggggatcacgccttgcccaagtgtgagattacctttctgttccttgcagttcacctcactttccgtcctttgtagagcagtggtgtctccaatgaacttgtttcctggttttgcatcttgtgaaatgtttttttgtatttttgttgaaggttaaacatttgtataaattgtaaatatatttggtttattacagtaaaggctttagtaccaat

SEQ ID NO: 14173 - DNA, 481 bp, Homo Sapiens
ctttggctcttctaatcagagcgcaagctgggagcacaggcactgcaggagagaatgcccagtgaccagtcactgaccctgtgcagaacctcctggaagcgagctttgctgggagagggggtagctagcctgagagggaaccctctaagggacctcaaaggtgattgtgccagctctgcgcctgccccacaccctcccttaccctcctccagaccattcaggacacagggaaatcagggttacaaatcttcttgatccacttctctcaggatcccctctcttcctacccttcctcaccacttccctcagtcccaactccttttccctatttccttctcctcctgtctttaaagcctgcctcttccaggaagacccccctattgctgctggggctccccatttgcttactttgcatttgtgcccactctccacccctgctcccctgagctgaaataaaaatacaataaacttactataaaga

SEQ ID NO: 14174 - DNA, 394 bp, Homo Sapiens
tttatctaaaatgagatttattgcatttcatgcagcttgaagtccatgcaaaggagactagcacagtttttaatgcatttaaaaaataaaaccgaggtgggcagcaaacacacaaagtcctagtttcctgggtccctgggagaaaagagtgtggcaatgaatccacccactctccacagggaataaatctgtctcttaaatgcaaagaatgtttccatggcctctggatgcaaatacacagagctctggggtcagagcaagggatgcggagaggaccacgagtgaaaaagcagctacacacattcacctaattccatctgagggcagaacaacgtggcaagtcttgggggtagcagctgttcccagagtcaagaaataccgtacacccctgggg

SEQ ID NO: 14175 - DNA, 136 bp, Homo Sapiens
aattaatatgtgtgcattgttacaatgtatgttggatgtcttttgaccctaaatgctttttttgttatcagagattgtgtactatttttatttttaataaatgtatcttccctttccttgttttagatttacaaaa

SEQ ID NO: 14176 - DNA, 780 bp, Homo Sapiens
  misc_feature (563)..(575): n is a, c, g, or t
cagctacattgtgtcagggcaaggtgaatgactggccatgcctatagatgctacacagcctggagcagagttaaaggaaaccaacatggaaccttggcaatggagacagtaggactttccaattgatgatgactcatgttactctcacaaggtaaattgccaaaccacatcacccttatcagtcaaatgtatggggtctccaagaaatgaaaagccctatgcccacatcatccctccaggcacttggactttccctttacgtggactaaaggggtcacttggatggaggccataaagctggtgaaatttagcaggacccttccaagtcacatcagcacctccagctatcagggaaagaaaatgaaaagtagatttctgtctgtggatcttatttgagagatgaggggcagacattctggcatcagaagagtaagagctctggatttcaagagttaaactcataatctcataccaggagactgtcctgagctcaaacctgtctcctgcaagcctcctcctttccccagagagttgtgatcaggattaaaggagagaattaaccnnnnnnnnnnnnngatattttaggtaaatcattagcaatatgctgcttcttgctagagcctgcttccccaaattatatattcgatatgtgcttgggtagatgtcagtgccaatgcaggtgcagggaaggtgctccaacacacataaaaaagaaaagtcaccctttattccttcttattgcagactgtaaaatatttctcaactacacttgttataatg

SEQ ID NO: 14177 - DNA, 531 bp, Homo Sapiens
  misc_feature (55)..(194): n is a, c, g, or t
tgcatggtcttttctctgtgtgcacatgactgtgcaggactggtgtcccgatttnnnnnnnnnnnnnnnnnnnnnnnnnnnnnnnnnnnnnnnnnnnnnnnnnnnnnnnnnnnnnnnnnnnnnnnnnnnnnnnnnnnnnnnnnnnnnnnnnnnnnnnnnnnnnnnnnnnnnnnnnnnnnnnnnnnnnnnnnnnnttagtggtaggggttaaggggcacgctttagactacaacactccacagtaaagaattatccagtctaacatgtcagttgtgccaagactgagaaacctgtaatgtaaaggaactcccaagtctacctgaaaagtaaggtctaaagagcatttattgagcactatctgttagcacttagcatatgtttaatattcatacattgaaagaaatgtatgttcatatccatctgacaaagattaaggaacttagagtaagtaatagatccaaaattgaaactgataaacttctggttctaaaattcaccttttagtgaaaatacagtttctccccaaaaaaa

SEQ ID NO: 14178 - DNA, 759 bp, Homo Sapiens
acctctcttcactcacagaggtcacatcttcctagatggaaatggatggaccctgctccttggtcaccacccacacctggcatccctgcagaccaaggactttgttatcagcaacaaatgatgcctctctgcatgtgtgggactgggtggacctttgtgccccccgctgacaccagcatctttccatctaggcctctagaaaggggaggagctgctgtagtagcaagggtgctgatgtaggactcaagtgactaccagtccctgttaccagctgtgtggccttgggcaagtctgccagcgtcacttagcctcagtttccttatctgtaaaatgaggatagtaagaactacctcgtagtgatattgcgaaggttagaagaaacgcatggcataattacttggtagctattgttagatctgggagtgtgaaatggtagcgttttgtccctgtcttcacactatcatagggagaatcaaaagagctaacaaatataaacatgctttgtgaatttttttaaagaaaaaaatgtagaggggccaataaacatgaaaaaatcccagccctagtagcaattaaggaaatagcaaaacaggatttctgctcctcttgagtgggtctcatgggaacacaggtgcactttcccacacttgtccccccaggtgactaggttcaagagacatttgcttttggtggccccacaaacatttccttttgagggcccatagtgaatattaaagtgtgctggacatggtggctcat

SEQ ID NO: 14179 - DNA, 553 bp, Homo Sapiens
gcacgagcccttctgccatctaggcctaagggtaagcagtctcagtcctgcaccatgcacatgttgaggtgagcaaggctgagaggagaggcttgggcctcagtttccctctgtgaagtggggggaggcaggccttcaaggagggatagaggtacaaggcttcgtctcatctgctgtctgagcatccaggcccaaaggcactgagggagtcaggagctggggctcggcacatgcagagatgacagggcagggggcagtcttcctccccctccccgaccaaacctcggggagccctcctgtgcccctccctccttgttgtccagtgctgggttccccaccccgaggtcaggctgcccaatcctctgactggatcaccgggggcttcttgcctcagttcttccctctgagcccccaggccctcccgcatctcaggttggggatggggacatggagaggaaggggccgcctactcctgcaaatgcttgtgacagatgccaggaggtagatgtgtgctggccaataaaggcccctacctgattccccgcaaaaaaaa

SEQ ID NO: 14180 - DNA, 1282 bp, Homo Sapiens
  misc_feature (1227)..(1235): n is a, c, g, or t
cgcgcacggatcatggccgcagccgctctggggcagctgtttgagggcatgaaggcgggcaaaggcaaagaccagcaggtgcgcctcttccgcccctggctcaacatggaccggatgctgcgctcagccatgcgcctgtgcctgccgagtttcgacaagctggagttgctggagtgcatccgccggctcatcgaagtggacagaggactgggtccccgatgccgccggcaccagcctctatgtgcggcctgtgctcattgggaacgagccctcgctgggtgtcagccagcccacgcgcgcgctcctgttcgtcattctctgcccagtgggtgcctacttccctggaggctccgtgaccccggtctccctcctggccgacccagccttcatccgggcctgggtgggcggggtcggcaactacaagttaggtgggaattatgggcccaccgtgttagtgcaacaggaggcactcaagcggggctgtgaacaggtcctctggctgtatgggcccgaccaccagctcaccgaggtgggaaccatgaacatctttgtctactggacccacgaagatggggtgctggagctggtgacgcccccgctgaatggtgttatcctgcctggagtggtcagacagagtctactggacatggctcagacctggggtgagttccgggtggtggagcgcacgatcaccatgaagcagttgctgcgggccctggaggagggccgcgtgcgggaagtctttggctcgggcaccgcttgccaggtctgcccagtgcaccgaatcctgtacaaagacaggaacctccatcattcccaccatggaaaatgggcctgagctgatcctccgcttccagaaggagctgaaggagatccagtacggaatcagagcccacgagtggatgttcccggtgtgaagctgcaggctgtgctccagatccaccgacccgtagcatctcgtcacgccagcactcgcctccctaccaatgactcacctgaagtgcaatacgaaataaaaggccagcgggcggcgtctgggtctctggcgcccccatgtggttgcgacactcccaaagccgtaagggccgacccaggcatcttggcccccagcccctcgtcgcgggttcaggtccgcccattactccttgtcgtgcggtcaaggatacaccttggccccgattccggatctctccgttctcaggccagacccctggtgctgccgttgannnnnnnnnctctgtctttgctgcaattttgaaataaaatgccaaagaacaaaaaa

SEQ ID NO: 14181 - DNA, 343 bp, Homo Sapiens
gcgagtgctaaggaagaggcgaggggcgggctccgaggctaggcgggcgctcggggttggagccgagggtctgggcaaaccggtgggtccctccccactgcgggagcggccagggtgggaaaaccgcggtcgggcgggcggggtagggccctcccgccgccgtggctcctggggaggccaggggtgaggagctgtcgccgcctttgcctctgcctcgcgggccgcgctgaagagactggtaggagagcgccgcgggcggatggaggcgactcttcgccccgcctgagctcaggaggggctagcgcggagcgcgggtcccgcctccagccgcgggagcggccgc

SEQ ID NO: 14182 - DNA, 496 bp, Homo Sapiens
aggccctggtggggctggagtctcacctgtttgcatggagaaatgggctggccccacagcctcacaggagcagtttgtgggctggtttccctgggaatccagaccctaacccgtgagaatctggattttggcttgtgagccctgcttatttggagccgggtctagagggaaccctctatcagcctcaggaaaacaagacctctgtgcacctcacttttggctcactgcagcccttgtccttcacctccacacaggaccagctggaagcagaaagaagaaaggccaatttcacagggcaccaaacaagtatgaaatgtaaatcagaaatgcagacaccccagacgagagcctcacaggagggagggggccccacaggctccccaggaggctcgtgtctttggcccagagccagccttagtttgtccctgccatctactgtctgaggccatcgctgctacactttgtttttatttgtatttcatactgaagtttctct

SEQ ID NO: 14183 - DNA, 672 bp, Homo Sapiens
ggcacgaggacccagtacgcattagctggtgttgggttgattgagacctggggcagttcctggggcaagaacccagatgggagatgagatagaaagtgttaggagttatcctctttgcctggcctttgagaataacttactgtgtgactttgggcaagttccttccccactctgggcctcagtttctcacttgggaaagcaaggagtttgaccagatgatcacaatgggccttcctagctctggccaccaagaatttgtgaacattagagctcctggtctggtgggtagagccagagctgctgactggtctctctgcctccagaggggatttattggacctcagaggtggcagggccctatggagcaccaactgccctcaaccccaccctgtgcccaagactgggaagggattgatgtcaggctgtggccataggtagcatgagttgcccaaggagggacagagcatatctttgctgaggcttggctgaggggcttatgatagggcttgcagtacctcaacagccccctgtgggcacagacaccctgaggtttacccaggcaaatatattgattagcaggacaagggctctctcctcagtttctgctcccttccatctctctcccatacttgtctgaaaagggagacaaaaaatcttatacaagtggcatct

SEQ ID NO: 14184 - DNA, 1191 bp, Homo Sapiens
cggtccggaattcccgggatgagcgtccgcaggaacttaacttacacatgccgtgccaacaggaactgtcccatcgaccagcaccaccgcaaccagtgccaatactgccgcctcaagaagtgcctcaaagtgggcatgaggcgggaagcggttcagcgaggaagaatgcctccaacccagcacaatccaggccagtacgcactcaccaacggggaccccctcaacggccactgctacctgtccggctacatctcgctgctgctgcgcgccgagccctaccccacgtcgcgctacggcagccagtgcatgcagcccaacaacattatgggcatcgagaacatctgcgagctggccgcgcgcctgctcttcagcgccgtcgagtgggcccgcaacatccccttcttcccggatctgcagatcaccgaccaggtgtccctgctacgcctcacctggagcgagctgctcgtgctcaacgcggcccagtgctctatgacgctgcacgtggcgccgttgatggccaccgccgacctgcatgcctcgcccatgtctgccgaccgcgtcgtggccttcatggaccacatccgcatcttccaggagcaggtggagaagctcaaggcgctacacgtcgactcagccgagtacagctgcctcaaagccatcgtgctgttcacgtcagacgcctgtggcctgtcggatgcggcccacatcgagagcctgcaggagaagtcgcagtgcgcactggaggagtacgtgaggagccagtaccccaaccagcccagccgttttggcaaactgctgctgcgactgccctcgctgcgcaccgtgtcctcctccgtcatcgagcagctcttcttccgtccgtttgggtaggtaaaaaccccatcgaaactctcatccgcgatatgttactgtctgggagcagcttcaactggccttacatgtcccatccagtggctcctaaacctggggcgcttcccacctgccccgtccccctagagactcagaggacccacctgggccaaggactccaaagccgcggggacaccgggaagtgcagcgggccaggcaggctgggtgggagggaggagggccgagacaggagcagcccacccagcagaaatacaatccgagctacaaagcatgggaaaaagagactcttttaggatcagatctgtgagcacgttggcgagg

SEQ ID NO: 14185 - DNA, 623 bp, Homo Sapiens
  misc_feature (613)..(613): n is a, c, g, or t
cacagatgtaaaactgcagtttttatagattcagtagaagagtttttttaaccctaaaggtgaaatacagaaattggataagtcatttttaaggaaattgttacattcagaaataaccttggaaagttcaccaatgattccttctggcataaaaactctagtcataatctggtcccgcattgagaaatccattccagtttatagtgcaagaccatggaagcgggtatccacctgcccaccattactgtaagtatcgatagactttgaaacagtgatttccagagtctgcaaccacaacatgaccatctgaagttagggccaggccttggggaccataaagtgggtcagcagatgtgctaatgtaggacaaaaatgatccactcccatcaaaaacctggatcctgctgtttccccagtcggccacaatgatgtttccatttgaatccactgctacacctgttggagcattaaactgcccatttccttctccatttgagccaaacttcaacatgaattctccttcctgattaaacaaccttcacagaatgattatggaaatctgtaataataatatcattattgctatttacagctgcaaaatggggacctgcanactgcctgtc

SEQ ID NO: 14186 - DNA, 661 bp, Homo Sapiens
gtacccctagtttagaagtgtcatagcagtatactgtcgtccattgaaagtctggcggaggtaacagcgcgctgtattgagcagcctcataaagtagcagaattaattcttcatggacaagaagaggaaaaaccagctcaggaccaagcaaaagttctaataaaattaactactgcaatgtgcaatgaagtggcctccttatcaaagaagtttacgaattctttaaccactgttgggagcaacaagaaggccgaggtccttaaccccatgatcagtagtgtattgttagagggctgcaacagtacaacgtacatacaggatgccttccagctgctgcggcctgttctgcaggtctcacatatccagaccagttgtttgaaagcacagccgtgacctggccagactccatctagttaaaggagacagctggccgccttgcctcaatatgtaccatttaaggggatgttctctgtgcgcctggccacagacatccatttgaggacactacaagcaattttgcacagacaatattgagaatgcaaatttagagagagttatcatttctctcaatgtgtataattgtttttacaaacaattgtgttttctttatgttaatttaaacttacacagcttatattgaaatttccttcatctgaactta

SEQ ID NO: 14187 - DNA, 636 bp, Homo Sapiens
caggaactgcgcaaggaggaggagacgctgctgcggttgaaggcagccctgcacgaccagctgaaccgcctcaaggttgaagaattagccctccaatcaatgatcagttctagaagaggggatgagatgctgtcttctcacactgtacctgaacagtcacatgatatgttggtgcatgtagacaatgaagcatcaatcaaccaaacaaccctggagctgagcacaaagagtcatgtgacggaagaggaggaggaggaagaggaagaagaatcagattcctaaaggagggggaaagccaggctggtcagttatacaaattgcatttctaaggctcaggctacttctcaaggaaatcatcttgccctgggccctgtgatctgcttgaaaggaaagcaagaactataaggaggatgtgtagttgcaaaaatggctccatcggtaactcaagcttcagaatgttatgacatacagaaaatcaaagatgctgtgtcttagcattgagtaatatgggtggtgctgtctggtcagattcagttaactgttcagaacaaaatttcctctgaaatactgttgagaaagtctgtcatttgcaaaaagagcagagtttaaatacaagccagtctttccagtcaaaaa

SEQ ID NO: 14188 - DNA, 844 bp, Homo Sapiens
ctagaaacatacgtaccgtgactacatcgataaagttacatcatgctcacaggacagcatgtatgtggttgactcagctaatcaacacgggtgacttgtgggagcattatgatactgctcgaggctactgcgtgttacgcttcagagtcagagctgtagagccatgcaagacgggtactgtgcgccgtttgagaaatgaaaagtcctaacacataattgcaaatcattttctactatggtatacaaattttatcattacaaaatagtatcagcttttatcacttaaggaaaataatacatcttcattcaaatattcagtgcataaataattgccttaaattgagtctttgctgtggaatttgagagttttggaaatcaaaggcccttgtgaaacatttcctgttgccatttatttatagatagcaatagcttcaaatgagtgggaaagtctacttaggtgaagtggtaaatagtccctaagattgtataaatagcgcattgatgaggtgccctaattgttttctccaacaataacccctggtccattggttccctacttactcaagaaagacatatactgagatggcttgaaatgtttaatgcatgtgaacgttatttttaccgtgttttggaaaaagatcttgatggtattgtcttcctttattttccccaattaagtgcatctaactgtgaattggatatggaattacattattcagcataaacatatatttacctgctttgttcattctctggattcaaaattaacagatcatgctgaaaacccctcaaacgattatattttttacattataagaagtaaaatatattattttgaataatg

SEQ ID NO: 14189 - DNA, 483 bp, Homo Sapiens
  misc_feature (23)..(23): n is a, c, g, or t
  misc_feature (238)..(239): n is a, c, g, or t
  misc_feature (460)..(460): n is a, c, g, or t
ctagaggatcccctgcaaacggntggcagacatatttcaaaggtgcaatccaggcagcttaaagagaagtgggtttacgcaattccggcatctactataacctagggcagatccaacattttctctctgacggtgctacccacttatctttcagtcattaagaaagtacacctgtaacaggtgacggtatttccaggtgagtgaggcaactgcaggcaaatagaataagaaaaaaaanntccaccacctgatttggtttaaagcaatcatgcaattctcattatagccacatccttcaaaaacaccttttccgtggcaagcaaagttactgataatgcgtgtggcttttgtcacagtgatgcattaggtaagcatgtgtgtgctgagtaccaggggtgcttcaaaatgcatctccgtcatcttccactcaaattctctaaggttcaaaatttgatgccanccgtttgcaggggtcctctagaa

SEQ ID NO: 14190 - DNA, 755 bp, Homo Sapiens
  misc_feature (188)..(188): n is a, c, g, or t
cgatcggtgctcaatctgggcgcactgctcaccacgagcgccactgcacacgaaacggtggccacgggagagggcctgcgccaggcgctagtgggccagcctgcctcgctcactgtcactaccaaagacaaaggacgggcggttggtgcgcacaggcagcgctgagctgcgtgcagagatcaccggcnccggacggcacgcgccttccagtgccagtggtggaccacaagaatggcacatatgagctagtgtacacagcgcgcacggaaggcgagctgctcctctcggtgctgctctacggacagccagtgcgcggcagccccttccgcgtgcgtgccctgcgtccaggggacctgccaccttccccggacgatgtgaagcgccgtgtcaagtcccctggcggccccggcagccatgtgcgccagaaggcagtgcgtaggcccagctccatgtacagcacaggcggcaaacgaaaggacaacccaattgaggatgagctcgtcttccgtgttggcagtcgtggtagggagaaaggtgaattcaccaatttacaaggtgtgtccgcagccagcagcggccgcatcgtggtagcagacagcaacaaccagtgtattcaggttttctccaatgagggccagttcaagttccgttttggggtccgaggacgctcacctgggcagctgcagcgccccacaggtgtggcagtggacaccaatggagacataattgtggcagactatgacaaccgttgggtc

SEQ ID NO: 14191 - DNA, 209 bp, Homo Sapiens
gccggtaccaagctgactcttccacccacgcgtgggctcaacttccttcccggccttttccctccaagctcctattttactggtgtcagctggaaggaaacctttccctctggggacctctttaccctcggtgaccggtggggttagaccagagagggactctggggtcatgtctggctcggggctggcggccgggcaggactggaacg

SEQ ID NO: 14192 - DNA, 353 bp, Homo Sapiens
acattaataggggcactcaaaataaaaaaataagatctggttaaaaagttaaactgaactgttccactagatttgagcctgcttgattcaaagccaatagtacaaaactgaaggtgccgtgtctgatttcacatcaacaagtcactggaaattatgtcacattagtttcataaatcagggtcttggattttttctaaacagagctattacaaattaatacaaactggaaacataccctaatttaaactaataagcttggggcccggctttttaaattttaaggcatgtgtgtttctctaccataacaacatggtacaaatttacatttacaatcacatgcatgatctacagtt

SEQ ID NO: 14193 - DNA, 792 bp, Homo Sapiens
  misc_feature (50)..(50): n is a, c, g, or t
ccaaactgaaggcaaagaaaggaccagtcagagaagggccgctgcctggntctggccccaggatccagcttacctgctggctcgccctctgatggacgccgggaaaactgcatcgggctttgtgtggaagacggtccctgccactgccctctgccgatgaaatgcgggaagtgtatggcctagatgtttcataaggctggagtccctggtcagccccaccagattagtgcttctaccctaggcagggctttcttggtctaatggtaataagcaccgacactgctaagcactttacgtgcattattatttcattgaaaagaactgtcaagtgaaatactttttagcacagtaactggctttgtgggctctagagaagagttaatgaggcagtgcatgttcttggcccagagtaagtgcttagtgaatgctttctaactccgaaccccagccacatccagggactgggtgttgagcaaaaggggccttcaagatgttcaaggcacttggattttctcctgtctctcatcggcttttcttaacgggcctcagtgggtgcatgtgattatccacgtttcacctatgaaacatgaacagaggagactgacttatcagtgattcttccgcgggttcggacagggcctcgattctgttttaaactccagtagtccctaagctggcaatggcacggcatgtggaggagagtgtgaagccacacagggcctccattaccgtcactggtgaaatgcggctcacctcccagatctgttgtaaagattaaatgaactggtcagc

SEQ ID NO: 14194 - DNA, 186 bp, Homo Sapiens
aggggcgccctttttttccttaatgagaatgaagatttaatggaaacttgcagagaatgaaatcactctgttgtcaaaaagaaataactcagctgaagcatcaggtatggtatttctgcaaagaataaagcattggtgctattcttaggcattaaagtttattaaaggtttataaaaacaagtgat

SEQ ID NO: 14195 - DNA, 308 bp, Homo Sapiens
  misc_feature (101)..(109): n is a, c, g, or t
acttcagccttctgaagtgttggaattaccgctgtgagcccctgcgccacccatttctagattcttaagccatttctatttagaattaactttaaagtggnnnnnnnnnctgtaaatgtgtgctgttagtaatcccacatcttttttagaaatcagtacaaaagtaaatgttctagagaagcaataattgcatttttgttagggcagtaagcttttagtaacatatttttaacataaatttgaaaagcattatgggattttggttaatttcttaatctttaatgagttgggaaaaaaagggcgccgct

SEQ ID NO: 14196 - DNA, 439 bp, Homo Sapiens
cctcatcaattgcacagccgtcgacttcttccttacattcccacagctcacctggccgggacccagccccaatgacggtcgctcgtcaccaagtctttagaatagctttagcgtcgtgaaccccgctgctttgtttatggttttgtttcacttttcttaatttgccccccaccccctccttgaaaggttttgttttgtactctcttaattttgtgccatgtggctacattagttgatgtttatcgagttcattggtcaatatttgacccattcttatttcaatttctccttttaaatatgtagatgagagaagaacctcatgattctaccaaaatttttatcaacagctgtttaaagtctttgtagcgtttaaaaaatatatatatatacataactgttatgtagttcggatagcttagttttaaaagactgattcaca

SEQ ID NO: 14197 - DNA, 506 bp, Homo Sapiens
ggtgatgctatagaacaggcaataggcagttataaatggatacatttcacgctgggggaaaaaagacaatttaaggaagtgagcagtttctgagcaggaaggtggtacagtattaaggaatggaagaataatacaataaaataccacactatattaagatagaaaaagtagtgaagaaaatatcataccggcacataaggcatatataacacaggagaaacacctgtataaaattccaggtatgtaaaccaatttcacaaatcacaaaaaattcggtccaagctctgagctggtacacgaaaacacgttgcacaggggatacaggtgaaggaaaaccaaaaaataccttcaaatagttgttcttctaaaaaatgacatgagatatattattccatactctttcagcccagcaaaatgagtcctacaaggacgggtgcagcaagccaggaagcaaaaaaagggatgggtctatgaaacatcagttctagatcctgatgagggatccg

SEQ ID NO: 14198 - DNA, 273 bp, Homo Sapiens
tttccattgctcaccagaaacttgctttaatgtctaaatgttctaaagatgagaggggggagggaaatgcataaaaagcagtgcctcatggaaaacacacacatgtgcatgcacacacacccaaagtcctttgtgctttaaacattcctggtaacttcactgaccatcctggccggaatcttctgaaatggttaagccaagaatttcagtcgcgaatatttctgcagtgatttcgtctggaagttcttcttcaaggcaaatttctgaaccttt

SEQ ID NO: 14199 - DNA, 394 bp, Homo Sapiens
gttacctttttctggtaaggttgtacttcttagataatggtcattgtcactaccaacttgcctgcattgtaatagagtcctattcactttgctcccaaccccactacggagatgactgatgactagttgtatacacagtgggtgtgccctgagaggtctgttgccagcagtggtgatcgatcacggcctccccctgctggctgatgtgatggtccttggtcctcctccgaaggaggtagaaggggcacacggccaccgtgggaagtaggcagaaaagcctccccgggtgcagattctctgagaaaagaactttggcctcatagttaacttactccaaaagctttcgtgtgaaataatttataattttttatataaataaaaagattaaaatgtg

SEQ ID NO: 14200 - DNA, 549 bp, Homo Sapiens
agctcggtacccgtgtccgtctgaattcttcctccaggtagaagttgaggggccccctttggtcctttccttttcccgtttgtctcccagttaatactctgtgcttaaaatcgtgtatgtaaatagttgttatctgagaggtaatgtattgaattgaaggtaccatatgatccgtaaggaataagataagctgatttccccttccgcttcttttagtgaaaccattatatctttggcttatgtttttcccctagaaaataccctgtgattcagacagatgatgagcgagaacgctataaagctgtgttccaagaccagttttcagagtacaaagagctgtctgcagaagttcaggctgtcctgaggaagtttgatgagctggatgcagtgatgagccagattgccacatcattcggaaagccgacaggaacatgagagaatttcaagaatccatgaagagtttaagaaaaaaaagaatgatcctacatttctggaaaaaaaagaacgctgtgattacctaaagaataaactttctcacataaagcaaag

SEQ ID NO: 14201 - DNA, 396 bp, Homo Sapiens
  misc_feature (59)..(67): n is a, c, g, or t
tcggcccatttggcgaggcagtctcactatgcttcctttccatggagcaaaatatttgnnnnnnnnnagttttaagctgttataatacctgaccacagatgagcctctgagtctcattagtgtctgtgtttactgaacgctgcggacatcttttctatatacagtaattcttccaccctgtcacaacaaagagaagttgagtggcaggaatgggaaatctttacatgcttctttgggaaagaaaaatgcttatttgtacattgttctattgtgtgagacctacatagggttctgtgtaaggccgagtcaagctgtcatcactttccttggtaagtttgagagctttatctagcggacacgttctgaagtgtgatatccacaaggaaatatcagtgt

SEQ ID NO: 14202 - DNA, 654 bp, Homo Sapiens
  misc_feature (203)..(203): n is a, c, g, or t
  misc_feature (362)..(603): n is a, c, g, or t
agcggccgccttatttggtaactgaaggcacagatgtaaggagcctctgcttggcccccactacctgacttatggtagacgtctttcttacataatcaggcatcacttaacaacagggatacattcttggagaaaggtgaagttaggccaaaacaacattgtgcaaacttcagactatactcacaccaaccttgatgatatancctattgctcctaggctaccaacctgtaccggatgttactgtactgaatactgttaccctttgtaagaaaatggtatttgtgtatctaaacaccgaaagagtaccgtaaaaacaccgtaccaaagattttaggctgggtgctgtggctcacaccctcannnnnnnnnnnnnnnnnnnnnnnnnnnnnnnnnnnnnnnnnnnnnnnnnnnnnnnnnnnnnnnnnnnnnnnnnnnnnnnnnnnnnnnnnnnnnnnnnnnnnnnnnnnnnnnnnnnnnnnnnnnnnnnnnnnnnnnnnnnnnnnnnnnnnnnnnnnnnnnnnnnnnnnnnnnnnnnnnnnnnnnnnnnnnnnnnnnnnnnnnnnnnnnnnnnnnnnnnnnnnnnnnnnnnnnnnnnnnnnnnntgacaagagccagacctatcttgaaaaaaaggcggccgctgggatcctcta

SEQ ID NO: 14203 - DNA, 177 bp, Homo Sapiens
ttcccggcctttttcgcagcagggatagtactcaggaccagagttaagctgataccttaggcacacaggttggacttacatagaggaaaaaaagcaagatatgccctatgtacatgaggttttacctcctccattcctgaccaataaccaccataactacggatatctctgcgcttc

SEQ ID NO: 14204 - DNA, 686 bp, Homo Sapiens
  misc_feature (95)..(128): n is a, c, g, or t
ctcttggtaccattggtattataataaagagcaatttgtaactgagtggcactaatggaagaaagtgctgctcaaaggaagtatgaagttatatnnnnnnnnnnnnnnnnnnnnnnnnnnnnnnnnnngctgtgaaggtcaagctgaaatttaccatacatatcatacttgctcatttgtttccctttttgactgtatgggggttcccacactcgtgcatacacacacatccatacactctgacaatctccacgctagtgtgaacgcctctgtcccgaggcgcacgaataataaggcagctgttgaatgtgaagggtccctttggaaaattaacctactgggagggttcttgccagacagaactacagttccattgtctcgtggtcttgtaatgcactggtaaaaacaaaataaatagatgaataaataaagagtgagagaagagagaatcaggtaccttttttaaatgaaaggactttggtactttagccacaaagctaaaacagcattacctcagctctaaactagccttgaagtttacagacatgactttgtaaatgtattgtttttctttgttgtgatgtccttttatttttttctttgaaaactgctatcatgtaagataaaatgtaaattgctgccaactgtagtaatgatgcttttaataaaagtgacccatgatatgc

SEQ ID NO: 14205 - DNA, 375 bp, Homo Sapiens
  misc_feature (110)..(253): n is a, c, g, or t
aagggttgggaggcagcagctgtaagcagcctggagcaccagcctagaccaggatgcctccacctcagcaacaccgcagccaggtcattctgtgtcatggagccatctcnnnnnnnnnnnnnnnnnnnnnnnnnnnnnnnnnnnnnnnnnnnnnnnnnnnnnnnnnnnnnnnnnnnnnnnnnnnnnnnnnnnnnnnnnnnnnnnnnnnnnnnnnnnnnnnnnnnnnnnnnnnnnnnnnnnnnnnnnnnnnnnngtttatgaaccctatcgctattaaaaaaccactgaactgtatactttggaactgagttttacggcatgtaagctcagctttagcaaaaaagcctctaatgagaccccatctctgcaaaccat

SEQ ID NO: 14206 - DNA, 469 bp, Homo Sapiens
gccttttagaactcagtgccatcctgggtgcccagggcagagcaggctttgttcgcacctcatctgctgcagaaccacatcctgaggagtctcagcttatcctggagggaattgggaacagtgtcactgggaagtgaaggcctagccctgtggcttccaccagtctcctcctgcagccgcacgtggtggcatttctcgcctcacaccaagaagcagcaagtggaaaatttcaggatacaaagcacataacaccccataagagatgattatgtttttagaagcaagagcaaaattatgaaacctctagagatttgggtcatgttactccatttgatgaagattctcactaccgcccgctcctcccataggagcctacactaagtccaagtgtgagccattcacagactagaacacaaggagggagagagactcttaaacgtaaataaaaatgcaattcactcaaaaaaaa

SEQ ID NO: 14207 - DNA, 501 bp, Homo Sapiens
  misc_feature (209)..(250): n is a, c, g, or t
  misc_feature (265)..(265): n is a, c, g, or t
tttgcacatagaaacaagacatccatgtgtacagtatcaaaaaatatataccaaggttactggtattgcagttcgtggaaggggaagagaggggagaaaatgaaatcaaccgaaatactggaagaaaaggaagaaaggtcaaaagaaaatagtttgtctgatatagaatataacatgatctagaggaaactccataaatctaggttttnnnnnnnnnnnnnnnnnnnnnnnnnnnnnnnnnnnnnnnnnngcagcccgaagtggntcggtcgggccttttgagctcaaacaatacatttcaataataacaccacgtacaaacgggagtagagtcagcacttgacaagttagcacggttaaaatataatactagaactctgaggccgggcgcagagctgccctgtccgttccgggggtccatctccagcggggaagggcaggagagggcgagcccgccggcaccgcgtggaaggggcctccgccagggtctgacagccgccg

SEQ ID NO: 14208 - DNA, 583 bp, Homo Sapiens
acagactcctgtcttcactcctaaatgcagttctttggaatcaccctactgtggtgggcgtagtagggagccatcagctaggaagaaacgtgggagatgtgaattccaagagttgcctggacagggcaagtcatgttagcgtgggtcacacttccaagatatttaaagcaaatacaaaacagaacagaggattcaaaccgcaagtatgggagatttaggccctgcagaggcagaccattccttagtatctcaaaaagcagagtaatactgaaggcagagtagggggtggttagagagcagttagtacaaagaggcagaacagtgtctggtttacttggcatacacagaatctgcactgccggttccagaactccaaagttggtgaactacaggagatgtgggtatttagactccaaagtttatactgagctcagtgcctgggaacgctccagctgcactgcagccaggggggataccagcttcattcctcagagtaaaccaaccttgggagctgtgtgccagttccagtgtaagcagtaataccatgttgtaagagggaacattaaagcccattttatgacat

SEQ ID NO: 14209 - DNA, 547 bp, Homo Sapiens
  misc_feature (410)..(463): n is a, c, g, or t
caggggttcagaagccgtcagtggactcgggaaaaagtgtctcttagacctggcgctcggcgggaccctcgccacccgcgtcggggtgatcgggtgaatgtcctggggctttggctcgacggcgaggcggccgagggcgtgcacctctcttgcagtttcctctcccagcgcctcgggggcgttttcagtcgaataaacttgcgaccgccacgtgtggcatctttccaagggagccggctcagaggggccggcgcgcccgtcgggggatcgcggccggcgcgggacaggggcggcggctacagccagcggcgcggcggagcccggggccgtggatgctgcgtgcggaggcgctgccggttacgtaaagatgaggggctgaggtcgcctcggcgctcctgcgagtcggaagnnnnnnnnnnnnnnnnnnnnnnnnnnnnnnnnnnnnnnnnnnnnnnnnnnnnnncgtcgtccgaggccagggcagggcgagccgaacctccgcagccaccgccaagtttgtccgcgccgcctgggctgccgtcgcccg

SEQ ID NO: 14210 - DNA, 484 bp, Homo Sapiens
ctgggctgttactgctaaatctcagtatgaacagaccaggcggaaagcttggtggccaagcagtctgtgtgcttccccgctgatggagaacgttgcgttgttcacaatagggcctcatgggtgtagccgcatggcagacccatggctggcgcaactgcctgttgccgtctgtcttcagtaactgctgctctgttaactgttctattctgatactacgcgtgttgttttttacaacaggtatgtttttgtttcaaaaatatgtattgcttttctcatattttttgcaaattgtattgtcaacatgggtcatttaaagtcctgtatgaaccataacctgctgtggtacctttgtacatgtttgattctgtattctttattccagtgtggcatatgtgcccctctgtatcttttgaaaagtgcggaataggttgcttctaccacctgttcttaatgtaacagtaaaagttttcacatttttctcaga

SEQ ID NO: 14211 - DNA, 496 bp, Homo Sapiens
aaaaatatattcaaagggggtgatgggagggcagcatgggcacagtgcagccccagctcgctgactgccggtggaggtgcaacccactggggctcagcacaggctcatggattgcccggggatgggggccctcttggcacagggacctccaggtacggcacagggtccgagaaggggcctggtcgggcccagtagtccagggctcgaactcggtaggagccagagacagcacctgtgtctgggctgaacacaaagaggttgaaggtcgatggcttcctgctgaccggggtgtacgccttaccgtcctgagagaactggatctcgtatgtccacaggcacttggagcccacgtgttcatccgaccagaccagaaccagctgcccttgggtcaggggcagggcgcggagccgcgtgacctgcccgggcggcttctcggggcgcgcacacacgtgcaccagcaaaagcaacggcagccgcagcgcggggcgcagggtca

SEQ ID NO: 14212 - DNA, 637 bp, Homo Sapiens
aactagggataagatgtcttaactggccattgcggtttatctgcgctgagagaactacaggtcttacctgccaacatatccaccataattatttgggaatacctttcatacaataacttgtttaaaaaagacctcagattgaaaaagcaacctaaattactttcgctctctaatcagcatggcaatgtatttatattgagaatgttctcaaaaagtaactaaaaaattgtgtcggaccctacttttgagaaatctacgtttcccaagtgttatgggaactggctattccttgtcccggcacaccttctcattccttcctttcagagcctaaaacctcatttgataagcactcctagtctctggcctgtggatccagtgctattctgtcaccaacctaagaatcccaattgcaccttctgtttctgacagtcacaggtgacagctgtgattctataatacagactggtgtcttagaggtaggaataatacatgattatgaagcatcaccctgctaatacataataatgtctttttatattataagtgattgagtttagttcattttaatacattgtacatgaaaaaatgaaaagtagaactttgtaatactttaatcaataaaattaattaccaaatg

SEQ ID NO: 14213 - DNA, 1119 bp, Homo Sapiens
  misc_feature (1020)..(1028): n is a, c, g, or t
ccacgcgtccgggagtttgcagtgatgagctcacacacaacttcaaaggcttcacggtgatgaacgagaatgagcgctatgacgcagtccagcactgccgctacgtggatgaggtggtgaggaatgcgccctggacgctgacacccgagttcctggccgaacaccggattgattttgtagcccatgatgatattccttattcatctgctggcagtgatgatgtttataagcacatcaaggaggcaggcatgtttgctccaacacagaggacagaaggtatctccacatcagacatcatcacccgaattgtgcgggattatgatgtgtatgcgaggcggaacctgcagaggggctacacagcaaaggagctcaatgtcagctttatcaacgagaagaaataccacttgcaggagagggttgacaaagtaaagaagaaagtgaaagatgtggaggaaaagtcaaaagaatttgttcagaaggtggaggaaaaaagcattgacctcattcagaagtgggaggagaagtcccgagaattcattggaagttttctggaaatgtttggtccggaaggagcactgaaacatatgctgaaagaggggaagggccggatgctgcaggccatcagcccgaagcagagccccagcagcagccctactcgcgagcgctccccctccccctctttccgatggcccttctccggcaagacttccccaccttgctccccagcaaatctctccaggcacaaggctgcagcctatgatatcagtgaggatgaagaagactaatgtttcctccctcctttcctgtcctccctttctgtcccattaccttcagaagctctctgttgaattccaaattgtgaccccaacactaaacctaaggacagctacaaaggaaagacaactggggaaagaagacctaggactgggggaacccaaacagcctgtcctgcaagtgacatcactcacccacacgaaggagggggactgcaccttagaagcctgctctgcatccatttannnnnnnnnaagggctttgtttcactgtttatgttcacgtgatctcaacagggaaattgtcattttcattaattttttaaaaaattcgtctttcaaaaaa

SEQ ID NO: 14214 - DNA, 353 bp, Homo Sapiens
tttttttgaaacctacttgtttatttctgtgattccaaaaggacgcaaaaaacccaactggtcaacccttcccttccccctcctttacagtgtatctctttctagtctcattaccgaacgacaaggcaggagacgcacagtttggaggggccgatgcaatcatcatggcagaaagcgccacagcctttgcacatgatcatggctttcaagcggcagtaacatttcgaaggcgtgccctctatgctgttctcttcggagaacgcctgaacaggaatggtctggccatggctgctgggattcatagcttggctagcagggatggtagtgacagtcactgaaaatgacatgacatc

SEQ ID NO: 14215 - DNA, 515 bp, Homo Sapiens
gtaaaaatcatagttagggttaagtccaagcagtgaggcctgacctgggctctgctctccttgttgagacactaacaggcagttgggaggaaaatctgcatttgactccaccctctttggggcaaaggagaagcaggtgacccgagggggggcaggccagaggagggcgactcgtgcacagggacccccacccttggaccccgctgtccttttctagttgtttacttggtggtggcagccagtctgaccttgtctgtggtctgactgttcctaagtgtgtaactttcagtattatctgtgacagatggttctgtggtgaaaaaggtttattatattccttatggctgccttgtacaaaatccgttagaaacgctaatgtaagatatcagatttctaacaagacaaaaacagcattatggagttaaaagatttcaacaactgggtcttgattttgatgtgagctggtttttagctctcaaatgttgtcacttaaataaaaaccttctttgcctttt

SEQ ID NO: 14216 - DNA, 459 bp, Homo Sapiens
  misc_feature (59)..(75): n is a, c, g, or t
gtcgtaccaagaaatcgggactctactttagtagctaactagtgtatcacagggaaacnnnnnnnnnnnnnnnnnaaaatatttaagagctcaaagggatacaggcagaaaggggaaaatctcactactacttttaatcctaagctcacggtgtttcagatatctatttcacaaccaagaccatgaaacccatcatagtattggtgactactatgaaaactatgacatgtcagtcagcctggctgccggcggggtgcggtatataagtccattacatatccctaatagctggatggaaaacctgaaaatgaaatgaagtccctagagaaactgggccatgcgggtgcttctcaccaggttggaccttttacaaacaaaatctcggttgtccaagggcgacttacagagtgtccattagggtggccagagatgttagggggactacaatttcaatcccct

SEQ ID NO: 14217 - DNA, 542 bp, Homo Sapiens
tgtctttccctgctgctccccagaagggagaccagggagtgaaaggatcttctggggagcaaggagtaaagggagaaaaaggtgaaagagcctgaaaactcagtgtccgtcaggattgtcgccagtagtaaccgaggccgggctgaagtttactacagtggtacctgggggacgatttgcgatgacgagtggcaaaattctgatgccattgtcttctgccgcatgctgggttactccaaaggaagggccctgtacaaagtgggagctggcactgggcagatctggctggataatgttcagtgtcggggcacggagagtaccctgtggagctgcaccaagaatagctggggccatcatgactgcagccacgaggaggacgcaggcgtggagtgcagcgtctgacccggaaaccctttcacttctctgctcccgaggtgtcctcgggctcatatgtgggaaggcagaggatctctgaggagttccctggggacaactgagcagcctctggagaggggccattaataaagctcaacatcattggc

SEQ ID NO: 14218 - DNA, 582 bp, Homo Sapiens
gcggccgcggccctggctttcgcgcttgggtctggagatagcgcgagagactcaccggctcctgggaacccagtcgagggcccgggccaggggcataagaggaagttgtcccgagtggctcgcctctggccctgggagaggcggccccgggagccggcgtcccgcccccggcggcctcattccccgaccctcctccccggctgcgcgcgccggccctggctgtatctcgggggctgcggcgggaactgccgagcgggcttgactggacgcactgcctgaggacctgcggaggagacgagggagcgcggcgggtcagccccgaggttaggccgcgggtcccctgtccgtggcgctccgtccttttcccagccgtcttggctacagaatctgcgacctccccacactccttctcttttgagtatgtcacttaagtcttctcgccggatgctttttcttccttgcttttgccggaaaggagagagatacatgtgaaggatatctgtcctcgttgcttcccctgccctctcaaaagtttaacttctgtgggaatgtgtatcttccttttctggaccatttgacagt

SEQ ID NO: 14219 - DNA, 397 bp, Homo Sapiens
  misc_feature (301)..(309): n is a, c, g, or t
tcatcttatctctgaatgagtgaggagccatcactgcttggaagagattcttggcaggcgagaaactgagtcaaatgaattcagaacatattcccttctctttctcccaggcatgtctgtcttttaaggagctgcatgccctgcattcagaagattatggcttagagagcctcattggcacccgagggtccttccagaatcaataaccaccacaaaaatgacaacagggactaggccctactctgcaccccccacatccaccccccaccatttcctaggatggacatatctttcaaggggnnnnnnnnnccatgtctctggggtatttcacaatatattttctttgtatagtgttctttacttaaagaacaagaaatagttttttataaaactttaa

SEQ ID NO: 14220 - DNA, 518 bp, Homo Sapiens
tagtgagcctcttgctaagtgtcacacacactcttcccaaagacgtgatgagttaaagttgtattctgaaatcatgaagccagagcctgtgccagaccttctgctacctctcatagaattgctctgtaattctaaatttaaaattagaagtagagagagataagccatcgcccctttgcctctgagaattggctgctgtttctaatataattattttctaagatagccagatagttagaaaaagattttcattgatgacatatctttaaactttcttgcatcagtattctaaattgagcaaactgaaagattttcatcaggaaaggagcactgtgggaagagcccagtattcacattttttccccatttttcagaagcgacatttcatatataggtgccaaaagtgaatcggggtgcggagagtgggaaccttttgaatttatgattgtcacagagatggtagaaattatgatctgactggaaaacaatcctgtatcccctcccaaagaatcatgggc

SEQ ID NO: 14221 - DNA, 795 bp, Homo Sapiens
acagtataatccggaggacaagtacaatcagagcaatgggctaccagaggttggaagtggtccagtcaaagcaaaagcagacctgcaaagagcaaagggtcgtgggaatagttttttgggatacttattttgcttgttgactttctgaagagccaaagaacaataatatctgcttgtttcaagagtgttttgagaaagtgtgctaaagctttagcagaaaaattcctggaaaagcttcaccagtctttttctaccgcaacaatgctcccactcattcttctcatcaaacaagggcaattttacaagactttcaatgagaaatcattaggcatcgaccttacagtcctaatttggctctttctaacttctttttgtttcctaatcttaaaaaatctgcaaagggctcccatttttcgtcatttaatcatgtaaaaaagacatggttaaatttccatgaatctcaatttttttagggatggattaaatgactggtgtcatcacttacaaccatggttgacctcgatggagcttatgttgagaaataaagtttatattctttatcttttaattcaatttttccatgaacattttgaagtgcctcatattataaatgatatttcattgttagtggttcattaatagggtatttaaatacaattcttttttaatattagtcctgtacactgagatcatgtttaaaaacctattagttctagtagtattttatagatttcttttgattttctatgtatacaatcatgtttccccaaataaagagttttatttttttccttc

SEQ ID NO: 14222 - DNA, 676 bp, Homo Sapiens
tgatgacatgcgctcagctcataatcctgatgacatcaaacctcgaagaatcgggaaaccccgacatgggagtcctccacaaagagatccaaactggaacggtgagcggctaaacaagtctcatcgccaccagggtcttgggggcaccctaccaccaagaacatttattaacaggaatgctgcaggtaccgaccgtatgtctgcacccaggaattattctcgatctggaggcttcaaggaagttcgtgctggttttaggcctgtggaagctggtggtcagcatggtggccggtctggtgagactgttaagcatgagattagttaccggtcacggcgcctagagcagacttctgtgagggatccatctccagaagcagatgctccagtgcttggcagtcctgagaaggaagaggcagcctcagagccaccagctgctgctcctgatgctgcaccaccaccccctgataggcccattgagaagaaatcctattcccgggcaagaagaactcgaaccaaagttggagatgcagtcaagcttgcagaggaggtgccccctcctcctgaaggactgattccagcacctccagtcccagaaaccaccccaactccacctactaagactgggacctgggaagctccggtggattctagtacaagtggacttgagcatagatgt

SEQ ID NO: 14223 - DNA, 584 bp, Homo Sapiens
  misc_feature (46)..(46): n is a, c, g, or t
caggaccctgtagctccttgggatagtgatgacccttgttccttgncactggatgaggcctcctgcattgcttacaccctgcgctggtaccatcgggctgtgacaggcagcacagaggcctgtcacccttttgtctatggtggctgtggagggaatgccaaccgttttgggacccgtgaggcctgcgagcgccgctgcccaacccgggtggtccagagccaggggacaggtactgcccaggactgaggcccagataatgagctgagattcagcatcccctggaggagtcggggtctcagcagaaccccactgtccctccccttggtgctagaggcttgtgtgcacgtgagcgtgcgtgtgcacgtccgttatttcagtgacttggtcccgtgggtctagccttcccccctgtggacaaacccccattgtggctcctgccaccctggcagatgactcactgtgggggggtggctgtgggcagtgagcggatgtgactggcgtctgacccgccccttgacccaagcctgtgatgacatggtgctgattctggggggcattaaagctgctgttttaaaaggcaaaaa

SEQ ID NO: 14224 - DNA, 284 bp, Homo Sapiens
  misc_feature (223)..(223): n is a, c, g, or t
cactgtgcccagcctgagtttctgtttagaaacaacagtctatgatagtataatcctctcttttttgtacacagagtaaagaggacaaataggtgaaagaataaatgaaaggctggaatcccacttcccccgctgtcccagggcattggatattcacggatagcaggcagcaaaccactcacagagccaggaagaaatgaatgcgttggtattgccaggaggngaaagccgcccggctgaaatacgctatgaccatagccaggagatactgatggagagaaagg

SEQ ID NO: 14225 - DNA, 293 bp, Homo Sapiens
  misc_feature (86)..(86): n is a, c, g, or t
caggaggagctcgggcgcaggccaggcccccttggtgaagcagaggctgaaggaaaggggtctgggtcttgtccctaggaattctncctccctcaggagattgggggttgggggaggcagcgggtgatggctctgaagctgaacccagggcctggctgtggtcttcttggtcttgctgccccctgtgacccaaaggcatgggatggacagagatgcctgcccccgtgaagctggttggggagggcagttcaccagcatccatagagtaataaagtcacgtgtgtagacccgga

SEQ ID NO: 14226 - DNA, 576 bp, Homo Sapiens
agcccgaccctaaagccaacccccgacctggccatcaggacagattggtgccccattgctttgcccttagatcaccaaacaggaggcctgagtattggggcctctagcagggagctcccatcccaggcatcgggcggccttgctaaccctcctcctgtcaacctggaggactcattggatgaagacttgatccgcaatccagcctcctcggtggaagccgtgtccaaggaattggctgcattgaatagcagagcagctgggaactctgaattcacactgcctgcaccctcaaaagcacctgcagaaaaaggtgaaggcgttttatgtacagaagaaaaaaggaactttgcgaagcctagtccttctgctccaccaccagctagctctctgcagtcgcccctcaattttctggcagaacaggctctggcactggggcagtcctctcaggagaaaaaaaccagagagttctggctacaaagagctgtcctgccaggctcccctcaataagggcctgccagaagtacatcagtccaaagctaagcaccacagcttgccacggacgtctcctgggcggcg

SEQ ID NO: 14227 - DNA, 128 bp, Homo Sapiens
ctgagatgctccgcatcccgcaacccccgtggtgacagggtgggagtcctgtaacctgtcacaccagcatgtgagggccacatgccccacgagggggtgatctaaggctgagtttgcgcagagaggcc

SEQ ID NO: 14228 - DNA, 414 bp, Homo Sapiens
  misc_feature (99)..(107): n is a, c, g, or t
tgtaccctaaagcaaacccccgaccttaggagaactgcccaccttgtcctcccaaatgctgggattacaggcatgagccactgtagccggccaaactgnnnnnnnnnaaaaaatgtgttcaaaggtgactctaaatgttagatattgagaaaataattcttggagttaggccagtggttctcagccagtgttggggggtgcccctaggggatatttgacaatgtctgtcaaatattttttattgtcacaatgtaggaggcagggtggatgggagtgctactgtatctagtgggcagaggccaggggtgctgctaaaacctccacataggagtgcgcctccacatcaaagacctgtgtgcccaaaagttaacagtgctgttttgaggatctgttagtgtgattctggcttctggc

SEQ ID NO: 14229 - DNA, 439 bp, Homo Sapiens
ggatgacgcttcgttcttggccttggaattcttctactgaacccaccttcaagtccttgatgtcatccagtcctcgaagctccctgtcaagtttggtgatgcagtaacggattttctccacctgtttccggtacggggagatgacgcccacacttcgagggctcaggcgagctttgcccttcttggaggagggggccaggagcagcttcaggtaggaagtcactgtggcagcctcttcagggttgaagaaggatgggctgttgccttcacgctcatctttgcccagtacgccgtgaaagatgatgggaaagccctgtcgaggtaggcccgaccagcggcagaagcgttctcgaaccgcgccctcagcacaggcctgcagctcctcttcataatagagctggttaggaatgcactgaatggtgggtcaagatcaagaggt

SEQ ID NO: 14230 - DNA, 362 bp, Homo Sapiens
cgacccttcctctcctcccacctccaagcaggttaggggaaggcctgtcttcatggtgggggtctggagtacaggtttggatggtgcccacctgaaggacagaggcaaggaccttacttggccagtcacaagtaaggatggggtgagccttgggcagctggggagcccagtgctcttcaaacttgaacatacagcacacaggtcacctgggaggttgttccagtacagattctgactctacaggggggtctaaaaccctgcatctctaacaggctcccaagtgatatggatgctgcttgtctagggaccacacttggaagaacagggcaccggcccatggccctgcctttatccgagatgag

SEQ ID NO: 14231 - DNA, 380 bp, Homo Sapiens
tggcccacctttgtccgttttactcatagagccagctttagatttcctttagataaaggctctgccactacaatgacgtttaaaaggcactgctttggcttctcagcttactggtggcaaaactgaggcccacagaagggtgtgacctttgagctataggcagacctgtgtctggagttcaggcggtctggtccccaggtgccccattgggtgcaccaaagtctgtcagtgtttggtcccgtcagagtgagtgctgtttcttgggagccggctgccgggaagagagggtcaggtagagccaagcctggaactggtgttggtgtcatgcacatggagaatgcccctgtggaggtgggaggagaggaagggtcggagctcca

SEQ ID NO: 14232 - DNA, 671 bp, Homo Sapiens
gcggccgcctcggtacggcagagcccggggccggcgctggcgcggctggagggccgagagttcgagttcctcatgcgccagcccagcgtcaccatcggccgcaactcgtcgcagggctcggtggacttgagcatgggcctgtccagcttcatctcgcggcgccacctgcagctcagcttccaggagccgcacttctacctgcgctgcctcggcaagaacggcgtcttcgtggacggggccttccagagacgcggcgcgcccgccctgcagctgcccaagcagtgtaccttccggtttcccagcacggccatcaagatccagttcacgtcgctctatcacaaagaagaggccccagctccccgctgcggccactgtacccccagatctcccctctgaagatccacatcccggagccggacctcggagcatggtcagccccgtcccctccccgacgggcaccatcagtgtccccaactcctgcccagccagtccacgcggtgccggctcctccagttaccgctttgtgcagaacgtgacctcggacctgcagctggcagcagagtttgcagcaaaggccgcgtcggagcagcaggcagacacgtctggaggagacagcccaaggatgagtcaaagccgccgttctcctacgcgcagtgatcgtgcaggccatt

SEQ ID NO: 14233 - DNA, 514 bp, Homo Sapiens
  misc_feature (368)..(368): n is a, c, g, or t
gcggccgctcttaatgtccactgcgtcgatgtcggcaccgcgctctagcaagagctgcacggtttcttggcactcggtgttcactgccacgtgcagggcggtgagcccgtcataattgcgggcctccaggtccaacgtgcccggagctgcgctgtccagcagggctcgcaggcaggtcgggctgcggtgctcgcacgccaggtgagcggccgtctggccatggcggtccagcgccatggggctggcaccagctgtcaccaggagccggaccacagacggtaatgtggtgatcacagccaggtggagcggtgtctgccgtaggttgttgtagatgtcgagctcccggcccccctgctggaagaggttgnaccagccggtgcacagctggcaggttaccctgcaccacagcaatatggagaggcctgggggtgggggagtgaaggaatcacaggcattaaggggttgttcaactctcaccctcatggctgttggcacatgctaaatccaatgtggc

SEQ ID NO: 14234 - DNA, 758 bp, Homo Sapiens
  misc_feature (650)..(650): n is a, c, g, or t
ctgatgtggaccatccctttgatgctgaaggtaatgcatctgttgaaagaagtgactgtagatttggattactgctctctgcatcttccagtttttctgtgttatcttcccaattaatgtggaatcttgtgaccctgggattagatgccaaaatattcctttgaagcttagaaaagtctggttttactggtggattttcccttaattctgtctcagtatattcattatttacataatagccaactctaataaattcttgtcctcgataggtacaagtaattagcacaacagttacgcctactgcatctgcatctggaatgagtcctggattaggtgcatcagcctgaaatacaaacatatgccttcctgcgggaacaggacccactaaaacagagtctaaaacttgatcgtattcttcactttctgcagagcccacatagataattttccattccaagtcttcagacaggtcctcgatgcactcgaaggtgatctcgaactggaacgggttgtagaaaggagaagggttatccagcaccactacattgttcacctgaacctttgccatattttgaaaaaaacacaaacaatgggaactggggctggttgcggcacaataaagtccagcgcgcggccgctcgggagagcgnagacccccgctccagcgccggccagacgtcgtgcagcggcgacttgagaaacttttttcctctttttatttacacgggagcactccacagtgttttgcagctttccta

SEQ ID NO: 14235 - DNA, 572 bp, Homo Sapiens
  misc_feature (11)..(11): n is a, c, g, or t
ctcaacccccntacttctagccagagcccaggcacctgccttgagcccttcttaggcaaatatatgtaaatgtaggaccctcagttctccctccctgaatttctttagggaaagcaacaaccatccctgtaagccataggtattcatggggaggaaggagagggctagttgtctgagagggaaactgccaaaggctgcagactaggaaatgggattccaggtttaagatagctcctttctggacctcagtccttcacctagtcacctagtcacagggtggattgcctctaaggatacttaggggaaaaaggaaccaaattcgggagggtcctccttgctttaagccttgataggagacggggaggccaacccttctctgcagaccgggatcctcaccagacagaggagctccaaacctgcccatctcatcccatgcaccgacggtgcctggcctggctccaaactcccaaaaggaactattttacagggaccaaaaaggggacagtgttgataataataataaaatgaaacaatctgattggggcattgctggatcagaaaatgtgtgacct

SEQ ID NO: 14236 - DNA, 578 bp, Homo Sapiens
  misc_feature (39)..(39): n is a, c, g, or t
  misc_feature (83)..(83): n is a, c, g, or t
  misc_feature (203)..(203): n is a, c, g, or t
cagggcctccagctgccctcagacactgatgtctgtccncaggtgctctctgcccctcatgcccctctcaccggcccagtgcnccgactctccaggctttatcaaggtgctaaggcccgggtgggcagctcctcgtctcagagccctcctccggcctggtgctgcctttacaaacacctgcaggagaagggccacggaagccncaggctttagagccctcagcaggtctggggagctagagcaaaggagggacctcaggccttccgtttcttcttccagggtgggggggcctggtgttcccctagccttccaaacccaggtggcctgcccttctccccaaagggaggcggcctccgcccattggtgctcatgcaaactctggggctgaggtgccccggggggtgatctctggtgctcacagccgagggagccgtggctccatggccagatgacggaaacagggtctgaccaagtgccaggaagacctgtgctataaaccaccctgcctgatcctgcccctgcctgaccccgccacgccctgccgtccagcatgattaaagaatgctgtctccttttgg

SEQ ID NO: 14237 - DNA, 513 bp, Homo Sapiens
  misc_feature (368)..(416): n is a, c, g, or t
gcggccgcctttaccgtcgaccttggggctctccacccgctctggccccagtcgaactgggggctagccacctcctcgtccagcccccaaacctccccttcctttccccctcctccgggggccaaggacagggtggccttactcagtaaaggtgtttcctgcacctgctgtcagcctggctatgccgccaccggccccgcccatgaggactaggagcccagccttgcgccgcattcgcactgggggacatgggaggggtctagctggccactgctggaggcagcgctggtcgtcacctgggcggccagaggctgggatctgcgaagttgaacccagaactaggagtggggcttcccccgccttccggnnnnnnnnnnnnnnnnnnnnnnnnnnnnnnnnnnnnnnnnnnnnnnnnntggacggagccaaaggccgtgcctggtggggcggacggaaaaggggtgggcatccctcctggtaccaagctgctgggtgcgaaggcagatcatatgg

SEQ ID NO: 14238 - DNA, 385 bp, Homo Sapiens
gagatattcaacatactttattataaaataggctttgtattaaacgattttgcccaactgtaggctaatgtagtgttcggagcccttttaaggtaggctaagctatgatgtttgacttttggtattttcaactcacagtgggcttatctggacctaaacccatcataagttgagaagcatctgtatacccaacattggttatgtatactttcattaaatactcatttgaaaaataaagctttcttcacatcaaccgtgtgatgtaggtctttaatttttgaaactgcaaaacaggttccaagatgagctcttactgatgtatatggtataatacggtatgggccaaaaccactgcttatgacctctcaaatattcacacatcaag

SEQ ID NO: 14239 - DNA, 579 bp, Homo Sapiens
  misc_feature (164)..(164): n is a, c, g, or t
gtcggttcctcgctggaggagacccttccccagacacctgccgggcacccagccaagcccttgaggcctgggaaggtctctggatgccaccctacaccccgcccagactcctctccctgtggttcctggacagaacattccgtcaccacgaaacgaagtttgcnccagccctgccttcaccctgggaaaacccagccgggcatgggaaggaggaatgctgcccgcctgcccgcccagaccagagtcgccccacatgccaggccaggcccgcattcctcctggggcactacgggagccccaggcttcccggcaggaaaagccccccaccgcagaagggctggtctctggtggggagttgctgctgggtggggtgaccaccagggcggggttcaggctggggtatttttaatgatgtagttgcatctggtcaccgccccctgccacccccgattctttcctgccctccccaccttgtgacccagactgtggctcgaattaagaatgttttcagataagtacacgcctttgaggttcaaagtatgcctaatgattaaacaccagaccgagatccccacacgc

SEQ ID NO: 14240 - DNA, 1780 bp, Homo Sapiens
gagctgctgaggcgcgagctggggctgcagctctgtcaggcccacgggccactcggggggcgggtgcatcagccaggtccggagctacgacacggatcaaggacgagtgttcgtgaaagtgaaccccaaggcggaggccagaagaatgtttgaatggtgagatggcaagtttaactgccatcctgaaaacaaacacggtgaaagtgcccaagcccatcaaggttctggatgccccaggcggcgggagcgtgctggtgatggagcacatggacatgaggcatctgagcagtcatgctgcaaagcttggagcccagctggccgatttacaccttgataacaagaagcttggagagatgcgcctgaaggaggcgggcacagtggggagaggaggtgggcaggaggaacggccctttgtggcccggtttggatttgacgtggtgacgtgctgtggatacctcccccaggtgaatgactggcaggaggactgggtcgtgttctatgcccggcagcgcattcagccccagatggacatggtggagaaggagtctggggacagggaggccctccagctttggtctgctctgcagttaaagatccctgacctgttccgtgacctggagatcatcccagccttactccacggggacctctggggtggaaacgttagcagaggattcctctgggccggtgatttttgacccagcttctttctacggccactcggaatatgagctggcaatagctggcatgtttgggggctttagcagctccttttactcccgctacaacagcaaaatccccaaggccccaggattcgagaagcgccttcagttgtatcagctctttcactacttgaaccactggaatcattttggaacggggtacagaggatcctccctgaacatcatgaggaatctggtcaagtgagcgggccttactctggaaggaggcctcagaggtttctccacagtcctcttctgggcaaattcttgtttcttcacatgccggactagcgttaagaccaatgcagtagcttatttccaagccttgcaaagtatataatatctaagaggaaaggttttgtcatcccagcgttgtccactttgtggggctttgctaggtagaccggagccacactacaggcagggtatgagcagagggatgtatggagtcgtgggtgactctgagcctcactgctgctgcaaggtggggaaactgtaagtgaacccctgtgggtgcgggggagggtatccggtccacagggaggtggccaacgcccccgggaactgcgtgctcataggaacctttccactgcctcctccctgctctcctgtgcaggaatgtctctgagctgtccacgttgatgcttcttggttggcaagacttgggtgtagacatgaaaccatcttactaaaagcgtcttaaaatgaccaattccagaatcaagcgtattccgttttcttcctgcatgatccctgggccctcccgcaggctgagcaagtctgtaaactgattctgggagaaaccaagctgctggccatagggtgtccttgggtacatccaggagtcttcattgcttctgttattaccccgtctcctctgccattttctacagcttgctgagttgtcattcctttgcaacattaaaatacatgctgaactcatatttttccttccttcactgttgtagtaaagagacatatttcatgaatggcattgatgctaataaatcctttgcacaaaaatttgaataaacttccagtggtttcgataatgtaaa

SEQ ID NO: 14241 - DNA, 516 bp, Homo Sapiens
gctgcttttctgatttggatctcattgacaacctggggccagccatgatgctcagtgaccgactgacattcctgggaaagtatcgcgagttccaccgtatgtacggggagaagcgttttgccgacgcagcttctctccttctgtccttgatgacgtctcggattgcccctcggtctttctggatgactctgctgacagatgccttgccccttttggaacagaaacaggtgattttctcagcagaacagacttatgagttgatgcggtgtctggaggacttgacgtcaagaagacctgtgcatggagaatctgataccgagcagctccaggatgatgacatagagaccaccaaggtggaaatgctgagactttctctggcacgaaatcttgctcgggcaattataagagaaggctcactggaaggttcctgagaactgcttcaatgtggtatctttgtatggcaatgtatatagatttttttaaaagaataaatgttgttttgcaaatgtaaaaaaa

SEQ ID NO: 14242 - DNA, 771 bp, Homo Sapiens
  misc_feature (43)..(96): n is a, c, g, or t
gcggccgcccccggcatgggcaccgcgccgcagggggcctgannnnnnnnnnnnnnnnnnnnnnnnnnnnnnnnnnnnnnnnnnnnnnnnnnnnnnacctgcggccgaggagccggggaacccgggcggccccccgcgcaggaagaagtcccgctccggcgcgtccggcctccgccgcgccttcagctggctgcggggcaagcggcgcaagaagaaggcggcgggggccgagggcgccgaaccggccgccccccgggccaagaaggcggaggacaaggccaagagggccaagggcaaaggccgaggctctgccaaggctgagaatgacaaacatctaagtgtagggcctggccagggaccagggtctgcagtggaatgagcaccaggacaacgtcttctttcccagtgggcgacccccccacctggaagagctgcacactcaggcccaggaggggctccgctccctacaacaccaagagaaacagaaactgaacaagggtggctgggaccatggagacacccagagtatccagtcctcccggacggggccggatgaagacaacatctccttctgcagtcagaccacattctacgtggctgagagctccacagcagaggacgcgctctccatccgctcggagatgatccagcgcaaaggctccaccttccgaccccatgactcatttcccaaatctggaaagtcaggcggcgtcggcggagcggcggagcactgtgctggactcccgcagcatgtgcagaaggagcgtgcct

SEQ ID NO: 14243 - DNA, 503 bp, Homo Sapiens
ggtgaccaaaccttcggtaacgggtttaaagtttatttttatggttagtcaattgcagagttcttatttggggggaaggaaaagggggctagtcccccttcttttggccctcacgccaccgcaggcttctgtgtgctgctaactgtatttattgtgatgccttggtcagggcccctcttacccacttctcccagtcagttgtggccccagcccctctccctgtgctgtgtggagtggacaccctgacccccgaagcggggagggccgctgtggccttcgtcacagccgcgcagtgcccatggaggcgctgctgccaccttcctctcccaagttctttctccatccctctcctcttcccgccgcgccgctagcccgcctcggtgtctatgcaaggccgcttcgccattgcggtattctttgcggtattcttgtccccgtcccccagaaggctcgcctctccccgtggaccctgttaatcccaataaaattctgagcaagttcaa

SEQ ID NO: 14244 - DNA, 628 bp, Homo Sapiens
gaaccaaagcggaggtgcaggtcatgtagttaggtgctgtgtgttggtgcaaaacaaagtcaagggctcatatgtcccagatttagtatttagagcttctgttcctgaggagtcacagccaagaacccagcttagactagaaagtctagaagacacacacataatgaagggggaagatgatgctttgtcagacaaacatggctgcccagcctacgtgagccctgagatcctcaacaccactgggacctactccggaaaggctgcggacgtttggagcctgggggtgatgctctacacccttctggttggacgataccccttccatgactcagaccccagtgcccttttctccaaaattcggcgtggacagttctgcattcctgagcacatttcccccaaagccaggtgcctcattcgcagcctcttgagacgggagccctccgagagactcactgcccccgagatcctactgcacccctggtttgagtccgtcttggaacccgggtacatcgactcagaaataggaacttcagaccagattgttccagagtaccaggaggacagtgacattagttccttctaactgctaatccccaaaacctcagaacaccaaagcatccgctagagt

SEQ ID NO: 14245 - DNA, 482 bp, Homo Sapiens
accgacatgactcccgtttgttggaaatgcctcgttgccagagaaactccccaggcatctcggaacgaaactatttagttccattgtgaactggccacgggacagcgtttttatcaacttattaagttggagcactgtaatcgcgcttgctgagttagcagtggtggtaagcgtgtgttaaacacataatgttacgttttaggagagagaggtcgtaaggaagtgtcgtgtcgctcatgactctcttctattagttgggtaacagtggcctcatgtttgtgtctgtgtgtacacagagcccttaggttctgctctgtttctttgccaggtgaatgtttgtggcatgcgctgctgtccgcgcccctctgtcctgcgcagggtttcagctgtgcggcgccctgatttcctccatgcacacagaacctccttgtgtctgtttctctgttcctctgtggctgactcaataaacttttccctctgaa

SEQ ID NO: 14246 - DNA, 455 bp, Homo Sapiens
aggactttcctggagcagaattgagtacacccctcccccaagagcctctggggcaccccagagcgggagggataaaggcctaccccttcagtccacacctctcccacgcgatccatgccaggtgctcccccacacatgcctttcgttcctgccagcctgaactgcaggctgcttggctcctccaaccgctgcacaggctctggccgctgcctggaatgcccactccctcgctatcccataaactcccacaccaaccatcctctcccgggggagcctcccctgtcctcccaggctcctgaggaggccgctgcatgcggtggacagaatggacacaccatagccaccaccatgacaggcacggccgctctgcctcaggctttccgagcctcagatttcctagttgtacaatgggaggcaggattgctctgaccagtaaacatgaaacagtgtgtgca

SEQ ID NO: 14247 - DNA, 890 bp, Homo Sapiens
aatgggttcaggaagtgattcatgggaactgcactcttaggagaaacacttttgggaataattttattgaataacaaccaccactcaattacactaagcttcagaaattgttggatttgtttaattttgctgtgtacctatacattgtttagaaagtttcttttggcttaaactgaccatttccccccttctttttgagttttccatgattaaacttgcccaaataaaaacataacaatccatatgcaaagcatatctgccaccacctcccactgcttcctgggccgcaaacagaaaaataaacagtgattaaaaaaaatgccaaagtgaaggtttctctttcttctatcacaacatagttgggtagttcccttaaagtacatcattgctataagttggtatcactgcaaatctcaagtcccaaataatctctttttctggatagaaagttattcaaaagggagcacaaaagagcaagctttggggcatactgacaaacacttcattggttagaagagaataattttaaaaatcaaataaaattgaggctggcataggaagtacagattaaatacaggttaaatagctaccagaaacacagaagaggtggttaataaaaactgagattgcttcagaggacacaggagggttgatgagacagtctatttcccttccaccatcttccatgagagtcaggaaaagggttctgtgagcaccaaacctggagcggtcacctgtctcttccatacacaggaggttgctaagacccagttagctttaaatggtttctagaaagacttacctagtccaaagtgggttatttgaacttttcgaactttgcaaagcatatacatttgatatcctcatctgagaagccatcttgaaaaaat

SEQ ID NO: 14248 - DNA, 435 bp, Homo Sapiens
  misc_feature (364)..(364): n is a, c, g, or t
ccacctcgtaggacatagttcttcaccttctgtgcagaggatgcgttgataaacagggcagtaaggagagccttagattcagtatctccattaggtggaaggaaccatccattactcttttcaagggtgtcttggagagagaaagcactttcctagatgagggatgaggttgatattgaaatagaccgatgagattatttttaagtcaaacaaaagaaaaataggacaggcctctcatctcctgaatgaatgttaagcaaagaacaacttgactttttagatatgtgaaaaatctcttgagaggatgtggaagcagcatgtaggaggataaatgcataactcacatcagtcttttacgcattanaaataactcgggccattttgaaatctttctttcttgccctgggttcttataagcaatgctgggggaaaact

SEQ ID NO: 14249 - DNA, 511 bp, Homo Sapiens
  misc_feature (41)..(41): n is a, c, g, or t
agtatctgtgtgttctcaaactattaagactctctgggganaatgtagatgttagatttttgtcaaagccttctcagtgtccagagggattatcagaaggtcttttcctttgctctagtagtatgtttaattatattaatagaatacttaagaccaaatcattattgtattcctgagatgttctttacttattagtatcatgactttggttatcaatatttataattaagattcatcattctacatcttgcttttatgtgttttttgtccagatttaactttatgctgacttaaaggaagaaatattataaaacaaaaacctctatattctacaatcatctattggttttggattattttctgcttaagtgtagaagaactagctggggctgtctgggcctgccgtggtatatttctggattttgctcatcaggcaagttaggtcctcgagcccttctagagtccattttaatgacatttttaaaaataaaattaattccatccacattta

SEQ ID NO: 14250 - DNA, 564 bp, Homo Sapiens
atccgtccctctctcacgcatctgcttcatcagggccaccttggccttcttcatctcagccacctcggcctgtagcttcttcagctccctctcgtagcgcgactggttcttaagcagccgggcgtgctctttctggtcggcctgcagcttctgcaggtcccggttcatctcccgcagcctcttctcatagtctgccttgatcttgttggccttctcctcagtatagcactccatggtgctgaggttcggcagcacacggacgcgctccagctgtgtgtctcggatcttgttctgcagcagaatcagcttttcctcatactggtgcttgagcgtctgcaaccgccgctggctgttctccagctcgtcgatcagcttctgcttgatttcgatctcacaagtcaggtcggccaggtccgcctggaagttcacctccttctcctcggggtctgagtctgagtccaccaggctctcttcactgcccgagtcctcatcttcatcctcgcgcccttcctcctcccgacgaatagatcagggtcaatgatccctgccaaaagggcggtcgct

SEQ ID NO: 14251 - DNA, 403 bp, Homo Sapiens
gggatgatatctgaggtgatcatatgtgcacggatagtccacaagaaatcttaatggaatctcaccacagggcgtgtgctacacaagagagcttcacactgatctataattggggtaaagcaacaccttttcaaggatgatgataatgcaaatccagacaacccaaatatcaggcccaatctgcctacagcagaattacttacactctcttctattagaaagtacccttacaagaaatatttattaaatgtcattttgcaagtccaactggggacaaaccacataagatatgttaaaatctttaatgtcctttaatgtgctacttgttttacaactgctgaatgaatagttcaagcgctccgtcagccttatagctccgtcagccttataattcattttagat

SEQ ID NO: 14252 - DNA, 421 bp, Homo Sapiens
gtatcccttgggaggctgtcaggtaggcaaatcacacacgcacagagctaaggtggaagttcgtgctctgtagagatgtgtcagagtgagagagaaacctggagggaagatgtgctcggtttttatgaggaaccgtcaccctggggtaacatggttagaaaacacctgactgagcaggtggagatcccaagccgtgagtgagatccagggtgccccacgataagagcagcagatgcagtttgaaagaacaggtgatgatgtgggtgtctagggaaggtttagactgttgtattcacggctttgcatttccatcctgcaggccatggaggccttgtcttgaaggattttccagtaggctttggggctgcagctttggctggtgctgtgcaggtgctttcatgggaaggacgaggtcagcgta

SEQ ID NO: 14253 - DNA, 367 bp, Homo Sapiens
ccagaagcagcaagaatacaggtcaaaatagggagatttcaatacgggtatccagagaccaaagaccaacgccaggagtccctgcttccagaagaattagaagatcagatgccaagataggtggcaaaagaatctaacagaggtagcacaaccataaacaaagaagcaagtcacacaagggacctttggtagctgtggtgggtgtagccaaaggtgtaagagatccaggagctcccattcagctgatcccttttcaacagagcaggagcttgctgagagacgaaaagcagttgactcctggaacccagtgccttattctgtggcctctgctgcaatccctgctgcagccatgggggagaaagcaaga

SEQ ID NO: 14254 - DNA, 339 bp, Homo Sapiens
ttcaagcatgaatggggaacctcagaatgagtccaatgggagtgaggaaatgcaaacattgaaaggagaattgctggtgcagatttgatgacttgtatgttcccttctgatctgccttcatgcgactgatttcatgagctctgcagttgggagagagcaattgttccaggctctctaggactgggacgggtcacacaatcagaaccctcatctaagggagatgcatgtgccatagatgagaagatgcaactctaagcactacgagtccagaaaacctggtgtttgctaattcagttcacttctggttggcataaagctacacaggccaaaatgaccctg

SEQ ID NO: 14255 - DNA, 724 bp, Homo Sapiens
aagaaaaggggcctctagaatttgaagcttctgatttctggttatgaggccaaagatcccaaaggtccttccagacacctcaggagggccctggggggcagaggctgggggctgtacagccaattacctcagaggggaaggcacccactcattccgcaagcgggggaaatcctgctctcctcccacagctaccagagcttcagatgggactcagatctgtctgcacacccagggctacagttggcctaatgtgactcttacctgcccataaacctggcccagagggctttatgggccagaatccctgggtttagtagctacatggacagccatatgagcaccacctaattaacttaattaactaaccccaggcctttggaagcaataggagatgagagcatcatactgggagtcaggagtcaagtgctgtgttacttcaagtaagccccatccctctctgggaaaaaagatcagggattgaatataagtcttgccatgatccaccccttccagtataaacaggccctcctggcttcatccaaagcgtatccaggtgatttggggccaagctgacccttgaacccaggtgtccatgctctctgtcccccagcttctcagctctgaaacccagcatgaggcccatgtctggcctcccagtagctctccatgtggctcctgggttaggactggcttcaggagccccaagccttgtgggtgggctgca

SEQ ID NO: 14256 - DNA, 461 bp, Homo Sapiens
ggagaggagagaaagaaatcataggctaggatggtagagcagcaggagagaagcgagaagcagccccggttcccactccaccctggcctctctacctgtgcccttgtttcatatggggaaagaaggaaacttctgtcttacctaagtcattatttcaagtgttctgtcacgcacaaccaaattaaatcttaccattatgcttccgaaaataatttggaaaacaagtccatgtagactttatgtgtgtctttttaaacctattactcgacgaacacacggaaactcttttctagtgaatgatcaagtatttgtgcgcatatactttgtcccgagaattaagcctaacactacgagagaatataaagaagtccaagacggagttcttgtccttaggaagttagtgagtttgccactgagaaaggacaaacacgcaccacctatcctctctctctaattacgtg

SEQ ID NO: 14257 - DNA, 431 bp, Homo Sapiens
gagagagggacagaagacaagctctgactaaggatttcggcaatactcctttgcatcgctttaaaaagccgggctctaaaaacttccagaatatctttccaccatcagccactctgcatctttccaacattcctccttctgttacaatggatgatctgaagaaccttttcatagaagctggatgttcagtgaaggcttttaaattctttcagaaagatcgcaaaatggcgctcattcaattgggatctgtggaagaagcaattcaggccctcattgagcttcataaccatgaccttggagaaaatcaccacctcagagtttccttctcaaaatctacaatctgacttttctgtgaatttttctcctaaaactggaccataatttcagtaaaaccttcagacatagactgaagcagctcaagaccaattttg

SEQ ID NO: 14258 - DNA, 772 bp, Homo Sapiens
aacgtcgtagaggatccaggattcggtagatcctgagctagcattcaaatgcgtcccagcatattgtgagcctgtgtgactggtgaggtacagacattaggtggccaaagtgctagattagcgctgggtcagctgtggaagaatcgcctcagcttacagatagtcagacagatctaactagttttccagaaagcctgggaagctgtgtgttcaacatttcccaagggattctgatcaccaggcagcttgggaaccactggggcaggccaaatagaatattttgggcgggaaagaagcacccgatttaaaatgaagcgtaaccagaggagttcagaactgggaagagagtggtagacttcctgtgatcttcagaaatcatctacctggtaaaaatacatgctgtttagaatatctgataggtgtttccagctactaataaaaggtaatagtgcttttgtgggggaaaaaattggtcatggtgaatggagatcgaggaagctcgggacaagggaggggtgggctgcctgattttgtccagttttccaaatatccacgcagtgaactggagtatcctaaacatgagaatgtacagttgacagttgtaaaaaatagggatctgtaatgaatgctgtgcagccccatatctcatttgggggtaggaaaatagctgaagattcatgtgcattatttgacatttcctttgtcatctgctttttaagcaaaaaagggttttgtgttagaaattctacttgagcagattataaagagcttt

SEQ ID NO: 14259 - DNA, 691 bp, Homo Sapiens
  misc_feature (340)..(340): n is a, c, g, or t
  misc_feature (474)..(531): n is a, c, g, or t
tgttgagaatatccaacaaaaaacagatgagaaagtagatgaatcgggacctcccgccccttccaaacccaggagaggacgtcgacccaagtctgaatctcagggcaatgctaccaaaaatgatgatctaaataaacctattaacaagggaaggaagagagctgcagtgggtcaggagagccctgggggtttggaagcaggtaatgccaaagcacccaaactgcaagatttagccaaaaaggcagcaccagcagaaagacaaattgacttacaaaggtaatgtacgccattcttcctcaagtgggaatttagacattttgttttaatcggagtatatttntaagtgccagtcaccccaaacacctaagcatttgagagagaaacctgcatctggttttcctgggtccgtttataatagcatctgttattatctcataacttccagttttaaggcacaaatttgaagaaaaatcnnnnnnnnnnnnnnnnnnnnnnnnnnnnnnnnnnnnnnnnnnnnnnnnnnnnnnnnnnaacaagacaaatatttcttttgcttagtgcctccctttttcattagtatgaaagtatgtatcttaaagggttgctctacgaattaaatggatcagtaaatataaagaaagcgcctagcaaagtgcctagtacaaaataaacgcccaactgttattgttaa

SEQ ID NO: 14260 - DNA, 637 bp, Homo Sapiens
ggggccctcccgctaattcagtacagctgggccctggaacgatacgagtggaatgaggtgagaacgtcaaatccatcgtgcccatgattcacgtgtcatggaacgtggctcgcacggtcaaaatcagcgaccccgacttgttcaagatgatcaagttctgcctgctgcagtccatgaagcactgccaggtgcaacgcgagagcctggtgcgggcagggaagaaaatcgcttaccagggccgtgtcaaggacgagccagcctactactgcaacgagtgcgatgtggaggtgtttaacatcctgttcgtgaccaagtaagaaggccacccccaacacgtacctggtacactgcaagggctgtgcccggcgccgcagcgcaggcctgcagggcgtggtggtgctggagcagtaccgcactgaggagctggctcaggcctacgacgccttcacgctggccccagccagcacgtcgcgatgaggccggacgccccgcccgcctgcctgcccgcgcaaggcgccgcggggccaccagcacatgcctgggctggacctaggtcccgcctgtggccgagaagggggtcgggcccagcccttccaccccattggcagctcccctcacttaatttattaagaaaaac

SEQ ID NO: 14261 - DNA, 957 bp, Homo Sapiens
gggctgccaggccagacacgctaggttcttccaaagagtcccaagcccagcacctgctcctggggccacgacctccctggccgtggccacccgtcctccgcagcaggcccctgctgtccccccacctgctggctgagctcctcctggcctcgtcccctctcagatgtagctgcaccacccccgctctggctactaggctctcccggctgggcactgcgtggccttgcccctctcccgctggcagctcctcaggggaacaggggctaccagaggctgatttctcccctctcctgggccaggggaggggtattatccctgcctcctgcccccgatgcccaaagcagcatcttccagcactttccatcgaggacttgggtggcagagtgtgggtgcagcctggctgttgctcacccaagtgctagctctgcacttcgtgtctgctgagagcaaccagaccttccatgtcctcgggcagctgcaactccccgcgagaccccgcagctgggtgggatgaacaagcaacgcagaccacaagcgagtgcctgggagggagtggcccagggtggttctggagccattgtgggtgagggtcgagggccaccgaggtcccgcgcaccgctgcctgccctgcagtggctttaacagttagttttgccaaagcctctccactcaccagcaggcggtctctgtcttcagggattgtgcctgcgtccctcgggcacctgggcccccccgcttggctccctgggggaatggcccaggcgggccgcggttcctccttagggccttctccccgacaaggagtccgacggggcggatgctgcatcctctgcctccctggtcgctgggcttcaccccacctgggaagggcagtgtgctctgtgggggctgcaatcaataaatgccgggagctgacaagaaaaaacaaacaaaagaaacgggggcgacaagaaaacc

SEQ ID NO: 14262 - DNA, 579 bp, Homo Sapiens
gcggccgccaaactccgtaaggatggcgtcggccgcccggcctgcccctccctgggccccgctgccctgcacctccgccttcagccataggcgctggaggttgtgctgacgctcgaaggtccagaccagggcctcctcgcgactgcgggcaaaggtgcaccggtttcggtggcgccggcagccgagcccagggctgtagtagtggcagacttggtagcacaggggccttgggaaggtgggccggcagcccaccacgcgccagaccttgctcttggtggcctgcttaaagcgggccagcaggatctcgcgggagcagtcatgctccaccctacggaggacgtaggtgctttcattgagccgctgggtgcagcgggagcagcccagacacaggtccaccagggcacacagccgggccagggacggccctctggtggccgcggggctgttgggcagcagggtggaccctggaggcgccacctcgaacaccagcttggctctccagggaggcgtctgaggctcctgagctcacgggtccacgcagtccactggaactgttggccacggttcgaagcccttctg

SEQ ID NO: 14263 - DNA, 791 bp, Homo Sapiens
tcgctggctctgatctccgttatccaggttatggctttgggcatcacagggacccaggtcagtgatgcaggggctcaggtctgttgcttcgagtacagccaaaggaatgatttcgcccaagagttgtccgcagcttccggaagctaggaaccagccttagagtgctccatgccacgctatcctgatcttgcgccgcaagcgctctcagacactagctatgtgcagacccgaagtagctctgggtgcagcagctgatgcagcatgtggacaagacaccatccccacagaaatcagcccagggttgcaggaagtacaggggggcctccaagtctcgcaagaaagtgaagcgctcctaaggctgccataggactgagcggtcacagacccctaaagggccatagctcagtgagcaggctggagccctggaggccccccacaaccctcaccagcgtttgaagcctgaacccaagatgcaagaaggaggctatgctcaggggccctggagcagccaccccatgctggccttgccacactctttctcctgctttaaccaccccatctgcattcccagctctaccctgcatggctgagctgcccacagcaggccaggtccagagagaccgaggagggagagtctcccagggagcatgagaggaggcagcaggactgtccccttgaaggagaatcatcaggaccctggacctgatacggctccccagtacaccccacctcttccttgtaaatatgatttatacctaactgaataaaaagctgttctgtcttcccaccca

SEQ ID NO: 14264 - DNA, 236 bp, Homo Sapiens
  misc_feature (140)..(158): n is a, c, g, or t
gtgcataacttggatgggctgaaggaggtgaggacagattggggaagggtggctttcattccaagatccagggatttggggaaaaggaaggaatttgatgttttttggggtgggaggggagggtgtgtttttttcccccnnnnnnnnnnnnnnnnnnntcaagagtatgcaagcatttttattcctcgcatttttttgtgggcctggcaaataaatacctgtctcctacgaccctg

SEQ ID NO: 14265 - DNA, 249 bp, Homo Sapiens
tgggaggggaatatgcatttctggagtccctagcctatgatagataatatatgtgaaaccacatggctttattctcacaacaaacctcattaggtcacacctccggggaaagaccagaaggatcggtgtcactatgtgtccttcccccttttcagtacaaagccaggctaatctgagcgcgaagcctaccaaccaaaccttggcggcatataaacatccctaactcagcacatcatccactcacctcca

SEQ ID NO: 14266 - DNA, 427 bp, Homo Sapiens
gaggcgagagagggagtggatgaggaggataggaggaggggtggtccgccgtcagcccaatcctgagcccctgcgaattctgtcgtcccggaagaagagtgctggggctggagagctgctgtgctctttctccgggctgtgaagaaaatctgcagccaacgcgcgcgtccatgcaacttgttttgggttctgtgaacgactgatccccaggagagggaagacggcctggtcctgtgtgcagcccaagcctgtcacttagcattgtgcaaatggctacaaatcgaatgtcaattagggcgcctgaagggaaaagagtagtgatgggagagggcacctgctgtaacccttgactcctctgaactgagtgaggtgttcctcttgggactcctcctggaagtacagatctgtggaagatgagcttccctgg

SEQ ID NO: 14267 - DNA, 133 bp, Homo Sapiens
tgctggaatgatagggttaagccactgcacctggccaggagattatattttaagatatattaaggcatctagcatggtgtctggtttttcttctttgggtatcattacctaaaagtttcctgacctctctcgc

SEQ ID NO: 14268 - DNA, 320 bp, Homo Sapiens
agaggaggtgacgaagcgagagcagggtgtacataagcttaataagtgggcagaagctggattccaggcttcctatatctgtttcactcaaaggagcaagggagctaagtaacagtattacagtcactagttcttagtagtgcctgaagtgacttaaccttggtggggtggatgatctttctggaaacaaagccaacatttcaaaatcagtttaaggtagaattatctcttattccaaaaaaagtttaaactcctttacttactttatggaggtacattttacttataataaactccacacatataacatgtacaattca

SEQ ID NO: 14269 - DNA, 368 bp, Homo Sapiens
gcgggagttgtaaatggagggccatctattatgtgtgactggtattgtataagttactaagacgttgttgagctgatgttggtcttataaaggcgagtctagtccccaggcaagaaggagttctgcttggggaaagggctgtaaacatctttgtttaaactataaactaaattcctctcaaagacagttcagccgacacccaggaatgaacaaggatggcttgagattagaagcaagatggagttgattcagttagagctcttccgctatctcagccataaatccgcaaaggtgcgtccgaataatccacctggaaattctctggccctacctcaaaagtgcatccagagtctcaccccttctcactg

SEQ ID NO: 14270 - DNA, 549 bp, Homo Sapiens
tcctgcctcccaatgccctctttcggcccagcccaagctaaagcctcccggcggccttccccagccccgcttttgactttccgtggcctctgcaggcctcgacaaaggcccagcctcctgccctcccgaaagcctgcacaaggcccaagcctttgcctcacagcggactctccacgcccaagctagctgtttgcttcaacttgcggcctcccgagtccaaagctccttgcctctcggacgcttcaggcaggcccagctcccgcctgacaagtggcactcttcaggccaatggggcgtcatgtgctgacaacggcctttccaggcccagtttttcccttccagcggcctctccgggcccagaacctcctcaagttcggactctccagacccacttgcaccctccgggcgttctctccgggcccagctcttcttcctggttgggtctccaggcccgattcctgcctctcaacaacctctttggactcagtgcctacccatctcctggcggccttggtcggcccacagcttcctcaagccattgcactccgg

SEQ ID NO: 14271 - DNA, 595 bp, Homo Sapiens
cgctgaggatccgggatgaggagtcactatatcaattctgggcctttcagactggttatgtccccgagaaaggggtagcaatggacagactcagactgtgatgagaggggaaaatagctaggtgtgcgcatttcagagattaactgaactccctttggagtcacattgtactcctagcttcgtgccaggagcatattattaaaacaaaacatcttattttaaaacagccttaccactgttccaacttctgcacttctcagtcctaaactcatcttctcctcacatgcacaccatcagaagatactgccccaggactttcagtatctctagggcctaaggataaagcagcattaatggcatttggcagaaaatcccttcccacattgaagactcctcccagctcaacacagtgaagaaataaatgacaatgtaagagaagaggcagcagaaaccagagcctgccctttcccacataaaagaggcacagaaattccaggaattcatgaaaatggcatcatctcttgccagaaggccaccagctggcactggttgggagtcgcattatcacttgtatctcctctggactgaagtgcaa

SEQ ID NO: 14272 - DNA, 386 bp, Homo Sapiens
taccatgtagaggagtgctgttacactcataacttcacggaagcgaggaggaggtgcgaggaaaagccggctggcgtgttaatttgggattttctctctttgaagcagaagaatacaaacacaactcattttggacatgtggctgaggttgaagtattttcagaatactcaaggaaagacgtttaggacgtaggtggtgatataccccagccactcaggttgatttaggaagcaagaaattgtaggaatggatgagatgacctgagagagagtgctgctcaataaaaatataacgtgagccacaaatacaagccacacacgtggttttaactttcctagcagtgaccaggcgtggtggctaacatctccctctctcgctaaagcag

SEQ ID NO: 14273 - DNA, 438 bp, Homo Sapiens
agagagaggaagaggggtctcgaggctcatcgcgacagaaggtttgctagtagctaggtgctctcctccctgtctagtggctcagatccattacaggctagctgtaactaactcccattaccttttaaacaacagaaattcatccttcacagttctcgaggcttttcactgttgtgtttggaggggagatgcatcaaagcacaagtgagtgcttccacctcgatcggacgttacagttctttcaagaaacctagtgcatatctcgttctatgctggccgctgcaccaacacagcaaacagggcctgtccactcctcaggatgctttaaagaacagacagacgagctggcaggaacctcagacgcagtacgtgctctgggtgagaggtgaccagaatactgcgggagctgcgttgacgccatccatgatgggaagtgga

SEQ ID NO: 14274 - DNA, 294 bp, Homo Sapiens
aatagcgagagagggaaaggggatacagctttaatacatgtatgggagcatatagacttcgctcttatcaaatgttttcctatttctattaatatgggctgtattcctctggatattgtgatgccgcttcctctgtcactgcctcctttccttttcgttgcactttaaacattggcttccacctgcaatctacccttttcttgaccttctcctcactcctcagttttgcatgggcaacttcctttcaggttctttgcagctagccacttgtatgcccataaatcccagcttaaa

SEQ ID NO: 14275 - DNA, 300 bp, Homo Sapiens
gcggccgcgaagccccgcgtttgcgcgtgcgcttcccgcccgggaccgcccagaggtcccggactaggggcggactaggggccgctctgcctcccgccccctagtggttgtggccgctctgtcaccacggctcccggggcctctgtcggctccactttggttgagacgtctccacagcccaacaacggcggcgatctcaggagaggcaggagaaaatacggcgcgctcggcatcgtccttctgaccggggactccagcatctcagtcatcgcgtcaccaagccccaggtgcaggttctgg

SEQ ID NO: 14276 - DNA, 1212 bp, Homo Sapiens
ccagtggagttctccctgtttcacaggttcatcatgcctagtggcgtataagaagaccccgccaccggtccctccacgcaccacttcaaagccgttcatctcagtcacagtccagagcagtactgagtctgcccaggacacctacctggacagccaggaccacaagagcgaggtgactagccagtcgggcctgagcaactcgtcggacagcctggacagcagtacccgaccgcccaactccatcagcatcgatgccggtccccggcaggcccccaagattgcccagatcaagcgcaacctctcctatggagacaacagcgaccctgccctagaggcgtcctcgctgcccccaccatgacccctggctcagagaccccctccagctccccagcagagccggcacagccaggggcctgccgccgagacgggctactggttcctaaagcctactgcaggcagaaacagagcggctggaaggctggtgctgccagatggacaaggagaccataagagaacaacctctctgaagaagtcattaggacaagtcctcagtgctgtggacagtgcccagctactgatgtcccagaaattccagcagttccggggcctctgtgagcaaaacttgaacccgtgatgccaacccacgccccacagcccaggacctggcagggttctgggacctgctacagctgtccatcgaggatatcagcatgaagttcgatgaactctaccagcctcaaggccaacagctggcagctggtggagacaccccaagaagaggaagggaagagaagaaaccaccgcgcctccggtcccaaagaagccagccaaatccaagccggcagtgagccgcgacaaggcctcagacgccagcgacaagcagcgccaggaggcccgcaagagactcctggcggccaagcgggcagcttctgtgcggcagaactcagccaccgagagcgcagacagcatcgagatttatgtcccggaggcccagaccaggctctgagaccatgcaggaggaaagaaacgattttaaatcattaaaaacacaaaaactaagtgcgaacggaacagagttttctcaacctttgctatggttattctgtctagagaccctgagccaactttcaaattgacgcatacaagggctcacaatttggctttttttgggtccctcccagctttaggttatgaagattttactcacaaaaa

SEQ ID NO: 14277 - DNA, 627 bp, Homo Sapiens
  misc_feature (432)..(432): n is a, c, g, or t
gcggccgctccccgctcatccacgccgtggaaaacaacagccttagcatggtgcagctgctgctgcagcacggcgccaacgtgaacgcgcaaatgtactccggcagctccgccctgcactcagcgtccggccgcgggctcctcccgctggtgcgcacgctggtccgcagcggcgctgacagcagcctcaagaactgccacaacgacacgccgctcatggtggcgcgcagccgcagggtcatcgacatcctgagggggaaggccacccggcctgcttccacctcccagccagacccctcccctgaccggagcgccaacacctcccccgagagcagcagccgcctcagctccaatggtcttctctccgcatcaccatcctcctcaccctcccagtctccccccagggacccccctggattccccatggctcctnccaatttcttccttccttccccatctccacccgccttcctgccctttgctggggtcctccgaggccctggccggccggtgcccccctccccagctccaggaggcagctgagggggatgggggggcagatcttggactcatgaggaggggcccccctgccctgtggggtcaacccttctggaaactgtgaagatct

SEQ ID NO: 14278 - DNA, 596 bp, Homo Sapiens
ggatcctgccggtactgggacacttgtgtgtggctctgatccatatgcaacccactgctatgaagcacgccatcttgttccacgagatttcttgagattgtaatggaagggaggtccaggctttgagggggaaactggggtgtgaattcacttccctgggaaggcaatggatcgctgagggcttgaaagggtagcagtacatccggcatgcctagggcagggtctgactctggaggaggcgtgattggtggaatttcgaattcctcgtccccaaggcttggtgtgtggaatgtctgctcactggcagcgaagaacgcattgttcgcctcagccatattcatatagttattattatttccaaacttgctgtagccgtagtaccccaggcactgcgcgaagtccaggctggcagggtccccggccgccgcggggtagaacctcacatccatgccgaagctgggcccggggccgggggccgggactggggttcgccggggccgggacccgcctcctcgccgccgctagatccaccgtcgagggcgcccgggggtggcgcgtgggactcgcggccggaggggcgccgggacccagagccc

SEQ ID NO: 14279 - DNA, 564 bp, Homo Sapiens
aaagagtcattcaccagatatatttgaagtctaagctctttgagctatacacgtgcacaaatgattcagttggtggaaatcttccccttccccttcattgttaaagttttcaaacttaaaatagtgctaaagagatttgcataatgtgcgtcatggaaatgctgaggcgattctgactttcacagtgctaggaggttcccttgcaacacttcaaggagtctttccatttcttatcgttctcctaggaaaagcccctcttttcccccctccccaaacccaacctagtgaaagaattacttgatctgagacaggttaacattgacacagagcaataagttttacctagactaactccagaggccatacacttcattgtgtttcttttatgactacacagaatggtcatttcaacttttactaagttgttaaaaatgtcagatgtgtcttttaaaaaacatttaaaaatcattttcaaatactttctctcatctagatttctttagaacctgcattctggaaattcagggtagcttaaaaaatcaagtcaaatgacccacagatgat

SEQ ID NO: 14280 - DNA, 593 bp, Homo Sapiens
gcggctaaaaggtttgggccggggagttccccattcgttctccggggagggagggactttacacctacccctcaccggaaagctagacccgcttcagggccaggagtggcgtttccgcacaggatttcctaagacgagagggatttagccaagagcacagacttggattccttctgtccctccccacctttctctcccaatgaagaaacgtttatatcctgtgattactctaggaaaggggcgtattaacggtcctttgcttccccgcaggggagaaaaagcttgacgaacttcacagaagagttcaagcttggaaataatggagtttatagagaaaagatatatttttaaaagctctaggtcagaagtactacacagtgcttttaaaaagtgtttaatgagagtttacagacagaagcccgaagtggaaagaccttatggttttgtagatatggtgactccagtctttgttgtataaaggttgggggagctgataaggtttttgtacagtattttctccttcgttgtattgatttttgtataaaaatgtaacttctacgtgtctaacacgtattaaatattttgaagcaacg

SEQ ID NO: 14281 - DNA, 604 bp, Homo Sapiens
gttgaagaacagacccaagctttctttgaaggctttaatgaaattcttccccagcaatatttgcaatactttgatgcaaaggaattagaggtccttttatgtggaatgcaagagattgatttgaatgactggcaaagacatgccatctaccgtcattatgcaaggaccagcaaacaaatcatgtggttttggcagtttgttaaagaaattgataatgagaagagaatgagacttctgcagtttgttactggaacctgccgattgccagtaggaagatttgcttgatctcatggggagcaatggaccacagaaattctgcattgaaaaagttgggaaagaaaattggctacccagaagtcatacctgttttaatcgcctggacctgccaccatacaagagctatgagcaactgaaggaaaagctgttgtttgccatagaagaaacagaaggatttggacaagagtaacttctgagaacttgccccatgaatgggcaagaacttatttgcaatgtttgtccttctctgcctgttgcacatcttgtaaaattggacaatggctctttagagagttatctgagtgtaagtaaattaatgttctcattt

SEQ ID NO: 14282 - DNA, 701 bp, Homo Sapiens
ggagaaagctgctttctggagcagtttcagttttatttttgtatttaaggctgaaggacagtttcaataaacatgcttcttcccagagggatttcaaagaaagatcgtttttgcatgtcatatagggggagaatgaggacatgagacaccaagaagatgaagttttcaggagcagaggagaaactttacaccaacatgtctgaacttcattgactcactacctggagccattttttagctgttgagttaagaaacagaaaaaggagcctggggcttctgactctttcaccaggcttaggggagtgagaggagggtttagacacgggtagggcctcttggccccttgggtgcagccccgctgagccatctcctcctttggctgggtgactcctttctgctgccttgacaactcctggaggagaaacagatggggcctctgggctcctcccagccctgtagggtggggctcctgccctccttcttgaagtttacctgttgctgccacaagttctgctcccttcgtctttcctttgaatcctgggtggtgcaggaactagccttgttcagtggacttggggagaactggaggggaaattcgctgtgttttctgttaagccagcactgaccccaacaactcccctctctagtccaacttcccaaaagtctaaactgaaaacaataaactcaccttctcatggaaa

SEQ ID NO: 14283 - DNA, 788 bp, Homo Sapiens
tttttattcggacaggccacatgatgcatagagcctctttcatgtgacttgtgtctactgcttaaatctttatgctgtgttgatgatattatattgacatatgaagctgtatatgtgtatgtattttgtggagaaagggattacaagatgtatgagtataatgacttgctaacctttcaggattcagagaaagatgaagaaagaccatatccaaataatacacttcatcactttcatgtgtataaatgcttaaagtaccatctttgttgaggtggttcatgtatccagtttatccagtacagttatttgtcaagcttagctttgatttcaaaggacacgcttaccttgtctggcataagaagtaatgctcatgtctgcagtggttgggtaggtcctgcttaggagaattaaaaaattcctctttccgtttggttgaatgttgcagtcaggaaccccaactcacttggaatgtaattatatgtaatcatttcccttgaagcttatactttataagggaagaaagaattcaggtgatatgggaaaactgcttggcagaccttcatcttctgcctcaactgtaaaccacatgtaaatgcttaatggagactgttttcattcttgtgatatttaacattcagaaaattacttcagctttggaaatactcaggctgtttttattctgcaggtaagtgttttgacttaagtactaatattccagaaatttttgaaagcagtaaccttaatttcctatgtatttcattccacttttgcatataggtcaaatagca

SEQ ID NO: 14284 - DNA, 1162 bp, Homo Sapiens
  misc_feature (211)..(227): n is a, c, g, or t
cagtgctgcctcctcctgagggagggaaggtaccagggagaacctgggaggtcctggagagggccctgtccagttgggtgatcaggaatcaaaccagcatcggaaagacttcccagcaccaagcttgagctgtgtcgtttcgtggagggggcagcgaggatgggcttgagctgttgagagatttctgccctagagatggcctttgtatatnnnnnnnnnnnnnnnnnacacaaacacatcagacactccgtcctcacactggcaggacggtgttcatcgcattctcttctgtgaccagcctctaggctagcggctgcattcgtggtctgtgcaaacacttcgtggttctatatatcagcagcaagtgtgcaaaataaaggacctgttaactcagatttctggatattttggtggtagcttctagtcccagaatctgtgtttttaaaatactacatgacattctgtctattcaatcacctggtggtcatctttcttgtactaattaactgttgatgagcattttggatattctaggagaaagcctataatttcacatagtttctctttttcatgtaactgtaacctaaatgtattacttctgataaaactatatatcaaatgtcactgcaaattagttttatatctgtcaagtgagatttgtcttacttatttttgttttggttgccctggaagttatggccctgaaaatcgtctccctccccttctcttgctgtacagcatgcgttctctttttgtggttgctggctgggtactgtatttaatgaagtagagaatagcacttgcaaaaatacagtcttggtacctagagactgtcatgcagatagtataatttggtatatgtgctaatgcattgagtagaggattattttaacacactattttgcttttgtattttagttaaaataatcgatggggatgtgtagcccccccgtgtgaggatgacatcaccacatttctagtttcatggagctcaagatgtcttgtgtctgtgtggctagatggcctctgcttggtaatcttatttttaggcctaaaattcccacttaaatccaaagtaaaaatggttatactgaagcataaaccttgcctgtgtaattttaaaaaattaatagagctgtgcaaaccctgttaaatttgtaaa

SEQ ID NO: 14285 - DNA, 480 bp, Homo Sapiens
tcaggggaaggggtgagggactcggtcattgcccaggcagtgagccccatggctgtgaggacacagaagcccactctcttctcgctgctgttgcaggaaggctgatggcaagaaaggaacccggcctcctactcagatgaggccagggggtggcctccccggggactacctgggactcctgttttacctgcagtctcctggccccacctctagtgagccagtgacccagccgcaggcagctcctctgtctggagacaggacagtggtccaagcaactgcctagcaaggggctgtgtcacagaaacagaggtgatttgaactctcccagcctcagtttccagcctcacctttaaggtgggggtaacgacttttttctacccaagcctcctcctccctggagagttccctgtctttgagttcagagctcctccaggctctgcaacaggccatcctgtcctccccccagcccagcggattctg

SEQ ID NO: 14286 - DNA, 347 bp, Homo Sapiens
cacgtctcttcgctcccctggggcctccgtctcctcttccctcacgtctttatgttcctcctcctctgacccagccccctcagaccgctctgggccacagatattgacccccctgggtgacaggtttgtcatacctcctcaccccaaggtgcctgcccccttctccccacctccctccaagcccaggagccctaacccagctgcccctgctctagccgcccctgctgtggttcctgggcctgtttctaccactgacgccagtcctcagtcccctcccactccccagacaaccttgactccactgcaggagtgtcctgtcatctccaaagaccagtcacccccacctt

SEQ ID NO: 14287 - DNA, 477 bp, Homo Sapiens
  misc_feature (351)..(413): n is a, c, g, or t
ccaggaggtttctggaaggaccggtgctgtctccccgaacatcgtggtctccccgaacatcgcggcctctccgaacatcgccctctctccgagcaacgcgatctccccgaacatcgcggtctccccgaaaatcgcgatctccccgaacattgccatctcaccgaacatcgcgatctcgccgaacatgcccggctgaaggcactcagttcccctccgcggctcctttccaccgggtctgattcctgcggctgctgcttgccccgcaggccaggaggcttctggtagcaccggcgcgatgcccccgaacatcgcgttctaccccaacatcgcgatccctccgaacatcgtgannnnnnnnnnnnnnnnnnnnnnnnnnnnnnnnnnnnnnnnnnnnnnnnnnnnnnnnnnnnnnntcatcacggtacccccgaacatcaccttctccccgtacattgcgatcccccgttcactccatct

SEQ ID NO: 14288 - DNA, 532 bp, Homo Sapiens
tagacattcggggggtgcacgagaccatctgggaatgagtctgctgcagagacggtcaccttggagaatgaggagcgagccggggaccgggttcagtggctggctgaagggcttgggctccgagggccgcatgtgcaggtgggccatcatggcctgcagccgctcgctctccttggcgagctggatctccagctgctgcaccacctgcatctgtacccggcactgggctgtactccggtcatccagggcgtgctctgtgttgaggtgtttgataaactggcccaggtcttcacacagggtctcacagcctggccacttgcactctccgtgtccgtacagggggtgggagccgggggtctcctcgtgggaagagctgtctctccgagatgtgagcacagtaggctgtccgttgggcagggtatggtgggagagggggggtgagaccttggggggagcggcaaacgaggtagcggtggcggccgtgccacgtgaggtccagcccctcctgcttgacgctcctcccaagaatctt

SEQ ID NO: 14289 - DNA, 349 bp, Homo Sapiens
caccatcatcatctacctggtggctccggccagaaaacagggaggcatctttggatcatctcaccctcaccacccacacccgggccaccaccaagactcttcaattctacctccaaaaataaatccctaccccacttccctctgttctcgttgccacccctgtgtcaagccatcaccagcttggccctggaggccagcacagcctccttcccgcctccctgcctcctctctacccccaacagccagaataacttgcagaaaatgtaaatcaggccccatctcattctccttctcaaaccgcccctatccccaagggcttcctatagcatgtgcaccaaaatcgacaccc

SEQ ID NO: 14290 - DNA, 643 bp, Homo Sapiens
tgacaaggaagcttcttactgcttcaccgagtgctacaatacttgctttgatgtcacattaaacaaatgtgcactgtctctttgttctcccgagtgttctcggacacagtttttcaccgaggagaacaaagaccgcacactggcaataaagcaccgtacatagtaggttcaggaatgtaacacgccatgtacatccatgtcccaggaaagggctgcggctcatcctcacctcacatccgtgtcctcttcccgataatccggattcaggcttgtggtcgcgcaggcgcactccaaatgctcctctaacctcacctggacttcttttaattttggcttcttcctgacgtattccaccttggccaccttgacgctgcggtggtggacgaaggaaggctggcacttgacactgctcgtgttgcagcagccggtgcagcgtttcacctccacgcacgggggccagatcaggaagttggcggacgtggggtcgacctgactccgaggaatctcgtaaatgaccgtcctggtcttgcagacagcggggacagcttcctcgatgcttctcttcctccgaatgggcaggggcgctttctcggggaaaatgttagtggcatggaccccgtgagctcttaggctggtgtccaaa

SEQ ID NO: 14291 - DNA, 360 bp, Homo Sapiens
aatcagcatcgctctctgggtgagtcatgtctgggcaaagtcagcagccttcactttcatgccaggtgcttcttcccataatgagtgagaaggccgtgcaagttgttatactcagatggcataccgtgcactggtatggggtggaggatatggcggggttggctgaagctagctgcaggcttttctcaggggacagtcttgcatcctctggacattcagcttcctgctccgggaaaggggtgggtatactgttttcacaattcacagggcctgccaactcttcggatgaaagaatgggcttctccacagcatctttctccttgatgatgtccagtagcactgactcatcaccattcatgg

SEQ ID NO: 14292 - DNA, 312 bp, Homo Sapiens
tctagaggatcccggtggtctgacagacagcaagctgcactttgatttcatttgattcccttacaaaatgacattaaggggaatgtgaggcacaggagactcgcctgtctgggaagggcagcaagctcatctctcctggacctggtgacctacctctgtctaccagacaggtgcggaggacaggagctctggccacaaagaaatggacagtctgaatgcagcacacagccctggggtctgggatctccaccgtcttctgctcctcagtcaggccggccccccagccctggccggccccccagcccggtccgg

SEQ ID NO: 14293 - DNA, 520 bp, Homo Sapiens
caacttgggtcttgttgcaatagtctacatatgatgaaaaaacacctggtggtagttttcctcttctctgaaagcaatggctagcatttatggagtattactattgctaggcactgtacgaagcactgcgccaatgtgatcacatttaatactcatcacgacccttcaaggtagtgactattcttgctattatctttaggccagaaactgaagagaaacataagatgacttgctcactgttccctcaagtaaatagactctcatctggctgaccccaacgtgtctgctcctcacagtccttgcctgcctcttgtctgcatcaaatggtcttattctctgtagacataacccttggaccaccccagaagagaaacggagttattaccacctcagctcagttctggcacacacccctaaaagctttaggcagctttttaatgcatgacaactacgaataacaggacaaggcagcctttgaacccacatgtcagagatcctgtattattctttactgcatttg

SEQ ID NO: 14294 - DNA, 465 bp, Homo Sapiens
  misc_feature (81)..(90): n is a, c, g, or t
  misc_feature (357)..(371): n is a, c, g, or t
ctcttggcggaatccatggggcaaggtcagcctcttcccaggaaccatcgccttctataaaccgtgaactcaagcaggcannnnnnnnnncttaccgaaaggctgctattgtgcaagggcacataatgggtctgtggctcttattggcttccaaatgtgcatggcaaagagagagatgtgggcctagagcagatatattcagcaaggtgacagcttcccataacaattctaacacttcttatcttatgtgagaataaaatatttaagggttgaaccttatttggccaaatgtatcttttctgcttttgaatggggcagaagattttagcaactatattctacaaatgttacttatannnnnnnnnnnnnnntctgaaatatatgccgaaaattgacgtctttgacctcagggagagcacctgtccaggtctgcctaaaggaaatggctccagtgggtctaaacaa

SEQ ID NO: 14295 - DNA, 447 bp, Homo Sapiens
aaaaatgcttgggaacacaacagcctcacaattccgagtccagcatgtgcttcggaggccagcctggaagtgactgatttattgctcactgctttggaaaatccagtaaaatatgctgaggacaatatggaacaaaaggacacagacagaattatttgttcaactaacattcttcataaaactgatcagacactccgaaggattgtatctcagacaatgaaggaagcaaaagatgaacaagtgcttcctcacaacttgaagcttctagcagaagaacttaaccagctcaaagcagagtttttggaagacctaaaacaaggaaacaaaaaatatctgtgctttcagcaaaccattgacataccagatgtcatttctttttttcattatgagaaagataatattgtacagaagtatttttcaaagcagcattaaaatttctgaactgcc

SEQ ID NO: 14296 - DNA, 540 bp, Homo Sapiens
  misc_feature (309)..(360): n is a, c, g, or t
  misc_feature (388)..(472): n is a, c, g, or t
tgcttggattgttgatttccctcattctttgtagactcatctcaagtattctcagtaacttagattcccttgctcttcattcagaaatatttgttaaggtccattaaatgaaagtcaccacagttgatcatgtgaacagtgtcaagaatcaggccgaaccttcaaggagtttatgttctaaaacggaagcatggtggtacctgcttgtggaggctgaggcggaaggatcgcttgagcccaggactttgaggctgcataattgcattgacgctatccatagagtgcctgcaatttcaaatatcagaaagnnnnnnnnnnnnnnnnnnnnnnnnnnnnnnnnnnnnnnnnnnnnnnnnnnnnagaccctttctctcaataaagtggaagnnnnnnnnnnnnnnnnnnnnnnnnnnnnnnnnnnnnnnnnnnnnnnnnnnnnnnnnnnnnnnnnnnnnnnnnnnnnnnnnnnnnngataaatctcttccttcctggaacttacattttattgaagggaggagacatacaataaatgagtgaat

SEQ ID NO: 14297 - DNA, 655 bp, Homo Sapiens
  misc_feature (184)..(184): n is a, c, g, or t
aagaactgggcctggcgcatggcccttgaccgaaggcaccagcagaagcaggggagccagaagggcttgcagggggcgcttctgacacagaaggacctgatgggtgtggcgcgaagggtgagggtgcgaagaaggtgacggtcctgaggagcctgctttgcccagcctggagggcgtcagtganaagcagtacaccatctacatcgcacctggaggcggggcgttcacgacgttgaatggctcgctgaccctggagctggtgaatgagaaattctggaaggtgtcccggccactggagctgtgctatgctcccaccaaggatccaaagtgaccccaccaggggacagccagaggaaggggaccatggggtatccctgtgtcctggtctatcaccccagcttctttgtcccccagtacccccagcccagccagccaataagaggacacaaatgaggacacgtggcttttatacaaagtatctatatgagattcttctatattgtacagagtggggcaaaacacgcccccatctgctgccttttctattgccctgcaacgtcccatctatacgaggtgttggagaaggtgaagaaccctcccattcacgcccgcctaccaacaacaaacgtgcttttttcctctttgaaacctgcaa

SEQ ID NO: 14298 - DNA, 550 bp, Homo Sapiens
gaagttttattgagaaatattgataacataccacagaagccactgatttaaagtgtaaaattcagtggttttcagtatatttgcactgttatgcaaacatcaccacaataaattttagatcattttcattaccctgaagtaaacaccatatccctccatttccccccaactcccctaatcctgggccaccacaaatctactttctgtttctatgtgttggtctattttggacattttatttaaatggaattacataccatgtggtcctttgtgaccggcttctttcacttagcataatattttcaaggtttattcaatcttgcatgtgcaaagggggcactttacataaggataaacctggagtggggggtacttactgattgatttggaaacttccctccgaaattgtaaaggctttcaaatagaggaacaacctattcaggctaaaatcctgttttcagcagtttgtaatgtggggttttattgcaaagaatggcaagatttttgggcttattttctgcgaattctccctgtgtttggggaacaggtg

SEQ ID NO: 14299 - DNA, 343 bp, Homo Sapiens
cgaaaccaaaaaagaaccagatgaagtttccaacactaaatcatcttcccaaatacctgcccaaccatcagtagcaaaagttccctatgggaaaggaccttcatttaatcaggaacgtggaacatcttcacatctgccaccacctccaaagttgcttgcacagcagcatccacctccagatcgacaggcagtacctggaagaccaggcccctttccctccaagcagcaagtagctgatgaagatgaaatatggaagcaaagacgaagacaacaatcagaaatttctgcagcagtagaacgtgctcgtaaacggcgtgaagagaaagagctggagaaggagcgg

SEQ ID NO: 14300 - DNA, 506 bp, Homo Sapiens
caggacaagagcaagaaggacatcagttgcccagtcatgtgatcccctgccatcttgcattaggaacagccttcccccaccagcagccatggctggctggggctttagccaagccacctactgccaggaattggagcctcagttccctcctgtgtcaagtagctaactgcagcagctggactgagggcagagtctgtgggtgcagagaccctgcatgtaggtcacaggttgaggcccagccactctccctggggcctggtgggtaggcaagtagctctggggccacctcaagtgaccaaatgctattaatttccatcctttagcaggctgggccctaggcaggaagctggcttctgggagaggagtgagaacgtgcagggcctgcctagcttgcgtgcttgaggaaggtggcattccgtgcttgcctccttgaggagggtggcattctgtgtcttctgcttatgaagcgcctttcttaaagtttggcaataaatccatttttatgg

SEQ ID NO: 14301 - DNA, 467 bp, Homo Sapiens
acaggtgtacacaggccacccccaacccctggccctggaggaggctccacagtggcctcctagagccaggagaccggactgagctgaatctgctgctcctgacaggacctcacagggggcgcctttgaggacaacctgaggtcactgcacttgcaggagggccaggacttccttcacttcagctgacggacccatggcagctgctcccagtgcatcccaggccagcaggagctttgtgagctgcaggcatggcgatggtgcgcctgttccacacccagcaggcgcaaccagagtctcgtgtgtgccgaccacaggagccaagccttttccactgtgtggactcatgtggccaaggctaggcctggtcacccaggaccctcaccacgtgaccccagccaatcgggacagttcaaggaggaggagacccctattacacaggttggaataaaatatttaaatctcgtaaa

SEQ ID NO: 14302 - DNA, 454 bp, Homo Sapiens
gtggggtcaggagaagcaccccccaggcagccctcttgactggcgcagtggaagaggccttcagcccctctcccggagatggaatcgcggggcagggaggggcagggtgttctaaaggtgagaagagggcctggtggagattccctgtcttctgagcccgagcccctcattaccagtgaaggacatgcttgaggggttcgggaagctcctcatctgaggcaactggtcctgggggtgctcaggcctgcctttttgggactcagatggcaggaggtccaccccgcagcctggtcctcggctctcccacaggtgggcaccccccactttggtgctaatagctctccaccaggtggtgtgagcgcgggggctgccagaagcgggaggggtcactgccggaagagcagctgccctccgacccctcactttgtgcctttagtaaacactgtgctttgta

SEQ ID NO: 14303 - DNA, 587 bp, Homo Sapiens
gaattgggaactgcctcaactacggcagcactaccgtgtgacgcctgacggcgttcaagatcagcacattgtctgaagctcacggtagaccaatgtcccagcagaagccgctgtgacgctgctgcaccacgtgctggaggaagcggaaaagagccaccccgtacctcctgcatgctgccccgtggtacctggaacacgccctcgtcaagcagcagggatcaacctggagcatcatccgctcagatggccagctccaacctgaagaagcttctggagaccgagcggaaggtgtctgcctccgtgtggccgaggtccaggagcagtacaccgaggcgcctccaggccagcatctcggccttccgggcactggatgagctgtttgaggccatcgagcagaagcaacgggagctggccgactacctgtgtgaggacgcccagcagctgtccctggaggacacgttcagcaccatgaaggctttccgggaccttttcctccgcgccctgaaggagaacaaggaccggaaggagcaggcggcgaaagcagagaggaggaagcagcagctggcggaggaggaggcgcggcgggc

SEQ ID NO: 14304 - DNA, 522 bp, Homo Sapiens
ccaaaatggtcaggactttaatggaggaggtgaggtgttgaaagcacaggcagagtggtcagggctgaagtcggagaagcatagggactaggcccaatccagcctggaaagtcagggaggacttcctagaggaagggacatcgaactaagacctgaactatgagaaataggcaggaagaagttgtacctgactcatttttctcaggtgtctccagggagcaggacccatggagggacccctggtgtaggcctgggcgatagactcttcctcagcagcctggcaggcaggaaacagacataggaccccagcccagatctgaatggcatgggaggtgctgcccttaaccatgacaccattgtaagagctgtccacatttgtatgttgtgccctggaatcagcctggttgagctcaaatcccaacttagccacgtctggcctgtgtccttgggcagtcacactacctctctgattttgtttccttatatgtaaaatggtgatcatcataatacaacttcaaaagg

SEQ ID NO: 14305 - DNA, 458 bp, Homo Sapiens
  misc_feature (66)..(79): n is a, c, g, or t
taaccatggcgtcagatatgattcaagaatagagggagagggagctcttccaactgggcaaatccnnnnnnnnnnnnnngaagagaagaagcaagcaagagtgaagatgactctactgcacaggacacagaagaattagaaaaagagattagagaagaccttccagtgaatacctctaaaacccgtccaaaacaggaaaaagctttttccttgaagaccataagcactagtgatccagccgaagtactcgtcaaaaatagccagcctatcaagactcttccacctgctacttctaccgagccatctgtaatcttatcaaaaagtgattctgacaagagctcttcccaagtgccgccaatactacaagagacagataaatccaagtcaaataccaagcaaaatagtgtgcctccttcacagaccaagtctgaaactagctgggaatctcccaaacaaat

SEQ ID NO: 14306 - DNA, 530 bp, Homo Sapiens
  misc_feature (411)..(411): n is a, c, g, or t
tcagcctttctgtctcagagatattatgaagacttggatgaagtcagctcaacgtcatctgtctcccagtctctggagagtgaagatgcacggacgtcctgtaaagatgacgaggcagtggttcaggcccctcggcacgcccccgtggttcgcactccttccatccagcccagtctcttgcctccatcgcagcacctatttgctaaatctcacctggttcatggttcttcacctggtgtgatgggaacttcagctggctacatctgctagcaaaattattcctcaagggcgcgatagcaccatgcttgccacgagaaccgtgaaacatggtgcacctagtccttcccaccccatctcagccccgcaggcaactgccgcagcagcactcaggcggcagatggccagtcagcnaccagctgtaaacactttgactgaatcaacgttgaagaatgtccctcaagtggtaaatgtgcaggaattgaagaataacctgcaccccttctacagcatggttctacatccctactcca

SEQ ID NO: 14307 - DNA, 486 bp, Homo Sapiens
cctggatggagacctgaagtaaggctttgtgttcttgatatcaccccttgggtccctagtacctctttggagggctactcccaccttttttcccctcctctcatctgtcccaaagtgatacttgctttgcccccttatcctaagaccacaagtaaagcacctatccctttggggagggggaagtggtcccttattccaggactcacaagtgaagatgtcagcctttctctttggggagagggggatgatggtcctttatcacaggacagcattgagatggggttgggtgtgtgaggggcccagcttattgcaattttgatggccctccttttcctccctcccccaagcagtgtgcctgttccacagtgggcacatcagctgagtcttagaagtgtatgttgatgccgctaaagaaatcacaagagacaaagttttggtgcgcctctactgcaccgcagggtcctgggacactgtgcgagacggtgg

SEQ ID NO: 14308 - DNA, 360 bp, Homo Sapiens
  misc_feature (284)..(296): n is a, c, g, or t
ccacgcgtccgccaccatctgccctcagtcagttgggagaccgtaccaccaccccttcgagatacccacaacacacgcgccacgaggcggggagatctcctgttgacagcttgagcagctgtagcagttcgtacgacgggagcgacccgagaggatcaccggaacgaattccactcccccattggactcaccagaccttcgccggacgaaagggaaagtccctcagtcaagcgcatgcgactttctgaaggatgggcaacatgatcagattattacttactagnnnnnnnnnnnnncttgcagtgtgtgtgtgtgctataccttaatggggaaggggggtcgatatgcattatatgtgcc

SEQ ID NO: 14309 - DNA, 144 bp, Homo Sapiens
tgagccaccgcacccggctgaaaattgtccctatttcataaactacaatagtgaaaaacagaatcgcagaagtggttatgagtgaagactacttagaaataagaatggaagtcagtgacagagaggggcagctctacctgcgga

SEQ ID NO: 14310 - DNA, 297 bp, Homo Sapiens
gaggatcccgcagtagagctgccctcattgtgctgagtgcatggaacttctaattaacaatatatgtatgacaatggcaattgtggagagagccatccaagcccatcttagtgtgtcagagtggtttcccaaaggaagttatacctacactgagatctggagcagttacctcggtgaacagggtggaaggtggtgctggtgcataggagaataatccaggaagagagatgaatagagaaaaactggtggttgaaagaactgagaacagtttgatacagttcaagtataatgttgggg

SEQ ID NO: 14311 - DNA, 599 bp, Homo Sapiens
tagttgaggacaccctctaactggaaactctgccattgtgcgatgcgatttcctttgggatcctgaatgtatactagtggaatcaactcattcagggggtgaaagttttcatccatggagacaacacgaaatttcactgtctgccctggtttgtagattgatttgtctgtctggacaaagaccagactgtcctcgttcttaaccatcactgtggtccgcttcttaaattcttgggtaggtcctttcacttggacagtgaggaacattacctcctcattggatgaagactttgggacagcgaaggcgacacagtggagtacgtcattctccgcctccaggtcagtgaagaggctcctgtttcccctgacagactccaaggaagcacttacagtcactgtctcattcaggtagctcagaaggacacagcccttctcagtggtctcagtgtggagcagggaggggaccagaaccatatactgcggttttccagagactgaggcgtctgtgggcaggaggaccaagaggagaagaaccagacttggatgaaggagtttgttcttccccatgttgcagaaagaaggagctggacggacgcgtgg

SEQ ID NO: 14312 - DNA, 166 bp, Homo Sapiens
tgaatctccccatctaaaaagacacagccttgtaaagaagcttgtgtgaaagtgctaacgacagacatgccaagtgttaaggggatgcaggagaggcgtggtaaaatgggttgggaggcagctcagatgtctaaaggggtcaggcagacaatgcagataagtgaaa

SEQ ID NO: 14313 - DNA, 212 bp, Homo Sapiens
gacaaggaaactagttcagagaggttaagaaactttgcccacagctaatcaggacagggttagaatttgaactcagcatcctatcaatgacaccatagctgcttcacgaagatgactgagtttctttctttactgttattctttcagaatttttgtcttcttctttgtgcttatcttttgtagtgctaggcctttccactacatatccagtc

SEQ ID NO: 14314 - DNA, 1134 bp, Homo Sapiens
ccacgcgttcgccagcgtcccagggcccaggccgagcaggtgtaacttggacccatttctcttgcgtgaatattgaacatcgaggagcggaattcctgggtcacagggtaggcatctgttcagatttagtagatgccagaggattatccaagtgcttgtccctttttcctctgccaccagcaatgcatgagagctggaagtggaagagcttacaagatcatcatcgctcactgtaaccttgaactcctgggctcacagaatcctcccgtctcaggctcccacatagccaggactacagacaaagatcattccactcagcctgggacgatggggaggaaaaaaatccagatctcccgcatcctggaccaaaggaatcggcaggtcctgggtccaggtgacgttcaccaagcggaagttcgggctgatgaagaaggcctatgagctgagcgtgctctgtgactgtgagatagccctcatcatcttcaacagcgccaaccgcctcttccagtatgccagcacggacatggaccgtgtgctgctgaagtacacagagtacagcgagccccacgagagccgcaccaacactgacatcctcgagacgctgaagcggaggggcattggcctcgatgggccagagctggagccggatgaagggcctgaggagccaggagagaagtttcggaggctggcaggcgaagggggtgatccggccttgccccgaccccggctgtatcctgcagctcctgctatgcccagcccagatgtgtatacgggccttaccgccacaggctgtgaccccagtgggcttggggaagcactgcccgcccagagccgcccatctcccttccgaccagcagcccccaaagccgggcccccaggtgagcatgggacagtggggcaaggggtgaggtcctgaggggctgtttgggtgcatcttggctctggcatttgccaggctgcgtgcatcacctctaaacctcagacttcattagtttgacattggcctgcctgtcctctctctctggggtctcctcttccccaggcctggtgcaccctctcttctcaacaagccaactcaccaggcaagacacaaccccactgtacctgccgacggaagggcggaggtcaaacctg

SEQ ID NO: 14315 - DNA, 522 bp, Homo Sapiens
  misc_feature (151)..(151): n is a, c, g, or t
gccacgcgtccgatacaggtctgtgaagcaggcaggttgctcagctgcccccggagcggttcctccacctgaggcagactccacgtcggctggcatgagccggcgcccctgcagctgcgccctacggccaccccgctgctcctgcagcgcncagccccagcgcagtgacagccgccgggcgccctcgaccctcggatagttgtaaagaagaaagttctaccctttctgtcaaaatgaagtgtgattttaattgtaaccatgttcattccggacttaaactggtaaaacctgatgacattggaagactagtttcctacacccctgcatatttggaaggttcctgtaaagactgcattaaagactatgaaaggctgtcatgtattgggtcaccgattgtgagccctaggattgtagaacttgaaactgaaagcaagcgcttgcataacaaggaaaatcaacatgtgcaacagacacttaatagtacaaatgaaatagaagcactagagaccagtagactttatg

SEQ ID NO: 14316 - DNA, 1325 bp, Homo Sapiens
ccacgcgtccgcggacgcgtgggcttctctttgatttcacagaatattcattcagaagtcgcgtttctgtagtgtggtggattcccactgggctctggtccttcccttggatcccgtcagtggtgctgctcagcggcttgcacgtagacttgctaggaagaaatgcagagccagcctgtgctgcccactttcagagttgaactctttaagcccttgtgagtgggcttcaccagctactgcagaggcattttgcatttgtctgtgtcaagaagttcaccttctcaagccagtgaaatacagacttaattcgtcatgactgaacgaatttgtttatttcccattaggtttagtggagctacacattaatatgtatcgacttagagcaagagctgtgttccaggaaccagatcacgatttttagccatggaacaatatatcccatgggagaagacctttcagtgtgaacgggtctatttttgtgttataatttaaacttcgatttcctcatagtcctttaagttgacatttctgcttactgctactggattttggctgcagaaatatatcagtggcccacattaaacataccagtgggatcatgataagcaaaatgaaagaaataatgattaagggaaaattaagtgactgtgttacactgcttctcccatgccagagaataaactctttcaagcatcatctttgaagagtcgtgtggtgtgaattggtttgtgtacattagaatgtatgcacacatccatggacactcaggatatagttggcctaataatcggggcatgggtaaaacttatgaaaatttcctcatgctgaattgtaattttctcttacctgtaaagtaaaatttagatcaattccatgtctttgttaagtacagggatttaatatattttgaatataatgggtatgttctaaatttgaactttgagaggcaatactgttggaattatgtggattctaactcattttaacaaggtagcctgacctgcataagatcacttgaatgttaggtttcatagaactatactaatcttctcacaaaaggtctataaaatacagtcgttgaaaaaaattttgtatcaaaatgtttggaaaattagaagcttctccttaacctgtattgatactgacttgaattattttctaaaattaagagccgtatacctacctgtaagtcttttcacatatcatttaaacttttgtttgtattattactgatttacagcttagttattaatttttctttataagaatgccgtcgatgtgcatgcttttatgtttttcagaaaagggtgtgtttggatgaaagt

SEQ ID NO: 14317 - DNA, 716 bp, Homo Sapiens
  misc_feature (64)..(64): n is a, c, g, or t
ggccaggtaacttatgtgtctggtttggatcaagcatccagtcacggtgcacacattgcatttnttaactatgtttttaaaacctctttgaatgctgaaaggtcttccctcagctcactttgagtttttaaatgacattgtttttgaggccctaggcctgctgtctttttgaagccccacattctgaatttgtcagattgtttgctcatggtgtcgcataaccacttcttctatcccctgtactttcaaggataatttaggctacatgagattttgccttttgtgctgacttgacagcttcacttctgcctaagatgcgcctccactgtcacctgtaccaagtgccaaaacagcagaggggccagttagagcaagagctctgggggggccggaaagtctccctggagaaggccgtaatatctgggccttggaaggaaggacacagggctctggaaggaggaggctgcatgcctgaaggctgggccttcgaccctggggatgggccacagggcaccaaacacatcatacgtctctccctttctattttggggtcccagggttttcatttcctggagacccgtggtctgtgtgcactggagcagagccaggctctcagttgcagcagggaaaagcctacatggggaactgcctcccgcaagctgtggtgtgagaagagccctggctggcagcaggagctgtgaagtttcatcccagcc

SEQ ID NO: 14318 - DNA, 461 bp, Homo Sapiens
tctgtagagcctggtgggtgaggataggcttggctgcacacagcatatgtgtaagctacagagacttgtttctttcttgcacaggtaacccagaggcagagggtccaggctccaggtcaattggcatgttttttgtttcacgaggaagcagaggagccccatctcccatcttaatctctgccaccaactagggtgctgcccttgtccctgtgacacctgtacctgccacattcacctttgcactgagcttagtcttgtgaccacatctcaccagacgggaactgggaggtgtagtctcttcgggcctgtgtgtgtgccagctcgatgcagtgtcattcccatggaaggtgggagcaaaccctgccacaagcatccagagctgtcttcagatgtgctcttgggcctgaatccagcgtcccaggtcttccgaccagagacgactgaggaggtcgggcggccgc

SEQ ID NO: 14319 - DNA, 533 bp, Homo Sapiens
tcagcacgccatcggtgttcaaaaggctattgaagactgttcctaagaagccagcactaaagtgattattaagacagaaaacatcaggcagatgcacatagagacagagaggtttggagacttccatggttatattcactatcttatcatgaaggatattttcaaagacctcaacgtgggcatcattgatgcctgggacatgaccattgcatatagcactgacactatccacccacctgatcatgtgattggaaatcagattaacatgttcttaaactacatttgctaagggataaatactatacaaaatcactaggaaccaatctctgcacataatcccacatgtattgtaaagtaagttttactcattttaggaactaaggaaaataaatttaaaagaatctgtttggggaggaaggctatgtaaggacaatgacaactgataagggatgcaaaaccaagagaatcattcatgaagaatgactataccatgcctggttctgatgctcgtttaaaatattaaaaaagttttt

SEQ ID NO: 14320 - DNA, 280 bp, Homo Sapiens
cgtgcctgaaggctccggatctcagcctcgtggtgccggatcgtgtccttggcctccccatagctacgcttcagggtctgaatctggtgtgtaatcagctcctggcgctggcactgggcttcaagctcactttgaaggtcttggttgactctatggagcctctgccaggcacccgatggggaggcggccacttcagtcttaaaaaaaccgattaaatactggttagtaacactcgggcctcccagttctgagtgtcacacctctggccaggaacaaccac

SEQ ID NO: 14321 - DNA, 607 bp, Homo Sapiens
  misc_feature (505)..(505): n is a, c, g, or t
gtgtatttgaatgactattttattcgtatttaaaataatactattaagtaagcattttgcacatgggcaccccagtgatcccgctggcccagcaggagtcactgttggcctctggacactcatcggccttgggcaagtggttctcagccaggtttccgattgtcgattcaaggaagcaaaagtaatttttcttgacatttgaggaccttcctgaggcttctaaagtgttcatcctgatcacctgaagggtgtgattttagcagagctgagagtggctggtggtgatgtggccccaccccctgaggcacagagaagagggagacaggtccagagagggatggggcctccaccaagaccatatagaccatctggcgggctcaagccggggctttttcctctccagtccaaaacacctcactgttcctgtctacctcggggtcagggcccggcatggccaagccctggcccatctgtgtctgtgtcactcccctcccttccagactgngcctggctgctgggatccctctcatgcggtgggtcccagggacactagagcccctggtctgagagggagaagcctggatgtaggaaaacccgttttcacccc

SEQ ID NO: 14322 - DNA, 269 bp, Homo Sapiens
  misc_feature (43)..(118): n is a, c, g, or t
cgcgtgtctggccgagagcccccttcctctgcggccatgactnnnnnnnnnnnnnnnnnnnnnnnnnnnnnnnnnnnnnnnnnnnnnnnnnnnnnnnnnnnnnnnnnnnnnnnnnnnngatcactggtcgtcctcttcggggctacggcgggtgcgctgggacgggacctgggctcggacgagaccgacttaatcctcctagtttggcaagtggttgagccgcggagccgccaggtggggacgctgcacaaatcgctggttcgtgccga

SEQ ID NO: 14323 - DNA, 531 bp, Homo Sapiens
gaaggtggctacccagcctatgcaagcgggggtggctacgtcattgccgggcgcctggcaccctggctgctgcgggcggcagcccgtgtggcacccttcccctttgaggacgtctacactggcctttgcatccgagccctgggcctggtgccccaggcccacccaggcttcctcacagcctggccagcagaccgcactgcggaccactgtgctttccgcaacctgctgctggtacggcccctgggcccccaggccagcattcggctctggaaacaactgcaagacccaaggctccagtgctgactctcattggggagggcggaggtgctgacctggcctgggcctctggggccggcccctggctcagcccctccttccaggtcttgatgggagggaggagggcccagaagctggacaacttaagccactccttggcctcccccagccaggggcctgggcaggaaagatggggtggtggactgtttttgcctactttttgtttttgaaaaacatgcactcccccctttgagg

SEQ ID NO: 14324 - DNA, 550 bp, Homo Sapiens
tcacaagaatcgaagaagtaaagaaagcatagaataggaagaaagcacgagacaaagaagaacacacggaagcacaaatcttccaagtcaaatgagggttctgactcagagtgacaaggatgtgacttgttcaacattctcttctcaaacactgaccaaggaacagaggaagatgcagtcagagaaagcagcaggatagagacgccgagagaggagtatatgtgggtcacagcagtgagctcccacccgccttgcagtgaagatgtgaccccaggagagggagtgtctccttccaggtgctagctctggacagcagctgattttaggcaggaaagtttcttcatcgttgtcctccctgctggtcacatgagtttacgattcctttgaagtgtctaccacagggtggcaggactgggagaatctctgaggcgtgtcttccaggccctcccacagcttgtgccctacacagtgtggactcaggtcccatagacatcaggctggagtcttctctgttgttgagaataataaaagctcattatttattttttaa

SEQ ID NO: 14325 - DNA, 555 bp, Homo Sapiens
gatgataaagtggaatcaatgatgctgcccttcctttcatcctcttgacagacctcattcatctcagggaacatatcagccagagaaatatacaagaacattcctccagctagcgcaaaaatccagttggcagagaagtggctgccggccaggatgccaaaggccagacccaggtagcagcagtcaggcagaaaggaagttgaagaagagagcttgttggatgctcatcccagcgttgagcaggatgacaaagtctcctagctcatgtgggaactcctcacagaggatggccaccgaggtgctgatgccttggaaaactgacacagtgaaggaagcaccgatggccaggccatcgatgaaattgtggaggccgtcgctcagagtgatcatccaggccagagtgccgatatcagagtagcggacacctttcagccagtagcaagcactctgggaagcctgcaggtcctgcacagagagcgagcccacaatgaccttctcgtccaccatgggcgccttgccgtccagctcactgctgcagtgctgaggaatcatgtg

SEQ ID NO: 14326 - DNA, 708 bp, Homo Sapiens
ctgagagtcctcctgaaatccagccagtgttttttatggtatgagaacaggccaaaagagatgccccgagatataaggcggagccttgtgtttctttccggcagacgtgagatgaacactggagtgggcagaggtggcccaggaccatggcacccttagagtgcagaagctggggggagaggctgcttcgaagggcaggactggggataatcagaacctgcctgtcacctcagggcatcactgaacaaacatttcctgatgggaactcctgcgcagagcccaggctggggaagtgaactacccagggcagcccctttgtggcccaggataatcaacactgttctctctgtaccatgagctcctccaggagattatttaagtgtattgtatcattggttttctgtgattgtcataacattgtttttgttattgttggtgctgttgttatttattattgtaatttcagtttgcctctactggagaatctcagcaggggtttcagcctgactgtctccctttctctaccagactctacctctgaatgtgctgggaacctcttggagcctgtcaggaactcctcactgtttaaatatttatttattgtgacaaatggagctggtttcctagatatgaatgatgtttgcaatccccattttcctgtttcagcatgttatattcttataaaataaaagcaaaagtcaaatttgg

SEQ ID NO: 14327 - DNA, 633 bp, Homo Sapiens
  misc_feature (523)..(523): n is a, c, g, or t
tctggagtgctgtgctcccagcttgcgctctgattagaagagccaaaggctttgtcctctggtaacagattctgccaccagcgggggatgaaggagggattttagacagggaggccttcatccctgctcgtaaattctctgagatggacccttcccatgggtgctgtgcttctgtgaacccaaaagtacacattgagtacccaccactagccactggtgagacccgtgtggcatttgtccctgcattcaagaggcagcagtggaacttgggacaagggacctgggttagtcccgacttccagcacttgctagtccggcacttggtaatcaatcatctagcctctctgagctctggttctggtctataaactggagatgatcatcttagttctgtcactgccagccttgtaggatttttctaagtctcaaatagacagaggatgtgagacatcccttgaggcagtgtacatggggctgtgtccagagggcctgtttgtgcaaggtcagatgtgagtctgtgccnccacccacatagggtgagaacgcgccgcatggcaggagtactgctgccagaactctgatctgcatcatcctgactgcttactgtgtgatttgtcaatcctacttaacggt

SEQ ID NO: 14328 - DNA, 400 bp, Homo Sapiens
  misc_feature (22)..(22): n is a, c, g, or t
tctttgacatctactttcaggnaaacttaatcagaaagaaggcaacgagtctcaggcttcattttacatacctgtctcaagagataaaagagaattccttcttcatagctttaatgcagtgccaagcttaagcagattacctgttgcttcccttatacctgggccttactttggccctgtttggcctcatgaatttgactatatctgtatgaaagttttcaccaaacaatagcacttttcttaggttatattatatccttcacatgctattaacccacatatttactacttttcccagggaagggaagaaattgtgggcatgggaaagatggcaactaagaattgagatagttctttatttagttcactaggagaacagattgaggaatggattgggaag

SEQ ID NO: 14329 - DNA, 480 bp, Homo Sapiens
gtcggtacaaacagagtatacagcagagcatggtacacagacaggataggcactaactgcgtgcggatattgagagcttcacgagaagggaagccattatgagggatcatagacctgatagcttaaggacagataacacagagacacagaccactggttcggagtgattgagtccaggtcagtcatacttatgctgggatctccattccattttgcaatcatctcactgtgaaaggtccacccaagtagccagattgtccaaggagcttgaaggcattccacagtcactcctaattggaacgtgctgggatcaccctcttcccaagaggccatggagataacaaggacataactcagggacatcatgtgaaaatcagtggccctctctcatgcatagcagtaagtgaatgggcctgattctctctttattatatgtctttcttatcaaggtgagttatcttatttgtgcctttctcccac

SEQ ID NO: 14330 - DNA, 511 bp, Homo Sapiens
aattccgttggttccagcgctttttctgaaacccgaggctggccagggtgctgtcaccatgcggtctttgattgcagccattcaatgcccacatgcttttccttcttgtttcagaacagcacatggtcacaacaagatattttctttccctccaaacccttttgtctccttgtgcctctttttatccttagggaaaagatccaggtgcttgcgaaaagaatcatgaatgcaacaagggaggctggtccttgttgctgtcgccgattaagttttaaacttttatttattatttatgtctgccggattttaaataaacattctagttccttccagttccagtcatagtgtgtctgtggcattccactccaaccatgggacttatttattctaatttgagggctgcactgtacaccatggtgtcctgtgacaccgtgttccatacatttatggaaggaaaacatcccatataaatgaaactgtgatgctgtgtcctccccggcagcagaagatg

SEQ ID NO: 14331 - DNA, 456 bp, Homo Sapiens
tgggagggcattgagaagagaacctaagaggggcaccttgctcccttcctcaagctccctcctgaccctcgggggagaaatgagagagaaccctggagactcaaagggatgctctagtatcttcctaatctctggaagatgaatccccacggaaactgaatacctggggcttctgtccacctggaatggatcctggagcagctgcctgagccagccccactcaccaggaccgccctgacacacaatcagggctctgttgcaagaggggggccctctgccacgcttcccaggccagatccccggctttcccgaagccggtcagacctcttcctgcccccatcaccagaatcaccccccaactggggggacaatctgactcgagtcaaccccttctcactacgggaagacctcaggggtggcaagatcaagctcttagacacacccagcccggcccgg

SEQ ID NO: 14332 - DNA, 793 bp, Homo Sapiens
ctggtacgggagtgggataagaaatagaattattgaaaagcccccaccagggaccttcctggccagaatatgcagagtaattcctgctggcttcacctttgaaagtccctcgaaactatgcagatgaaactgagtctgtttttgatattgtcagatgtattctaccttggaagtcccaacacctaaactggaattcttgtatttacatctcctccactgtcccccacaccacccctcaattcctgctgcccctgctaatgttaagcatttttctcttgttatcatcaggttcacattaaaaacagatacttacaaactgacttgaagcacagatacttttacgaatgtgataaaatattttcttaagaaaaggaaagaggatgtgggtcaaataaaacaccgcatggatgttgattggtgaatactggtgtaagaaaagggagctcaggaatttttattactgtatttgtaaatgagtttgaaggaatttgtaaatgccactggtacattttgtaaggtgacacatttgctccttataaagttattaaaaattacagggtaagcttaaatgacgtttgccagtagttttactttatataatcaatattgatattgttgctgaactatgtaactttatgatgcatttttcaggcccttttcagagcaaatgcttttgcaatggtagtaatgtttagtttaaagtgacttaataaattagttacctgagcatggtttttggagggtcccttatatatgtatgtgaaacatgcatcactatgaaagatttaacgtg

SEQ ID NO: 14333 - DNA, 492 bp, Homo Sapiens
agccagcaaagccggaggacctggacgagcacgcgctggtggagctggagttgcaccgcggcacgtccatggaaatcaatctgggggagaaggacactgcatcccagatcgaggccgaaaagtcttcctcaatgtcatcactcaatattgcgaagcacatgccccatcgagcctactgggcagagcagcagagcaggctgccactgcccctgatggaactcatggagaatgaagctctggaaatcctcaccaaagccctccggagctaccagttagggatcggcagggaccacttcctgactaaggagctgcagcgatacatcgaagggctcaagaagcgccggagcaagaggctgtacgtgaattaaaaacgccaccttgggctcgagcagcgacccgaaccagccccgtgccagcccggtccccagacccaagcctgaccccatccgagtggaatttgagtcctaaagaaataaaagagtcgatgcatgg

SEQ ID NO: 14334 - DNA, 482 bp, Homo Sapiens
cttctttctcttcctccttgtcttcctccttcaatccagaacaaagtaggcaagtgaacaccaagaaatgtaaagcatacaggtctacccgaggtacagaggtatggttcaatggaaaaagctctggactaagaactagaagcccccggctgtaatcctgattcaactctggaccctaaatcacttccaattatcagccttagttttctcatccataaaaagaagctgttggagtaggtgatttcgcaagttcttagaaaggtgtgatgcatttggaaagaattctaaagagtccttacaatcaaagtaaagatttggagggttgaaatatgtagtttcagaatcaataataataagttgttttttactgtggaaaacctcaccactcttttccagatggctttttcattaaacaccctcaatattatttttcactgtgttcttgagactgctttctagtttcagttcacacatatttatgc

SEQ ID NO: 14335 - DNA, 155 bp, Homo Sapiens
gggattacaggcatgagccaactgcgcccggacatgtattggcttattctgccaatgtgtgtgtcttgccgtagtaaagtatgctcctcgagagtaagaatagtgctttttacatctttatatacatacctacagtgtccacagcactgtgctcg

SEQ ID NO: 14336 - DNA, 342 bp, Homo Sapiens
aaccacacacacagcctctctccctggacatacgttagcacattggcattcagtattggtggcctggcatggtaggtactacccaatgaagagtgtactatatattttcattactataggccatacttatacagacgtgtatatatatttatataagatctaccctatcttaggatggaaccttggggaaaaataaaattgaggggaagtaaaaagtatgtaacacttccagttgtgagccaagattgtaaccagagagcagccaggagcttcctgtcagtaaccatgttttcaataaatactctttcatgtacaacaaataaataaaaagctgctgctcat

SEQ ID NO: 14337 - DNA, 432 bp, Homo Sapiens
gccggaccgacaacgtgcaccacgtggcagctccgtgcaggctaagcccttccagcctgcgcttcctctggtggttcttgtgcctacgcccaggaggggacgccgttgagaaggaagtagaagatggtctgatgctacaggacttggtttcagctaagctgatttcagattacactgttaccgagatccctgataccattaatgatctacaaggttcaactaaggttttgcaagcagtgcagtggctggtttcccactgcccccattcccttgacctctgctgccagactctcattcagtacgtcgaagacgggatcggccgtgagtttagtggccgctttttccatgacagaagagagaggcgtctgggcggtcttgcttctcaggagcctggcgccatcattgagctgtttaacagtgggtgcagtttgt

SEQ ID NO: 14338 - DNA, 616 bp, Homo Sapiens
ccacgcgtccggtataataatagtatcttcacagattttgtgaagactgaaaaagatgatacatgacaagtctagaatggtgctttggtgttgataattgattgttattacagttgatgtattaataaataataaaaaatgtgttggatattcactctgtataaggagcagtgataggctgttaaataaagcagatcatcagatctttaggataatctgtttgtcacttgctccccacccctctccgtatatcaatcgtgacattaaaatgttttaatgataatttattaaacctttatgcttcccattgagaaagtgcaaatggttattttattgtgtattcactatttagggttttactttaaaaggaacactataaatgtctgagtgatgttaattctcaaagattggttatagcattctttctgtattctataaagacacatagcttgtaatgaaattacacctgttgtggagttatgtgtccactagaggtcacattatacttttatattacttaaaatgtcttttatcttggtagtgtcagtgaagcttacttcaaagaaagacagagataggaaaagttcatgtattgcttcctgaaaaaatacagttt

SEQ ID NO: 14339 - DNA, 452 bp, Homo Sapiens
ggcacgagggcacaaattctcctgaagaccttctcccttttatgggcccccatattttatgtgcctttatcttggaaattttgcatgaaaaggaaatgaatggattcgaatgaaattgtccttgagagcatgattacttgttcccatggacaaatatttttctccccttgctcttcctggcctgaaacacgggaaaccagagtcaaaagttatctccctctccctgtgatgccttgagatttttttctgcgttgtttaatgcctgaaatccaagtcttcctccatgggaaaatactgttataccaaataattctagatgagtaacaaagatctttttaggccttcattttatgttttttcttaactgttatattatgattgtgacatagattatactactactaatttttggatgtttcaaaaggtcaagaagtaaaagatgttagaaagca

SEQ ID NO: 14340 - DNA, 651 bp, Homo Sapiens
tggcctcccaaatgagccatgagatgatacatccaaagcagacagctccaccctggccgagtccaagctgggagattcaagggacccatgagttggggtctggcagcctcccatccagggcccccatctcatgcccctggctgggacgtggctcagccagcacttgtccagctgagcgccaggatggaacacggccacatcaaagaggctgaggctggcacaggacatgcggtagccagcacacagggcagtgagggagggctgtcatctgtgcactgcccatggacaggctggctccagatgcagggcagtcattggctgtctcctaggaaacccatatccttaccctccttgggactgaaggggaaccccggggtgcccacaggccgccctgcgggtgaacaaagcagccacgaggtgcaacaaggtcctctgtcagtcacagccacccctgagatccggcaacatcaacccgagtcattcgttctgtggagggacaagtggactcagggcagcgccaggctgaccacagcacagccaacacgcacctgcctcaggactgcgacgaaaccggtggggctggttctgtaattgtgtgtgatgtgaagccaattcagacaggcaaataaaagtgaccttttacactgaaaa

SEQ ID NO: 14341 - DNA, 857 bp, Homo Sapiens
  misc_feature (495)..(551): n is a, c, g, or t
  misc_feature (594)..(594): n is a, c, g, or t
tatgagctgcggggatatcttggtgtctacaccaggtttgaaataagtaaacaattccaagaggttcatataaaagggcaaatgaaaacctttcctacagttcctatgaacaacgtaccaacactttctgatttcttctacagctgtagaataccatctttcagaaagttggctggctttatttctaactccttattgaagctaaggggtgcttactaaaaggaggcagccatataggccttttaaaggcctggttctaagtcctttttaaagccatggaacaaaacctgatacatcaccctaacagagcattaagttgtaactgagattgcaatacctgtcaccatgcagccgctgatagttctctgaactaaaaggactaattgtactttgaggccaatgctgctttctggtgtatattctccatacaagattattattaactgctctttttccctctggtggaaaaaaaattaaacctgggcatttcatggnnnnnnnnnnnnnnnnnnnnnnnnnnnnnnnnnnnnnnnnnnnnnnnnnnnnnnnnntttgtacatgatccacccttagttttctagaatgtgtgttganaattgcgattatacaagtaagattttaaaaatgtaactcaagtgtttgttcaaatcaggtttaatggtgttgcttctctcctataatgggatagagaaaattaaaatcacgtagtacagaagtgcaagaagagaatttatgaaggatgaatagaactacaaacctatctaaatgaaaaagaaatggtggaaactaagcctgaactttaacatataaaaaacacttattcccacagagaaaatgtaaaattaaaaatcatcatc

SEQ ID NO: 14342 - DNA, 314 bp, Homo Sapiens
ggctttttggtttatgttttcagggtatcttcttgccaaaaaattgcatatatgttttttcacattttgttacacagatagcatccgttacacattattgtaaaccttgtttttttcacttatcaatatttcttggagaacattgtaccttcctaataattttaggaattccaagggcaagtctctactcattgcgcatttttgtcattattttctaggttaatcatgaacatatattgttctagataaaatgcagacagtcaggacttatccaaaacagtatcattgtttttaaaatttatacggacgcgtgg

SEQ ID NO: 14343 - DNA, 435 bp, Homo Sapiens
gccctcacctgtcacccagctcagccctgtgtctggcctacccagggaggaaggaaccagatttatcagcctgaaaggaggtagaagttttggagaaaagacactgttcgggtgtcaagtaatgaactgactttattcgaacctcatctccaatccaatcccaccgtggtctctctctccctcagcttttctggggcgggttgactcgtgtgtcactttatcacaggggcacatggggtgagaagaggaaccttggcagtaggagaaacctttgtaccaggttttaatttccagtgtacatctcagtcccctcccctaaccctcaacacagcctggggaaagcccagcttgcaacaccagttctcagcccagactgacagccagatagatcttggccctgagtttgccaattaaagatgccgtgattattaaaaa

SEQ ID NO: 14344 - DNA, 648 bp, Homo Sapiens
taggttccaggaaggggtgtccaggacaatacccttccttctggagaaacttcccttaatcaaataagagaacttcaaagaaaatccctccctgtgctttggaagggaagggaggtgggcagcagtgggtcagagatagacctttgttctcttatttctgaggcccttcagtctcctttattcaaagcactcagcatgccaaagcaccctattttagggtatctttttctgagccctaaacactgtgttggggatgtcaactgtgacaggaaaatatcttggggccccagaatcactaaggaaaactcaagcttagggaaacttcttagggcaaacccacctcccactctattcaaagttatctctctgctcactgagatagatacatatctgattgcctcctttggaaaggctaatcagaaactcaaaagaatgcaactgtttgtgtctcacctatctgtgacctggaagctccctccccactgaaccaatgttcttcttacatatattgattaatgtcttatgtctccctaaaatgtataaaaccaaggtatgccccaaccatcttggccacatgtcatcaggacttcctgagtctgtgtcacagtgtgtcctcaaccttggcaaaataaactttctaaattaact

SEQ ID NO: 14345 - DNA, 676 bp, Homo Sapiens
gcggccgcggcccgggcagcggctgcccgctgcgggcagcatggcgaacccttcaagctctactgccaggacgacggacgcgccatctgcgtggtgtgcgaccgcgcccgcgagcaccgcgagcacgccgtgctgccgctggacgaggcggtgcaggaggccaaggagctcttggagtccaggctgagggtcttgaagaaggaactggaggactgtgaggtgttccggtccacggaaaagaaggagagcaaggagctgctggtgagccaggcacccgcaggccccccgtgggacattacagaggcctgagaactcagcaccagggctcggtgtgtgtggtgttggagtgtgtgctatggaaccgcagaatcgatttcagaaagataatagagtccatattatatagggtgtccacataattgttgtacaaaccagagctttttaaagtgaaaagcagtgctaaaataattattgcaaaacaactggcttaaactggagctgtcccagcgaatcaggacgctcagtcactctgatattacgtaacataccagatagggcctgcggaagcatcttgtaatggaacacattactatttctgcagagaaacatggatattcaataagtgggaatattaatacaataaagagcctcatggcatgttttgtcaacaaaacag

SEQ ID NO: 14346 - DNA, 887 bp, Homo Sapiens
  misc_feature (350)..(380): n is a, c, g, or t
ccaccccctccatcaagcccttttggtactactcagtattgttgacaacatttggaatcataagtaacataggacagtaagtattagagaatgattctccgttagaattggacctcagccgatttgagccaaaatttaggaactattcagaagacagtttctttcttttgagtgcttaagacagtgtaaatggttcgaatcacacacattttaagattccattgtatacataagcattttaagaatattgttttaacataattattaggcatactaagttatcatgaatgaaaatgtacatgtgacctgtagtatgttatatattattatggctaaatgttaaatgccannnnnnnnnnnnnnnnnnnnnnnnnnnnnnntatgtatatacccacatttttacattgatttatgttctaaataataattaaaacaaagtattataaaatgaatgaaatatttttgtgttccatggtcaaattattaataaattcaggaaagaaaatctgatgataaatctgatataaataccagaataattattattaatataaaataatattttcacatatgaaggtatgtcttcatactacaggatttctgacttgaatatattctataaagctttaattcattaccataacaaatgtactaagaattaatgttgcatctttagtattccattttttggaactgtttttcaaatgttctatatcctctagcttattatgctatctaaaataatttcagtgtgttttttcctggggcaactgaatgattcttgttttgaatgagtgataaaatgttttgtgatagtatctaatatttggtcctttacagaaaaaatggcttgtggtactatattgaaaaaactattgtatttcctc

SEQ ID NO: 14347 - DNA, 932 bp, Homo Sapiens
  misc_feature (472)..(508): n is a, c, g, or t
  misc_feature (776)..(855): n is a, c, g, or t
ttgcattaatgctgttagtttaatgtggacagagacatcccacggcgtgactgttagttaggatgagtcagcttgggggagtttgtgcttcctgcttggtgtggccagccacatgccatgagaacagtaggggaggcggggggtgagggctcagcccccagcccctgactggcagtgatggcccatgctcaggaagtgggatcctctgacctcccctgaatccctcaccttcccaagtttcagagctggccgagctgttgagtgaaatgaccgaaggcagagtttgtatgttctccccgtgtcgccccatccatggaggagttgaagttttggaggagggggagagtggtactccctgtcggtcaactcctcagcagaactgatagttgttggcctgctagcaagggctgggcgatatccccttgctcgcagcaggtcaggtgctcactagagctctcctcctccagctcannnnnnnnnnnnnnnnnnnnnnnnnnnnnnnnnnnnntcggcagattggtatagtcccgctctctcctgtcctcttgggcctgctcctgaaggaaggagcagatctgctggaaggtgggtctgtgggtgggctccaaggcccagcaggcctgcatgatgctgtatctgggagataggacagaggatgcccatgggcagctccctagggtccaggggccattaacacacacccctagagagacctacccagcagaggtccccaaacccagtcaaagtaagtttagtataaaacctatgccaagtcnnnnnnnnnnnnnnnnnnnnnnnnnnnnnnnnnnnnnnnnnnnnnnnnnnnnnnnnnnnnnnnnnnnnnnnnnnnnnnnnccattttggtatcctcagggtaactgtaataacgatctcttaaaagtctgtttagggacaggtgcagtggctcattc

SEQ ID NO: 14348 - DNA, 896 bp, Homo Sapiens
  misc_feature (488)..(535): n is a, c, g, or t
cgccgccagaaaggttatacatcatgtgccacagcctccaaggtccacatcatggaatgtcgatggggctgtgggccccagtgctgccagcccaccagcagcaagcggcggaaatacgtcttccagtgcacggacggctcctcgttcgtagaagaggtggagagacacttagagtgcggctgcctcgcgtgttcctaagcccctgcccgcctgcctgccacctctcggactccagcttgatggagttgggacagccatgtgggaccccctggtgattcagcatgaaggaaatgaagctggagaggaaggtaaagaagaagagaatattaagtagattgtaaaataaacaaaaaatagaacggtatttttattatggaaagtgactattttcatcttttattatataaatatattacaccatctgcgtatatgtaccatatagtgagttatttttaccaagttttgtgctgcgcatttgctgcgtcttnnnnnnnnnnnnnnnnnnnnnnnnnnnnnnnnnnnnnnnnnnnnnnnngctttccctatccacaaacccaataccacaccgaccatgccggccgccctcggaccctcgaaaaacctttctaaaccattccgtttggccccggggctccccctaagtaaattgaacatggctcctaacctgctttccttaggaacaaccgggccaatggacaagggggcttcggattccccaccccataaaaaaacgcccccgcggggcaacccgagcctgttttgacaccaaattccaaaatggaaattcttgcaacgcccctttatgtggcgaccctatcaacaagggaaacccccaagcccagggttcgcaatatcaaaatctatcgctccccggcatctggcatactgaattccga

SEQ ID NO: 14349 - DNA, 440 bp, Homo Sapiens
ggcacgagggcagtcctcgacagcctcttcagtgtccctcctgcggtgatgtccttactgtccccagccagggccggggaccggtgtttcactgaggacctgcattagaaacattttttaaattgttgtacaggaagagatgtgtctaaaacagcatcttaaagctgagtgtatttctttgcacaaggggtcatgctgatgaattcttctttcattctgatctttgttcagccaacagaagcgtccttttctaatgtcttccattcctaccccccacccaaaaacaaaagaaatatttgtagcttgctatctgtatttgaatttttagcaattttatatttagatactttgaaaaatgtaaatgactaatttggtcattaaatcttgtgacatattcgatattaaaatgatattaaaataaaagtcatataaatacaaaa

SEQ ID NO: 14350 - DNA, 859 bp, Homo Sapiens
ggtacattctaacaccagagaaccgatgtgtttgcccagtctcaaatgccatgtgccgagaactgccccagtcaatagtctacaaatacatgagcatccgatctgataggtctgtgccatcagacatcttccagatacaggccacaactatttatgccaacaccatcaatacttttcggattaaatctggaaatgaaaatggagagttctacctacgacaaacgaagtcctgtaagtgcaatgcttgtgctcgtgaagtcattatcaggaccaacagaacatatcgtggacctggagatgctgacagtcagcagtataggcaccttccgcacaagctctgtgttaagattgacaataatagtggggccattttcattttagtcttttctaagagtcaaccacaggcatttaagtcagccaaagaatattgttaccttaaagcactattttatttatagatatatctagtgcatctacatctctatactgtacactcacccataattcaaacaattacaccatggtataaagggggcatttaatatggaaagattcaaagtttgtctttattactatatgcaaattagacattaatccactaaactggtcttcttcaaaaaagctaagtatacactatctgggggaaacttggattccttcctataaaagtgggaccaagcaatgatgatcttctgtggtgcttaaggaaacttactagagctccactaacagtctcataaggaggcagccatcataaccattgaatagcatgcaagggtaagaatgagtttttaactgctttgtaagaaaatggaaaaggtcaataaagatatatttctttagaaaatgggaaaaaaaa

SEQ ID NO: 14351 - DNA, 520 bp, Homo Sapiens
gcggccgccccgcccccgatgctgtggccactatgaccagccggtactcaggagcaatgctgaaggcttggctcaaaatcccgtcgttgatgagtcgttggtaaacgtatctggcagcttgagaaatacccttgtgtgccaggcggtcctgcacctcacactccacgtccagcacctcactctccgctgacaggtccgtaaggacatcctgtaaaaagggcgttgcagaagcggccgtcagcctgtgatgggcagggtgggagaatgacaggtggtccctgctcctgacacttctgtggaggatggcgggggatggcaccatctcctagtttcggtcctgggactgaaccctaaactaaagagggaaacccagcggtggctcctgagggccctgatggcacgaccagctctgggccaggcgtgaagggaagaggggaccatggagtgtgcctaagacacgccctgggccttccccatcacacacacgtattctaaggaccccgtggcacagaacctgtgc

SEQ ID NO: 14352 - DNA, 742 bp, Homo Sapiens
ggtggagattccaagccgattagtcatggcccaggttttcgtaaagtaagcagggagggggcctggttcacttacctaggtgggccccgcggcccaaaggaaaagtttttgagaagttttttcgaggggcggagaccggcccgacaagatgggttgcgtctctgcggttgggtgggctggtataaataacatgtataaaaagcagggtgaagttgcaaatgaaattatgtcaaatttacagtttcttgttttaaacgaggggtcaatgtcatcagcattatctgtaaatcaaggtatcatcagatacatttaataattaaatataaatatgacaatggatcaaaaatgatcccagctagtttaaggattaatctcattaatcccacaatttaatgagaccatcccaaccacatgttatgaccttagaagtttcatgaggatgccacactgcacctatacacactttatcatgagctttaaatcgactgtagagttttgtggtcttccagtcccaaatgtttaattttccatttccatctcctgaaatcacataactcatgtctggtgaaaagtccacctgacaagcatagcctgctaccatatggcccttaaaaatttttttcttatttaatctaaatctgttctgtgctccaaaaattaagatttggttgtccattgattggcatgctagccattttccatttggagacaaagtcactgcaggcattgagtgcatactggg

SEQ ID NO: 14353 - DNA, 566 bp, Homo Sapiens
gcggccgccgccgctgcagacgacgagtccgccctcgtcccgcgcccccggggctcgcggagccaggtctccacctctgggcaggagagttgccgaccacctcgggggtgctttctctgcgcttgaacatctatagctgcttctgaggggctgggagccgggcccctgggagagacgagccatgaaccccccacagcctctgcatttggggacctcaccttaggagagtgccatttacagcttccgccagggcaaaggagctgagcagccatcccaagcccagcccacctccctcccccggcccctggtaggcatggactagcagctgtgagcagccagagctgatgcccggcccccaggggggcagaggcgccgccaccatgagcctgggcaagctctcgcctgtgggctgggtgtccagttcacagggaaagaggcggctgactgcagacatgatcagccacccactcggggacttccgccacaccatgcatgtgggccgtggcggggatgtcttcggggacacgtccttcctcagcaagcacggttgcaactccgggagcacc

SEQ ID NO: 14354 - DNA, 599 bp, Homo Sapiens
atcttccggccgctgcttcctgccgcctcactcagccaggtggagagcaccaatctgaaccagcaatgcctgcagcccagcccctcctctgaacactcagctattactgcgctttccctccccacggccccaactccagggcaggagcaactggacagtgggccctggcccgtggagcctgccacgcaggtgcctgagggccaggtgccacgcaggtgtctgaggaccaggtgccacgcaggtggtgggggtacagacaagatgctgggatgtcccctgccccatggtcaagggtgtcctgcctgcctgggtccagggcctgagggagccacatggatcccgagacttgtgttctcttggctgaaaacactgaggtgctcccatctgtgcgtggcccatgagctgggatggtcctccagctgcccacaaggtccgcccctctgtctctgcaccacctgtttgcataaacacactttgctacaatcttgctagtgcgttttcttaaaagataatctatttactgtaaaaataaattggactttgcaaaagcttttagaaggaaaagaaagaggattaaagagaattgctggtgatcctat

SEQ ID NO: 14355 - DNA, 718 bp, Homo Sapiens
  misc_feature (688)..(688): n is a, c, g, or t
  misc_feature (700)..(700): n is a, c, g, or t
ggggatcctggcgtttgcctgcagcaagatggcggcggtctcaatgtcagtggtactgaggcagacgttgtggcggagaagggcagtggctgtagctgccctttccgtttccagggttccgaccaggtcgttgaggacttccacatggagattggcacaggaccagactcaagacacacaactcataacagttgatgaaaaattggatatcactactttaactggcgttccagaagagcatataaaaactagaaaagtcaggatctttgttcctgctcgcaataacatgcagtctggagtaaacaacacaaagaaatggaagatggagtttgataccagggagcgatgggaaaatcctttgatgggttgggcatcaacggctgatcccttatccaacatggttctaaccttcagtactaaagaagatgcagtttcctttgcagaaaaaaatggatggagctatgacattgaagagaggaaggttccaaaacccaagtccaagtcttatggtgcaaacttttcttggaacaaaagaacaagagtatccacaaaataggttggcactgactatatctctgcttgactgtgaataaagtcagctgtgcagtatttatagtccatgtataataaatacatctcttaatctcctaataaattggacctttaaactacccggggggggaggaanaacaaagaaaanaaccgtgtcgggccggct

SEQ ID NO: 14356 - DNA, 1494 bp, Homo Sapiens
  misc_feature (567)..(647): n is a, c, g, or t
gggggagttctgggggccaggcggccgccgcgagtctggtatcctgagcttcgtgagttgagcgctgctgctccgcggtggagtcaccgcaccgctcccgggatcatggtgttctacttcaccagcagcagcgttaattcatctgcctacactatttacatgggaaaagataaatatgaaaatgaagatctgatcaagcatggctggcctgaagatatctggtttcatgtggacaaactctcttcggctcatgtataccttcgattacataagggagagaatatagaagacatcccaaaggaagtgctgatggactgtgcccaccttgtgaaggccaatagcattcaaggctgcaagatgaacaacgttaatgtggtatatacgccgtggtctaacctgaagaaaacagctgacatggatgtggggcagataggctttcacaggcagaaggatgtaaaaattgtgacagtggagaagaaagtaaatgagatcctgaaccgattagaaaagacccaaagtccgagcgggttcccaggacctagcagcagagaaagaatgcagagatcnnnnnnnnnnnnnnnnnnnnnnnnnnnnnnnnnnnnnnnnnnnnnnnnnnnnnnnnnnnnnnnnnnnnnnnnnnnnnnnnntggatgaacttaggagctattcatcactaatgaaagttgaaaatatgtcttcaaatcaggatggcaatgattcagatgaattcatgtaaaaggagaaaaggagaaaaggacctttgaaagatgtgaaatgtacagacaattgcagaccttttgggttcatctgtgttctgaagtataaaatacaaccaaaattctaccttcatcctacccagaaaattattgattttcaagttttaaaaaaattgtaccttttttgctgacagaaaaggatcagatatgtataaaatagttgaacttgacagcatataacttaaagtgaaaatgtttttgccagaacatgtcttggtaccttgtgaaagcaggctgcccttgttcttgagatagactttaaaatgaaccagctctgaaaagtacttctgctgctctggtctatccctgaaaacagatgtcttgaaacacttttcatattcttaaaataatcttcacttctgttaagaagaacatgttggtgggtaattatgcgaatgtttccctgtccctgatttctcgattaggcgtatgggttttgaaaaagagatttttcagaaggttgtcagcttcagtattcacgttccatcgtgtcatctgggtctgttagtgtagtgaccctcagtgcagtctgtcccagcgtttatgtccttgcttcctctgagcagaggcctccatcttagtatcaacatatttaaagaaattgatggtgttcatccagctgggggccctgtgggcagttgttggccttgagcaccaagtaaacccaagcccaccttatgttgacaactttctggggccccagggagtaattttctcc

SEQ ID NO: 14357 - DNA, 772 bp, Homo Sapiens
  misc_feature (489)..(548): n is a, c, g, or t
ggggctggggtgtttgtcgcagcgggttttcctcggcggtttgcggagctgctaggatggagcaggttgcggagggagcaagggtgaccgcagtccctgtgtcagctgccgacagcactgaggagttggccgaagtcgaagaaggagttggagtagtgggcgaagataatgacgcagccgcgagaggagcggaggcctttggcgacagtgaggaggacggagaggatgtgttcgaggtggagaagatcctggacatgaagaccgaggggggtaaagttctttacaaagttcgctggaaaggctatacatcggatgatgatacctgggagcccgagattcacctggaggactgtaaagaagtgcttcttgaatttaggaagaaaattgcagagaacaaagccaaagcagtcaggaaggatattcagagactatccttaaataacgacatatttgaggcgaactctgatagcgatcagcaaagtgagacannnnnnnnnnnnnnnnnnnnnnnnnnnnnnnnnnnnnnnnnnnnnnnnnnnnnnnnnnnnccagatgatctgaaaaagaaaaaagcaaaggccgggaagctaaaagacaagtccaaaccagacctggagagctccttggaaagtttagtttttgatttaaggacaaagaaaagaatttctgaagccaaagaagaactaaaggagtccaaaaagcccaaaaaagatgaagtaaaagaaacaaaggaattaaagttaaaaagggtgaaataagagatttaaagacg

SEQ ID NO: 14358 - DNA, 878 bp, Homo Sapiens
tttgggattcttttgttttattgataacagaaaactgtgcataattacagatttgatgaggaatctgcaaataataaagaatgtgtctattgccagcaaaatacaattataccatgccctctcaacatacaaatatagagttcttcacaccagatggctctggtgtaacaaagccattttagatgtttaattgtgcttctacaaaaccttcagagcatgaggtagtttcctttacctacgatattttccacatttccattattacactcttagtgagctaaaatccttttaacatagcctgcggatgatctttcacaaaagccaagcctcatttacaaagggtttatttctttctactcaatttttcttaaaaagaatttcaagaatcactacacagctaagatatctgagacttgcaatggctggagtctatcagtacaatagtaattgcaatcagattcagatacaagagaacaggttctaacaatttcataattaagttgatattctgtttctatctataagctcacatttaaaaactacttcctcgaactacttatttttcctcagccacaagtaagcgcaaatccttaaaaacagtgggttgagccccagctccatgtattaggtagctaggtatattgtgggattattccttgttaagtcaccccaggaaacatttgcagaatttagaaatgcatccagatttgtgagtttatttttaagacctgactaaaaatctgcactcttcaaaaacttattgatgaagtacaaattgaggcagaaatttacattcctttgcttaatccctgagaatgagtataatgatcatagaactagttcgagagactgcaatgtgtccagactactgtcagacc

SEQ ID NO: 14359 - DNA, 574 bp, Homo Sapiens
ggttggagaagtctagaagtgctttggtaagtgacttgtgatgaatacattcattgtctgaatgcaaacattatagctaaggtgtatctgaagccatttttgttggccttcaatgctatttgtcttgtatttgctatcgtatgtgttagaaaactatttcttatagctaacatcaaggtaaaattcagtccagcggatgtgaattacagcaaaatcccagtgaatgcgctttcacagtacttccaagtggcacaaagtaatttcagaactccactaatcattaacagcgattgcaaaaaagaataggcttctctgatttgatattttgggcaatagaacactgtctggcattctaggtacttcaatatgctgtccttcaatcaccctgatagtgaaagcagtcctggcaacttaatatttgcctccagatgggtctctagtcagttcatgctgaaacacagctctgccacccacaacttggagctgaccagcccccagggaacacggaagaggacaggacacacctgttctagaaaaccaggtcctcagtaaacactgctgagaagaatacctg

SEQ ID NO: 14360 - DNA, 1029 bp, Homo Sapiens
aaaaagcaggctggtacggtcggtatcccgggatatcgtcgagccacggcgtcgccacgcgtcggcagctgtgctgcggctgtgctcggccttagtggtgtcggggtctagtggacagagaagactcttggccaggcagatggcttctcggtggcagaacatggggacctccgtgcgccggagatctctccagcaccaggagcagctggaggacagcaaggagctgcagcctgtggtcagccatcaggagacctctgtaggggccctggggtccctgtgcagacagttccaaaggaggctgcccctgagagccgtcaacctcaacctccgcgcagggccctcctggaaacgcctggaaaccccagagccaggtcagcagggcctccaggctgcagctcgctcagctaagagtgctttgggtgccgtgtcccagagaatccaggagtcctgccaaagtggcaccaagtggctggtggagacccaggtgaaggccaggaggcggaagagaggagcacagaagggcagtggatccccaactcacagcctgagccagaagagcacccggctgtctggagccccccctgcccactcagccgcagacccctgggagaaggagcatcaccgcctctctgtccggatgggctcaaattggcccacccattacggcgatcaaggcgggaggctgcttccggagcccctactcctcaagagcactctgtctcccaggagtcttgaagtgacctagaagcctggggggcggactccggcatctcagcagctgtccaaggagctaataagcattatgggcagagagtggtgacatcgtctctcatactgaatgggaggccggagacacaccctgttgacgcaggctaactcggggttcacgtccggacaactctggaacacggaatgcaaacgggcaggtgtacgcaaggcgcaccgtcgccatgtgccgtagtgcacatgtgacggggaatctatcgcacgacgaccggtattagtaatatgtgtggtgggcacagcccc

SEQ ID NO: 14361 - DNA, 569 bp, Homo Sapiens
gacggatcacagtaacccaataccgcagtgcctgatctggcaagacagccaaagttaggcagaagaggattctcaggatcctgtgtctgttcccctgccccagtgctgcagaacggacttgggagccctccgtatgcctgtccagcgggtcacccagcgagtgctgagaccccattatctgtcgaggcgggccgagtcttccgttatccccaagacgctaccgggcagggttgggctgaatcaaatgggagccctccagacataagcgagccagaggctgcaaggagcggggtctgaccgcttacaccctttctccacagcccggcccgacctggagggccccggggcactgggcggtgagccacctcatggcaactgtcggtgccgtcccctgccctcgctcgaggcctcttactccccagcaccgctgtggtgtgccgggatcctgagcctaggcctcccgatgttcccacccgcatgatcccttcccgccacacgatgctccgttttcttccgttgtgaatgccgcgtcctgtcctggtgacaggagaacaatgttggtgaacgtc

SEQ ID NO: 14362 - DNA, 616 bp, Homo Sapiens
agctaacagcagaagaaaggtacctagatgcttatctagctctttatctttctagaaattctagaagatgagaggggcagtggtggctccaagggagtgattttaggatggactgggacagagaggggctgcttacacatactcacacagaggccattaatttagggagttcaaggtccaggaggttgacggcatctaggcctgtggcagagtgcactcctgcttcggggaatgtatgggcagcttcttgcctgtagttggagggttagagagagggatcaataatttcatggttggacctgagtttggagcgagtggagttagatacaaattctatgtttttggagaaagtatttgatcttcttggctgtgaggcaaagcgaggtttaaaaatatttttcacttaaaaatatatatatatgcatgtatatttaatactgtctatggattgtgccaatatctatttcatggttttgatattgtgtagttatacaaggagttaccactgaacgaaactgggggaagggtacacagaatctctgtactttttttgttgttgttgcaatttcctgtaaatctatgattattttaaaataaaaaagttaaagcataaaaa

SEQ ID NO: 14363 - DNA, 366 bp, Homo Sapiens
  misc_feature (124)..(124): n is a, c, g, or t
aatggcaaagtacctagcacatagataatacccaattaatgctagctatttttattattaaggttaaacagagaccccaagggctggaatcattctacactggtgtaattattaatacatcaanacctattctagttttccatgatatatatgagtccatgataaccttttaactagtaccatcacaggcagttaaaacgatctatcagaaggtacataaatccaaaaacagcagtgtagtgattacattgtacagatgaagcagcagtcttaaggcagaaagaaacatgttcatggaatatagaaatagaaaatctgtatcaatttctttttttcaaattcagtgagtaaaaaatgtaccctttt

SEQ ID NO: 14364 - DNA, 504 bp, Homo Sapiens
acctcccctccacatcactgacacagctgagcttgttatccatctccccaaactttctctttctttgtacttcttgtcatccccactcccagcccctattcctctatgtgacagctggctaggacccctctgccttcctccccaatcctgactggctcctagggaaggggaaggctcctggagggcagccctacctctcccatgccctttgccctcctcccatcgcctccagtggaggctgagctgaccctgggctgctggaggccagactgggctgtagttagcttttcatccctaaagaaggctttccctaaggaaccatagaagagaggaagaaaacaaagggcatgtgtgagggaagctgcttgggtgggtgttagggctatgaaatcttggatttggggctgaggggtgggagggagggcagagctctgcacactcaaaggctaaactggtgtcagtccttttttcctttgttccaaataaaagattaaaccaatgaaa

SEQ ID NO: 14365 - DNA, 449 bp, Homo Sapiens
  misc_feature (46)..(282): n is a, c, g, or t
  misc_feature (285)..(287): n is a, c, g, or t
  misc_feature (367)..(381): n is a, c, g, or t
ttttattgattgattgatggattgattgagacagagtttcactctnnnnnnnnnnnnnnnnnnnnnnnnnnnnnnnnnnnnnnnnnnnnnnnnnnnnnnnnnnnnnnnnnnnnnnnnnnnnnnnnnnnnnnnnnnnnnnnnnnnnnnnnnnnnnnnnnnnnnnnnnnnnnnnnnnnnnnnnnnnnnnnnnnnnnnnnnnnnnnnnnnnnnnnnnnnnnnnnnnnnnnnnnnnnnnnnnnnnnnnnnnnnnnnnnnnnnnnnnnnnnnnnnnnnnnnnnnnnnatnnnggtgtgagccaccacacccgaccagcatgacctttaaacacaataggacttaagacaaatttagtaaatgcagatttctnnnnnnnnnnnnnnnaatcttctttgaaaatgcccatatttagtgtaggtgaaatatactaaatatgggcacacattatggag

SEQ ID NO: 14366 - DNA, 714 bp, Homo Sapiens
ccggggcccagaaggttgtgatgaagaaaagtgggccagtgtgggaatgcggcaagaaggaattgacttcgactgtgacctgtggggatttctcccagctctagacaaccctgcaaaggactgttttttcctgagcttggccagaagggggccatgaggcctcaagtggacttttccaacccctcccctggcctgttctgttttgcctgaagttggagtgagtgtggctcccctctatttagcatgacaagccccaggcaggctgtgcgctgacaaccaccgctccccagcccagggttcccccagccctgtggaagggactaggagcactgtagtaaatggcaattctttgacctcaacctgtgatgaggggaggaaactcacctgctggcccctcacctgggcacctggggagtgggacagagtctgggtgtatttattttcctccccagcaggtggggagggggtttgggggcttgcaagtatgttttagcatgtgtttggttcaggggcccctttttactccccttgagctgagatggaacccttttggcccccgagctgggggccatgagctccagacccccagcaaccctcctatcacctcccctccttgcctcctgtgtaatcatttcttgggccctcctgaaacttacacacaaaacgttaagtgatgaacattaaatagcaaagaaagaaaaatagtacaaagag

SEQ ID NO: 14367 - DNA, 1021 bp, Homo Sapiens
tcgaagaaacaattcctccatgattatagattagaagaggtccaggataaagatggaaagccactcctgccaaaagagtctaaggaacagcttccacccatgagtgaagacttccttctggatgctttgtctgaggacttctctggtccacaaaatgcttcatctcttaaatttgaagatgctatacttgctgctgccatctctgaagtggtttcccaaaccccagcttcaacgacccaagctggagccccaccccgtgatacctcgcagagtgacaaagacctcgatgatgccttggataaactctctgacagtctaggacaaaggcagcctgacccagatgagaacaaaccaatggaagataaagtaaaggaaaaagctaaagctgaacatagagacaagcttggagaaagagatgacactatcccacctgaatacagacatctcctggatgataatggacaggacaaacccagtgaagccacctacaaagaaatcagaggattcaaagaaacctgcagatgaccaagaccccattgatgctctctcaggagatctggacagctgtccctccactacagaaacctcacagaacacagcaaaggataagtgcaagaaggctgcttccagctccaaagcacctaagaatggaggtaaagcgaaggattcagcaaagacaacagaggaaacttccaagccaaaagatgactaaagaaatacaagttaaggtatctggtatctgcatgtaaaatcttcagctggtggatggtgacttttgaagaacaaaaggctttggcaacagaaaacaattgttctgggtgatttctagaatggtttttgttgagtctctgaacatcctaaatattggtttgttattcttttccagaaagaaaatgaatttgactggttcacctgtgtactgagtattgataaactttgaatttttttaattgccttcaattgggagagaaagctttatatttgtaagaaatatatttgataaagtttcttaaagcaacac

SEQ ID NO: 14368 - DNA, 563 bp, Homo Sapiens
tgtggagcaaaatttaaatattaaatttgaactctattgaacagggacagaaaacaatggtcactaaagccctggaacgagttgtgtgagccccttgaggcattcatccagtgctgtttcggagaactagttattgaaaaacaacagacaatggcaaaaacaagttgtcctttttgtattccttgagcccagtcaggaagggctttcatgaccgggcctcctgacaaacaacttgttacaaaaagagctagggtcccagaccgcaccaaagacccatgagacctctcctcgtctgtgcacagactactggccaactctggagcccaggctgttgcttcctggtctggtgatgaatcctccatagtctggttttaacctcagatcactgaaagaggcactgaagagacagaaaaaacagtcctgaaatcaccgtttcctcatccccagcagtgatggcatgctgcagagatcaactctgggttcggtgagctccaacacgtctggcagccgactttacagtggaagccctgtcctgagccggccgatgtggtggaagctcggag

SEQ ID NO: 14369 - DNA, 328 bp, Homo Sapiens
acgccaccgccggcgccaggccccgcccccgcgaggctgcggctccgccccgagtggggaagtcaccgcctgcctcggctcgacccccgcagggcaggaccctgggcgactccgcccgttcctccagcaaccgccgctaagcccggcgcaccgctccaacctgttctccacttggcggctagaaatcggcctgttccggcctcgcctcgggtctttcttagtcctttcactaagtcaccgatgttagtcgccaggaggcgctgtgccgggggtggggatggcggcggtgaacccggaagatggccccttacccttccagagatgaagc

SEQ ID NO: 14370 - DNA, 739 bp, Homo Sapiens
gcggccgcccagcttgcactcaatgatatagcccatggtgcagtcatcaggcagccggatgagagcagatgtgtccatgaaacgggagccactggcccacggagccatcttcaaagccagtttgcgattgatgcagaagccagcacccccagtggcaaaccagaactgtaccagcctcgtgcggttgtggggctgtggctctgaggcatggatgggccggttcaggctgggccttcccacatagacgtcgcgggccagcgggaaggctctcagaagctgcagcagcgcccttgggttcacatagttgtcatcgtccacatggcagaaccacctaagcccactggccaagaaggtgtcgaactcagcagccatcttgcaggacagagctgggtggctgtgttccgcggagcagttggtgaccacaaggtgggaccccagtctctcctggaggcctttgtctgggctgtcggtgaagacaaatgtctgttccctggtcctggaaacccacgtgtcaagcagcagctccaggcgcaagcggtggaaagccccggtcgtcttcactgcaatgaagacatcgtgtagctgtagcttaggggggccccggttctgctggctcagcttccgggtcccttgtacccgctgcggggacagggtcaagtggtaccgcagacacaggagccccatgcacaaggaggggtgaggaggctccagcctagccccgcgggaacccgcactgcat

SEQ ID NO: 14371 - DNA, 748 bp, Homo Sapiens
ggggacgctcgaagggcggggagcagagggagatacagaaaccgacaggggccaggcgcccggtggctccgaagcggggaagtgggacaagatggtttacatctcgaacggacaagtgttggacagccggagtcagtctccatggagattatctttgataacagatttcttctggggaatagctgagtttgtggttttgtttttcaaaactctgcttcagcaagatgtgaaaaaaagaagaagctatggaaactcatctgattccagatatgatgatggaagagggccaccaggaaaccctccccgaagaatgggtagaatcaatcatctgcgtggccctagtccccctccaatggctggtggatgaggaaggtaaatgtctgctctaagaagcagacaaccggacatgcgcattcatagcagaaggaaaccatcaagaagtggaaggctgaccatgatgagcagtagatgaatgtgtatgtctaaacaaggactgctctgtgtcctcacagatgaatgaggtcatgctgggaattccctctgcagggaactggcctgactgacatgcagttccataaatgcagatgtttgtctcattacctttttgtatagtttattaaagtattaatatagttttaataagtaaatatttttaggttgcagaatggactcctcatctttatattcacgaaaaagcaatctgaagaaaacaaataaaagcctgtgtatttagcacaaaaaaagacag

SEQ ID NO: 14372 - DNA, 743 bp, Homo Sapiens
tgacagtggagaggagggcgaggctgagcctcacacatgcccacgctcccctgacactgaagaggatccacaactccttggagaaacaccctcacgtctgttgccgcacacattcctctcagctccgccccatacccgtcactacagcctcacctcccaccccgtgtcactacggcctcacctcccacccctgtcactacagcctcacctcctacagccttaagtcccaggcccatgtctgcctgtccaagggctcaagactttctaactgggatgtggtagagggactgaaggtacctttgggggcaacagcaccctagtttcattctcaactctagccctgcacactcacctgtggcacggaatgaaaacagagcttcccgtgcaaaaagggtcacgcctcccacccccgccccctccctgcacctcctgtcctctcccagttcattcctggaaccagccaggccaggcaaccagtggcccccaaaggcaggcaggatcctcaggccccagccgcgggaggctggaagggctggcagatcgcttccctcatccacctccaccggtccaggtctttgctgctgtccccagacctcctgtgacaccacgccagatcacagggcaccaggccagagatagtcttctttttgtcctttctggcctctggctagtcagtttttcatagccttacagtatctggctttgtactgagaaataaaacacattttcatatttggttattt

SEQ ID NO: 14373 - DNA, 306 bp, Homo Sapiens
tgctgtatagcccatgaatctcatcggctttatcatgaaagtttattgtttttaatcctagtacaatcagctaccagttacatacagtaaaaaacagaaacagccacaaagcaatgatgatagagatagtctgtgacattgtacagtggaggaaatactctctgttggaatcctccagcagacccccgcctggcttcagcagttaagctatcactccctccctccccaaaacagttaaaagaaaaattaacgtcttgcttgggtacagcaagattctaatacctcttggggacactggagaacttt

SEQ ID NO: 14374 - DNA, 443 bp, Homo Sapiens
ctttgaaccttaaaggttctattattaaaagcagcacagattccacatttttatacatgaggatcttctttgtggtgaataccaggattgactgcatccctttaaagaagttttatgtccctgactctggctaaaattatctaatttccagatgcttttgtagatgactgaagtatttgtgagccacatattgggagttctagatttgagtgaatggcaggaaagggccatctccattgagatgattaagtgaaccaaactagttctcagaattctacagagaaggagggaatcagactgaggaagctgtgacataggacttgaagaccaaagactttgaaatttgcgagctgctcatgtgtgagttattatcactgctgtctttctattgagttacaaatctatatttttattgaagtttaaataaagaaaaaatttacaag

SEQ ID NO: 14375 - DNA, 1228 bp, Homo Sapiens
  misc_feature (1046)..(1046): n is a, c, g, or t
cctttctgcttggtgacctccagtgacaaaaggcagctgcctccccagtcagttcctcgcatggagcctcccgacactgtcctgcttcagaactgaaccgggagcgctttgccaccatggtgcggccggtggccgagagcggggccaccaagaccagccgcgtctacggcttcatcggcctctgctggctgctggccgcgctgctggggatgctgcctttgctgggctggaactgcctgtgcgcctttgaccgctgctccagccttctgcccctctactccaaagcgctacatcctcttctgcctggtgatcttcgccggcgtcctggccaccatcatgggcctctatggggccatcttccgcctggtgcaggccagcgggcagaaggccccacgcccagcggcccgccgcaaggcccgcgcctgctgaagacggtgctgatgatcctgctggccttcctggtgtgctggggcccactcttcgggctgctgctggccgacgtctttggctccaacctctgggcccaggagtacctgcggggcatggactggatcctggccctggccgtcctcaactcggcggtcaaccccatcatctactccttccgcagcagggaggtgtgcagagccgtgctcagcttcctctgctgcgggtgtctccggctgggcatgcgagggcccggggactgcctggcccgggccgtcgaggctcactccggagcttccaccaccgacagctctctgaggccaagggacagctttcgcggctcccgctcgctcagctttcggatgcgggagcccctgtccagcatctccagcgtgcggagcatctgaagttgcagtcttgcgtgtggatggtgcagccaccgggtgcgtgccaggcaggccctcctgggggtacaggaaagctgtgtgcacgcaagcctccgcctgtatggggagcagggaaccgggacaggcccccatggtcttcccggtggcctctcggggcttctgacgccaaatgggcttcccatggtcaccctggacaaggaggcaacccccccnccctccccgtaggagcagagagcaccctggtgtgggggcgagtgggttccccacaaccccgcttctgtgtgattctggggaagtcccggcccatctctgggcctcagtagggctcccaggctgcaaggggtggactgtgggatgcatgccctggcaacattgaagttcgatcatggtacgtg

SEQ ID NO: 14376 - DNA, 919 bp, Homo Sapiens
tttcgggggctcaataaaaacttttaattacatttcagagacttcgtacagtgcaacagtgaatattcactgttaattttcacaagagtccatttcatcaaacgttcagagagtctgccttttcattcccttgttcctcagtgctccaatcaggtttccagtctcccagaggtttcttttagttttgattaccgaccaaaactccagtttagggagaatggaagtccaccgtcccatccccaccaaaacatatttcagtcaaacccaatcccagtccctaaagaattaggaaagtatgggccaagggtccttttaattatacacacatcacccttaaaactgcgtgtgtgtacgagaaataaagaaaaacacaagaggggctgtaaaatactgcacaagacaacaaaacagaaggaaagtcttgagggagaaacactaagacgcgagcggcaggatcctacctcctgtccgtgacactccccattgacaccttccccactgtgccatggcggggaaggactaaagtcgagtctctagggtctctagaggtcttgctaggatgagcttaaagagatggggtgagggtggggggaactgcttccattatattaagtggtactcagggattaagcagtgaggaggggcaggaagattcagaatgatccgtgggtccaaccctttggatgtgaacattcctggatagaaactggaggactctcttgacaaagtgcaggaagggataaacaaaaataagatcaagtgaaatgggaaaaccctcaaagagatcaagatgggcagtggtggtggtgaaggtagagaagtggatttcagaacctgtcctggccaaggtggaagaatgtacggcagccatgaagaactattatggctgcaggtagctagcacctctcaaaatgaggac

SEQ ID NO: 14377 - DNA, 1360 bp, Homo Sapiens
  misc_feature (60)..(92): n is a, c, g, or t
tggtaccgcgtccggtttccgggatatcgtcgacccacgcgtcggaggaggggacagctnnnnnnnnnnnnnnnnnnnnnnnnnnnnnnnnnccatggcggagccaggaagccgggagtcgagacccgggcccgcagcccgagtgtcgccgccatggcttcgccgcagctctgccgcgcgctggtgtcggcgcaatgggtggcggaggcgctgcgggccccgcgcgctgggcagcctctgcagctgctggacgcctcctggtacctgccgaagctggggcgcgacgcgcgacgcgagttcgaggagcgccacatcccgggcgccgctttcttcgacatcgaccagtgcagcgaccgcacctcgccctacgaccacatgctgcccggggccgagcatttcgcggagtacgcaggccgcctgggcgtgggcgcggcacccacgtcgtgatctacgacgccagcgaccaggcctctactccgccccgcgcgtctggtggatgttccgcgccttcggccaccacgccgtgtcactgcttgatggcggcctccgccactggctgcgccagaacctcccgctcagctccggcaagagccaacctgctcccgccgagttccgcgctcagctcgaccccgccttcatcaagacctacgaggacatcaaggagaacctggaatcccggcgcttccaggtggtggactcccgagccactggcaggttccgcggcaccgagcccgagccccgagacggcattgaacctggccacatcccaggtaccgtgaacatccccttcacagacttcctgagccaggaggggctggagaagagccctgaggagatccgccatctgttccaggagaagaaagtggacctgtctaagccactggtggccacgtgtggctctggcgtcacagcctgccacgtggcactaggggcctacctctgcggcaagccagacgtgcccatctacgatggctcctgggtggagtggtacatgcgcgcccggcccgaggatgtcatctcagagggccgggggaagacccactgaagctgggcaggacacaggcgagctcaggtgatgccggccaccagcaatgcctggcctggtagctccgcttctgctttcaccaagagagtgtttcttcactcaactcaggtggcatttggggtgacatctcaaaggccaggaattccgttgacttgttggctgccagtaggggcgggaggaaaggcggaggcgagccctggaggagggaggccacaactccgagctgcccacctggtgctgagctggggccccgcctcctttctgttttatttttgaggaaataaaataaccaagtgctaaatcttgtaaaaaaaa

SEQ ID NO: 14378 - DNA, 482 bp, Homo Sapiens
ggcctcccaaagcgctgggattacaggcgtgagccaccacacccggccgtggaatggttttcttagcatatcctcctggggccatggcgccccggctgtgggccgtggtggatgtcccttgtttcagtggtcctacaaaggtagatggtgggcggacaccgaagtcaacttgactgtaaaagtaccccataccgttgacgcgctgtggcagacctgtgggtgcggtctcccctctccaaatgccacctcttcctgctccctcctcttttggctcctactcagtagttccattgtgggctgcagtaatataaggacctgttctggacacagcactgggcccgctggggttttagtagggcagccccttccctgcaggagtgaggcatggtgacagcagtcccctatgtgcccccaagtcatctgagcattggtgtgcattaaggtactcaatcttccaacaataaataccataagtgcttagg

SEQ ID NO: 14379 - DNA, 888 bp, Homo Sapiens
gggtttttacaaactgagaaagtagctccagcagcacccgagagggtcaggagaaaagcggaggaagctgggtaggccctgaggggcctcggtaagccatcatgaccacccggcaagccacgaaggatcccctcctccggggtgtatctcctacccctagcaagattccggtacgctctcagaaacgcacgcctttccccactgttacatcgtgcgccgtggaccaggagaaccaagatccaaggagatgggtgcagaaaccaccgctcaatattcaacgccccctcgttgattcagcaggccccaggccgaaagccaggcaccaggcagagacatcacaaagattggtggggatcagtcagcctcggaaccccttggaagagctcaggcctagccctaggggtcaaaatgtggggcctgggccccctgcccagacaggtgccatggccttgtacctggaatcacagcctactcagggaggctggaagcaaggaggatcacctgggagggccacggagttgggaagacccagccctggtatgaacaggaaggggagaatccccatcctccttttaagaaagatagaactaaagttgaaacttaagataaattaaaaattacccgcccgtgtgttggagaccgaccacagtggccaacaaaatctcgaaacattgtgcggggccccgcgccttcggcccccttccggaaaaagagttttcctaagaacccattttcgttttttgggccgcggcgcgggtccccaatttaaggttaaaagcggaaccaatgggggccactaaagcctggttttccccccaaagagagaaacaccccgggggccaatgggaacataaggggcctgtggggcatttcccctacccccatatt

SEQ ID NO: 14380 - DNA, 875 bp, Homo Sapiens
  misc_feature (484)..(499): n is a, c, g, or t
cccaccaggaagctggacctgtggatgctgccggagattctcatcatccacctgaaacgcttttcctacaccaagttctcccgagagaagctggacaccctcgtggagtttcctatccgggacctggacttctctgagtttgtcatccagccacagaatgagtcgaatccggagctgtacaaatatgacctcatcgcggtttccaaccattatgggggcatgcgtgatggacactacacaacatttgcctgcaacaaggacagcggccagtggcactactttgatgacaacagcgtctcccctgtcaatgagaatcagatcgagtccaaggcagcctatgtcctcttctaccaacgccaggacgtggcgcgacgcctgctgtccccggccggctcatctggcgccccagcctcccctgcctgcagctccccacccagctctgagttcatggatgttaattgagagccctgggtcctgccacagnnnnnnnnnnnnnnnngccctctctgcaatctcgcttctcgtgtccgccccgcttctcttattcgtgttaggtgcccccgccaggcattgcaggcttagtcgtggctactgttctcctgtgccgctgcatcgctctctcccgggaaagaacaggtcgtgtctcctcctagcagtgcgcgcccccgcctgtgtttgcccttccagcagtgaccctcccttctagtctttatttatggtcgtgcccttccctctcctcaacccaaagtggtctgccttggggggtgatgggggttccacctgaaccagagtgtatttttcttattgaagcccctgtaccttctgcctgtgtgggggaataaataaagcacccgtctgctccccaaaaaacacac

SEQ ID NO: 14381 - DNA, 516 bp, Homo Sapiens
  misc_feature (305)..(420): n is a, c, g, or t
  misc_feature (425)..(450): n is a, c, g, or t
  misc_feature (458)..(475): n is a, c, g, or t
ggttgtgcgctttcttttacaacaagcctctagaaacagatagtttctgagaattactgagctatgtttgtaatgcagatgtacttagggagtatgtaaaataatcattttaacaaaagaaatagatatttaaaatttaatactaactatgggaaaagggtccattgtgtaaaacatagtttatctttggattcaatgtttgtctttggttttacaaagtagcttgtattttcagtattttctacataatatggtaaaatgtagagcaattgcaatgcatcaataaaatgggtaaattttctgannnnnnnnnnnnnnnnnnnnnnnnnnnnnnnnnnnnnnnnnnnnnnnnnnnnnnnnnnnnnnnnnnnnnnnnnnnnnnnnnnnnnnnnnnnnnnnnnnnnnnnnnnnnnnnnnnnnaaaannnnnnnnnnnnnnnnnnnnnnnnnntttttcgnnnnnnnnnnnnnnnnnnaaaaaattttttaaaaactttttttggggggccgggccccc

SEQ ID NO: 14382 - DNA, 685 bp, Homo Sapiens
  misc_feature (105)..(105): n is a, c, g, or t
cagataattggaaccttctgatatgacggagtctgatccagatgctgatagaaccactttaaatcatgcagatcattcatcaaaaatagtccagcatcgattgtnatctagacaagaagaacttaaggaaagagcaagagttctgcttgagcaagcaagaagagatgcagccttaaaggcggggaataagcacaataccaacacagccaccccattctgcaacaggcagctaagtgatcagcaagatgaagagcgacgtcggcagctgagagagagagctcgtcagctaatagcagaagctcgatctggagtgaagatgtcagaacttcccacgctatggtgaaatggctgcagaaaagttgaaagaaaggtcaaaggcatctggagaacaaaacagtaagttggtggacttgaagctgaagaagctcctagaagttcagccacaggtggcaaattcaccctccagtgctgcccagaaagctgtaactgagagctcagagcaggacatgaaaagtggcacagaagatctccggactgaacgattacaaaaaacaacagaacgttttagaaatcctgttgtgttcagcaaagattctacagtcagaaaaactcaacttcagtctttcagccaatatattgagaatagaccagagatgaaaaggcagagatcaatacaggaagatac

SEQ ID NO: 14383 - DNA, 671 bp, Homo Sapiens
gaagtgtcagtgtcgtgaaccaaaatttacaccagagagccaagtatttttcagtttacagatagaaaatctggcaatgtgttttttctttgctctgagcacataactgaaagagagttaataataaatcttcagatgatggccttagcaagcatcctttcgctgagctgaaatagttataggccacatcacagataaaagacactgatgagtcactgctttcaacttctgataatttcttggttttgaataaagtttcatgaagtcgtaacaatgattctttcaacatatacgtctccaatcaagtaatcatttttaacatgtggggataataccaagcttagaagagtccatctttctgagaagtgagattctgaagataccctggattccaagtcctcattacaaagacaatctgccaaggttgaccaatttctcaccaaggatatcgcctttgagccaaggagttactaaagcatgtttatctgaactaggacatgccttttcaataatcttaagaagagaattccatttcaagtccaccttggttagatcatccaagactttttttctttccatatcattgtcacagcaccggagagcactgtacaaaatgtccaccaggaaaccaaaatccttccttttgatcttcatttagccaacctatcagt

SEQ ID NO: 14384 - DNA, 299 bp, Homo Sapiens
taccaaggtcgagttggagagaaattcattgaacaacgatttgtgctcctggcctggagcaaattcttctcctctgctctacgccacctcaggcagcagggacagggcaaagggctccaggcagaaatcctggtggctgggcagcagagtggcagtgtggcgatcgcttcttctcgccattgccagagcattcagaccctttcccgtctgtccccctaccccaagtcccccagtccctcaaaggaggcagggagtggggactgcaggaagcaggacaggtgcacgggtggcctgggcag

SEQ ID NO: 14385 - DNA, 324 bp, Homo Sapiens
agatatttaagagtgtacatagtaggtgctcaacaaatttattgaatgaatgagtgaatggaaaaactgggagagtcaaaagtgaacagaagctctccatttctacttctgtcacaaaccacattaaattgtaaataaggcccttctccacttgacttcaggcagcagattgtctagaagcctaaggacagcaatttctctgacaagacaaagtagatattttataccaggggttggcaaactactgcccacgggccgaatttggcccagtctgtttttgtatggtgcaaactaaaaatgatttttacatttttaaagagttat

SEQ ID NO: 14386 - DNA, 474 bp, Homo Sapiens
gattttctgtgcttattttaatatctcatattgacattcaattcttattttaattaggaaacataatattgtaaactatggtgtacagtgtttcaatatttaattcatttaaaaaagatacctttttacgagtggtaatgaaaatacacgtgactaaaagcagagcactgataattttggggggaaaaaacttaaatttattaaggaaagaaagaaattgaaccaggccattgttttaatatgcacataattaactgtagaactttatattgtgaaatttaattaaacatgttctagccatttggggttttgaaatgctaggtaaaatactaagttaaaggatgtgaggaatcaatattatccttctggcatttttgtttcagctacataataacttttttagtaggtgtgtaaaaaagctcctgatatttttgccttgatctagaggaaaatatgttctataaagggtaaatc

SEQ ID NO: 14387 - DNA, 484 bp, Homo Sapiens
tggtttcatcactaacaaaagtgcctcatcataaaaatacagttggtttttagggtgccatattgttaaaattagataacttacttacattgaataaacgaatgcgttttattggtaacagatatcattacatttaccagttttaacacaggtggatacagaacttccattctttagtcattccaggtggatctgagttttatattcaaacttttaatacagtttttgagttttgtgtgacttgaatttttaatctttctgtaaaatacgtaacttaaatgaacatattaaatgtgtatcttttcttcagataccagatttgatataatgttgtaacataggtgtgtagatagtggatcctggatggaactggcttctttatcgagaagaatataattctgcatgaggacttaatgaatccaaacctgtgtcatgcctgtgtgcatacccaattaaacactggaaataaaaattgttttggtga

SEQ ID NO: 14388 - DNA, 770 bp, Homo Sapiens
  misc_feature (210)..(210): n is a, c, g, or t
aagaccgggtgggttcccttgggactaaccccccgggtatcccaaggaccaatttggaggttccaaggccccagcgggcaccaaaagagggggagagggccaggcaaaagaagacccttggggataccagggacccaaccgggagcagctgggcttctttggtttacatgggcccacccccgggacaagggaaaccggggggagaggggnaagaaaggctctaaagggcctaaaggggataagggagaccaaggagcgcctggattagatgccccctgcccattgggcgaagatggcttaccagtccaaggctgctggaacaagtgatgcctctaaccttggattggcctgtgtgtgtgtttgtacatagaatatttatttttatacagttttcactttttgaaaatgccagaagtatgatgcatcttacagattattaaaaaagaaagaaaaacctgcatattttgtacagaaaatatcaacctcttcccttttgtttacaagatgttttgtataagcctatgtctctaatacattttttgtttggtcgtaatgtctgcatgatatttgtgcacatttattaagtatcgaagcttaataaattattgtgtcctggtgccaaagggggccagccagaactgaggtgctggctagctcatgtgtgaattcacataaatgtagaggtccatgatatttgctaagctaggtgtgtctaagagtattttaaacccttatggattttcattattaaaggaaatgaaacatggcaa

SEQ ID NO: 14389 - DNA, 371 bp, Homo Sapiens
acaaaagtaatctcctaccaaaagaactaagaggcccagccctcagaaacccttcagtgctacattttgtggctttttaatggaaaccaagccaatgttatagacgtttggactgatttgtggaaaggaggggggaagagggagaaggatcatttcaaaagttacccaaagggcttattgactctttctattgttaaacaaatgatttccacaaacagatcaggaagcactaggttggcagagacactttgtctagtgtattctcttcacagtgccaggaaagagtggtttctgcgtgtgtatatttgtaatatatgatatttttcatgctccactattttattaaaaataaaatatgttctttagtttgc

SEQ ID NO: 14390 - DNA, 336 bp, Homo Sapiens
  misc_feature (62)..(71): n is a, c, g, or t
gtaataaacaaattccttttataaacaaaattttaactgaaaagccacagcagatggggggnnnnnnnnnngaaaggatattacttggtaaaatccagtgacatctacaatagttttacagcacatttaagcattctagggttttatatcttcacctgccttccatttcttagttgatccttataaaatctctcattacgaacataggtttgacctcaaaactagtcatgaatttgagtgccaggaaaagcagaacaacagtccaaatttctatcttaatatcatagccttaattcaaaaatggttttgtgtaaaacacaacgcccaactaaatgg

SEQ ID NO: 14391 - DNA, 1558 bp, Homo Sapiens
gccgcgcgcgcgggagcgcgggaggatcggcggctcgcggtcactggtccctggctcggtggcccgcaccccggggctcacacttacccgcgcggaggagcagcggccgggtgtccacccccatcctgcgcccagtctcctcgattcccctcgctctgagccgggagagccgaacagctgaagagagttcactgactccccacccccaggtgggccttgtgcacatcatgaccagttttgaagatgctgacacagaagagacagtaacttgtctccagatgacggtttaccatcctggccagttgcagtgtggaatatttcagtcaataagttttaacagagagaaactcccttccagcgaagtggtgaaatttggccgaaattccaacatctgtcattatacttttcaggacaaacaggtttcccgagttcagttttctctgcagctgtttaaaaaattcaacagctcagttctctcctttgaaataaaaaatatgagtaaaaagaccaatctgatcgtggacagcagagagctgggctacctaaataaaatggacctgccatacaggtgcatggtcagattcggagagtatcagtttctgatggagaaggaagatggcgagtcattggaattttttgagactcaatttattttatctccaagatcactcttgcaagaaaacaactggccaccacacaggcccataccggagtatggcacttactcgctctgctcctcccaaagcagttctccgacagaaatggatgaaaatgagtcatgaacacagaaagtctaagaggagaaatatgatggatgaagagctctgtagatgctgtatagacactaaataagagttgattagggtagtatattatagtcatctgttatgctgtgaaatttggaattcaaaattttgaagtctgtaaattgtgttagtcattaacttagtcacctgttgtattctggatctacacaaaattattttaagtgctcttattaatctgtgaggattaatatacaaaaagtatcctttgagatgaagtcgtgttctcaaaataaggttatattattttctttttctgcttgattttcatcttgtgttttgctttgtttttgtaaggaaccatctcttggtttggtcacatcagttcacaacagccatttgttttcaaggtcaaggctccaggcaggttgttactggtgtttgcagcctgtcagtacttgcagtactggaataggttctaggctagtgtctgcgcgtcactgtggttttagcatgggaggacttatttgagaaatactaccttacttttctatgatttctttttacagagttatagtgtgtttactcctaagatgacagttctctttgtctatattcagcatctaagacaaatatttaaacattttaaagaaccactgtgttaagtttaggattatttacttaccaaattagaagtttgacttttatgtgttatacacaatcttaaaatttcacgaattcacctttttaatagtatccatgtacataataaaatcaaagtttaattagccaaa

SEQ ID NO: 14392 - DNA, 657 bp, Homo Sapiens
aaactattgagagttctttccacctcttgcggaaccaactcttggaggagaggcccatgtatctgcacgagcacttagcttgttcagatctctgcattttataaatgcttcttaccaagaaagcatttttaggtcattgcttgtaccaggtaatttttgccggggatgggtaagggttgggttttctggtgggagtggggtggtgggtattttttgttgatgctttagtgcaggcctgttctgaggcaataacaagttgctgtgaaaacagcatgtgctgctgcctttgtaactgcatggaaacttttcacatgggtttttctccaagttaatacagaaatatgtaaactgagagatgcaaatgtaatatttttaacagttcatgaagttgttattaaaataactaacataaaacttaattactttaatattatataattatagtagtggccttgttttacaaacctttaaattacattttagaaatcaaagttgatagtcttagttatcttttgagtaagaaaagctttcctaaagtcccatacatttggaccatggcagctaattttgtaacttaagcattcatatgaactacctatggacatctattaaagtgattgtccacaaacaaaaacccccccactacacaacccttgt

SEQ ID NO: 14393 - DNA, 366 bp, Homo Sapiens
ggaagcatctgaacacttgcatttctattttcctatccaaaggcatccacatctaagtgtgtttttaaagttgattaaaattatttttctgttaaagcattctgaaagtgtttgtctttacctagaatgatttgtacacactcgtggtcaactgaacatgaatgtcagtagtagtctaattatgggaagggtaaacgtgttagattaaggctcttaaagctctaaaccatataaactatggacttgtatcatgatttaactgttcttagatctttcttacacagtgattcattcctctatttgtacagtggctttatgaaatgttgtgaattgatactgtaatcaataaagtgcttttaaccagaa

SEQ ID NO: 14394 - DNA, 646 bp, Homo Sapiens
tcgagtggagaacctaccaatatggagaacagatctatgcttctcgaataccagagaaaccataaactcatctatcaagtatctccgatatggtgtgccagagtgctctgtgaagaatccttttccatccctaccacgtgtctgggtgaagggagaggagggggtgacaagctgccagtacactagcaggcactcctggtgatgctctgggctctgctccctttctgctggtagtagtaggcatgttttctggcagctgcagcagactgatgttggggggaggaaggggccacccaccaatcacctcttcttgaagccgtattttttgcgttcatagaagaggtctgtcttagagctccccagattgacaatctttgggcagccatctctgtccttctcctggatggtgcactccttacaataataggcatcagagaccccaggtcctccacagatcacacagcgcccctggtaagatccatagttacactcatcacatatgcgcaccagagtgcagggacgcacataggagtcacaaatcacacacttgccatcacatttttcacacagtcttccgatggcaacaccagcctgcttgcggcaaaagatcaaatcaggatgatgtttagccatagctcctaactaa

SEQ ID NO: 14395 - DNA, 281 bp, Homo Sapiens
ctcaaatagcatctgcagcaattggaatgagaaatccagatatgtgtttcaagtagtacattgcctgaatcacaaatcacttgatcacagtattgtatataatccctgatcctatttgtttcattttattgtaaattcccatttgcatcaaaacctaatgatagtgattggtaagtaaaaacaaatggtgtattgcttttcatacaagtgttttcacaaaagccatttgcctaggcagcaaaaaatattaatttgttaaaaaaaattttccttcgtgtcca

SEQ ID NO: 14396 - DNA, 467 bp, Homo Sapiens
caatcgtagatgtttttgctgttccattctgtgtagcaccattcaccacagcaggatagggagcctcgactctttctcggtaaccacggcagagagcagcgccgatgtgaagatgaatgaatgtaactcctggtgtgaagatgaatgtaaaccctggcgacagttgagacctttttcttttagactctgctaaaacagtgctctggcttgggcttacctcaagagggaagatagttgagttttatttcctgtatatcaggtgacctggtagagatgtaaagcaatttaccatagtttgggctttagtattgtaaaataaacatgagaacaaataatcagacatatactttaatgttaaaggtgctctatttttttggatgtacagtagttttatttccacagccacattaccatagcaataagaaaggaggcatagtacatagttggaaaagctttgtggggggatt

SEQ ID NO: 14397 - DNA, 467 bp, Homo Sapiens
  misc_feature (322)..(331): n is a, c, g, or t
acagttcctcgccacccagcagcaccctgggactgcggcctttcccagctttattgaagcagaatggtggaacttgtgccggaggtacactgctgaaggtgcgtggcggtggaccagccagctgctgtccatgtgcagagcaaggctgcacctgctgcccttcgatccttccacacatggccaggacactgccacaatcctcggggtgtggtcaaggggcactcagagacacctgcactagaaattgcattgacattgtgagctggctcagaagacaaaccaattaagatgtagatagaaattaatttaaggtcttttcttnnnnnnnnnntccacctcattttcagttaacatgtgccattaaatagataacatcctgtggatttagggatattttccagccagaatggatccagaagaattgaatggtgcttaaattgagaaataataataaatatatctatata

SEQ ID NO: 14398 - DNA, 398 bp, Homo Sapiens
aagcctttggatggctatggagaggccttgaaatgtgtacaggtgtcaccatcatttctagtatattaggaaactgggatgggaggttgatttgctctctaaacttccctctagttggcaagtctcacatattcatcagcaggagtggagggtgggggaaaactagaaagatgaaaacttttacatttttctgatgggttcatgtctctgattgggtcagctggcttcctagcctaagctgggatctgaataccccttctctgtagctgctagtgagccttcccatttagattaaagattgctttatccagcagtcaattaactctccagttatcagtactcccacaattggccagggcaacaataattggagttcatactgatgccctgaggcactg

SEQ ID NO: 14399 - DNA, 630 bp, Homo Sapiens
aaggatccccaatgtctctctactgaacaatgaaaaccatgtgtatttgttccctccgtatgttaaagatttccttttagtggtacattctgcactcattttgtatagtctaccaaggcgggtatccctaggaacaatattatataggaagcaggtatactctgatcacattcaggataagtgtacagaagaaaatacggtgtttactctttagggaactggaaacactccctgcattgatgtacattttaagaatggcacttttgatacatgttatcataaaggtgcttaatagagctgaattaaagtttttcaaatctgtaaacaaagcaaaaaagtaaattgtagtcatttgattattttttaaattggtgctttatattttgttctcactcagagtaaaagctgcaatttattgttcaccagctttgatgtattcattactcagtaatgcaatacctctattgttgaattccctttggaaataagtgaaaattctaacggccactgaaagctgctcgctaggttttgcttggtggagaaacataatctgcacctatccatattaattgggttgtatccccattatgaagtttaagggatgtgcctttttgagttgttttttatcgt

SEQ ID NO: 14400 - DNA, 364 bp, Homo Sapiens
ttttttttgccacctagagatgataatttattgttttaccatgactcagaagagaaacaacataaagagaatatttcaaatccccacaatttccttcctcaacctcactactcttaacatttctttatcagacgccactggcttcctaaaatggaccactgactatgtatgtgtacacatttcattatgctgccttttctcttatgattaaaactttagccctcattcgaggtttccaatggttacttttagtggaggagttccctagcttttaaaaaaccacttttcctctaagattccattatttattgaaagaagtctttctagaaatgttaaggaggattttaaatgaacacattcaatt

SEQ ID NO: 14401 - DNA, 436 bp, Homo Sapiens
gagcagctatggtgtggctgcccccgtggacttcctgcgcaaacagagccagctgttcgctcgaggggccccagccaggcggagcgtgagggcccgggaacaccacccaccaccctggcacggggcaaagcacggaggcatcagccctgaagctggacagcgaaagagtgaggcccacaccagcctggacctgggttatttattgacacacccaaggggcccgaggggctgcgtgtgggaggctggggacccagacttttggccccagcgctggcccccccagccccacaccctatatctccgtgtgctcctcggtgttacttccctttcatatgaggggacccagcgccggggggagggaggagggcgtgggcatgggcgcagaggcttttccagtgtgtataaatccatgaaaataaacgccacctgcacccca

SEQ ID NO: 14402 - DNA, 725 bp, Homo Sapiens
ccgggctgggtccctagagatcagcaaggccacggcttcttcacccacacagcaggatgggagaggacagaagaactcagatgccaagtgtgtggctgaactgcagaaagaggtggtcctgctgcaagctcagctgactttggagcggaagcagaagcaggactacatcacccgctcagcacagaccagccgtgagctagcaggcctgcaccacagcctctcacactcacttcttgccgtggcccaggcccctgaggccactgtcctggaggcagagacccgcaggctggatgagtccctgactcaaagtctgacatccccagggccagtcctgctacaccccagccccagcactacccaagccgcctccaggtagcagccacagccaggagcacacagacagaagactgtgtcatgggtcatggcccctccgcacacctacaggtttgccaaaggaaaagcctggctctgttaggcacccaggagccccaggtcggcgggtgttcccaggaagaggaagtaaatctgcaaccctggggaggaccccaactcacctgggaatgaggcaaattgcatttgcttgctccctatggaatcacccagaggggtgccttgccctggctgagggacatgtactgcctctcatctagaatttattttcctagcacttcaccacctccttcatcttctccttcaacaataaaccctgagatctttgcattcat

SEQ ID NO: 14403 - DNA, 784 bp, Homo Sapiens
ttttgaccttgtgcaggcttaaagaccggtttctgtggacaacactttgaaagcacagtgggccaacccttatgtgtgcaaatgtgtgccaccgtgttttccgctgggttggtgctgcgccttcatgccttaaccaacaccgacggccaccctttcttttccgcctctgcaactacaaggccaagcaaaagttcaggttggtcaagcatgtacgcaggcaccaccctgaccaagccgacccaaaccgaggttgtgggcaaagaccccaccacccccacagtgcacctgcatgatgtgcagctggaggatcccagccctcctgctcctgccgctccccacactggacctgagggctgaaagcctgccccacctcctgtataggaagagggtatggtctgagatgtgcagactgggaccagcgctagcctgaggagctcagagcctaaggaaagactggcttttggggtacaagggtgactagaaccttcctgggactctggctatagtactttgaaattatcacccatataaaagagggacatggactataacgttgatttcttattgctgtacattgcgtttttaacctgcaagttctcagtttcttcaccatcactccatcaaagtccctggctataagatctggattttacccactccatcttctctttccttcttactgtgtcaattcctattttctttcagaatcttctaaaaacagttgtatctaaccgcatgtgctgttgtgcctaatgctctataaagcatgttaaacagaaaaaaa

SEQ ID NO: 14404 - DNA, 353 bp, Homo Sapiens
ctgccaggactgtagtaatcctttgggaactacatgtgagtaagcacttgtatgtaagccattatactgctgtaactaatgcatacaaacaattcttctctttacatttatagtctaaaaggggatatgcagtgggaaggaaaattcctgagagattccagcatagctttgtcaattccgactgagccatactgttttccacaagggctcaacacatagtcagtattccgtgctttcagtgtgtgttcagattctcctcttactggttttcttagactgtattgttctataagcaaatgcccatgtgtgatttttaagatgtgctggggaaaaataaatcaataccacaacca

SEQ ID NO: 14405 - DNA, 538 bp, Homo Sapiens
gggaatcttaaatactgcaaatagtcccaactaagattcagtcaggatgtttgttttgcaagtttgggagagtaagttggctttgagtcacacatcgaagctttaagaggtgagacgctggcttcattctggactagacaggaacttggcctcagcgtgagatcctgccatgcagtgttgcggtggcactgaagaagtgtgaatgtgaaggcggcgtcggcgcggggccagagcaccactctgctgccccaccacgcggcctgtgaggagccactaaacctttccgtgcctagacctccccatctgtggaatggggtcaataccacctacctcacaggggtgttgtgaggactgagaagaacaatgtcaaatgtttttaatactcagatgtgggagcgacatcaatgaaatctgtactgtatgaaagctacacaaaaatgggcagacatttggttaattgtgccagatacctaaaatgtatgttcagaaaagcattttatcaactcagaaatatgacttatttctagatttgatgaaa

SEQ ID NO: 14406 - DNA, 1529 bp, Homo Sapiens
  misc_feature (67)..(104): n is a, c, g, or t
  misc_feature (244)..(264): n is a, c, g, or t
ttggtacactttggaaattcagtggcacaaggtacactgccataaacttgagggacattatacagtnnnnnnnnnnnnnnnnnnnnnnnnnnnnnnnnnnnnnnttctcctgttccaaacactgcattacataattttacctgcccaaacagaccatttacaaatattaggtcaataaactgctaacatccataaaaagatagctttcttactaaaatgcaagaatttaaaagattggtatctnnnnnnnnnnnnnnnnnnnnntggaatgaaagcctaaatatcacatctaaaatcggggttttttgtttgggccttcgtactcttctctccctcgtaccatatcctgctggagttccaggccccattcctctaggaccctgtccacccacaggccccgcacctccctgcccaaagcgctcagtacgcatgtcacttcccatcatggaaccactcatggttgctggtggaacgccaggattagcttcataacctatgccaccaccacctcctagaggtggaaatttctggcctcctgaaccatagggatctcccatgttcattgctcctccgccacccattcgcatgtctctttcccgtggatccatgtagcccattcggctgtaactttcctctctttggcgcctcatttgttcttccatctcacgttgacgaatcatcatctcttcctctcttctacgtcgttcctcctcttgcctcaattgcatttctttacgtttctgcatttcttgattgtgaagttcttccatgcgtcttaattcttcctgtcgtctcatcagatcttggcgcaaaagatttgcctgatgttcatgataggcatcttccatttcactttccaatttgtcttttgcatctttcatgtttttttcaacttgttccctttgctgtttttccatttcatccaaagacttccatcgctgagaatattcgtactcaaacgtgccatgctgggcaaaacgaggaggggtttctctctccttttgatacattggattcttctgggcaagtttttcaggaagaccatcttcatcatctagttgttcaagtggttccacaatgactggacgaggagttgtcgtcagtaagaaaacaccttcactgcatcgttcaaatgcctttcttgctgctggcttagaagcaaattcaacaatgcctttccctgtagatcttccacgatcatccactattacaacagccctttcaataggaccaaattggctaaaggcttcttccaacagttcattggaaacataaggtgaaagattacgaacagaaagggcagcagcatgtgtggcaaagcgaactcgaagctgtctacctctcatgggtgtatcatccagttcggctttggcaatttcagccaaagctctagattcaagcttaataaatccgaatcctttgcctttgttgataaaaacttctcctggttctccatatttagcaaatagtcttttgaattcatcctccgtgatatcagcaggtagattcccaacaaacaaccgacaact

SEQ ID NO: 14407 - DNA, 823 bp, Homo Sapiens
agtcaggctcctccacaagaacgcctcctcgggctcttcccaccaccaaggcaacctcaggagccctccccacctggatacccccagccatgcccccaccacctacgcctcctgggcatgcaggacaatggcccccccatgcggcaggaaccccaggggcaggacatcctggtcaatggacactcacatcgctcacccagttcccaccgggtagggatgccccatccagggatgtctcagatgcagcttgcacacccatggccctcatggcattaggacatccccacgcggacccccaggctctgggggccagccaccgccccgaccaccacctggaatgcctcatcctggacctcctccaatgggcatgcccccccgagggcctccattcggatctcccatgggtcacccaggtcctatgcctccgcatggtatgcgtggacctcctccactgatgcccccccatggatacactggccctccacgacccccaccctatggctaccagcgggggcctctccctccacccagacccactccccggccaccagttccccctcgaggcccacttcgaggccctctccctcagtaaattcacattttccttcctcctgttacattttcccaatatcttttctattccttggaccaatcagagatgctgtagctccttggggcaaaggtactaatccctttcagcacccccactccattcccctttttaatgtaactttttccacaggaggtatttcttttttatgttggtcctgagtattttgcaaatgcacagagaaaataaaactaaactccttgtttaaaaaaa

SEQ ID NO: 14408 - DNA, 832 bp, Homo Sapiens
  misc_feature (494)..(679): n is a, c, g, or t
  misc_feature (688)..(762): n is a, c, g, or t
ctctccactgtgttcctcagtgtctgcttttcaggaagtctgctgtgacctttgcccaacttctgagctcctcagggactaggaacaatttcagtagctttgccctgaaccaaacgagaaaacaaaagggaactcccgtatgacccacgtcacgtggtgcactcagagtgtgtgcggcatgatcctcggttgctcctcctctcactttagtagagtacgcggtggacagctgatcatcttcagtcgtctacccacttccgtcattgtcctccgctagaataacagagtagttggtagtcatggccagaaggggggtgggggcagtgtgaggacttggggtttctgtgctgtgtgacacaaggagataagtgacaatcttgaagtcctaacttccactattctagaaagtatagtggtgatttgtgtgcaaagatttgaagttttaaaaaagtaccaagttcctgaaattcaataaaatatttttattaattttnnnnnnnnnnnnnnnnnnnnnnnnnnnnnnnnnnnnnnnnnnnnnnnnnnnnnnnnnnnnnnnnnnnnnnnnnnnnnnnnnnnnnnnnnnnnnnnnnnnnnnnnnnnnnnnnnnnnnnnnnnnnnnnnnnnnnnnnnnnnnnnnnnnnnnnnnnnnnnnnnnnnnnnnnnnnnnnnnnnnnnnnnngttttgggnnnnnnnnnnnnnnnnnnnnnnnnnnnnnnnnnnnnnnnnnnnnnnnnnnnnnnnnnnnnnnnnnnnnnnnnnnngggggtaaatctttttttctttgaaaaaacccccggaggaaaataagagggggtttttttccccccccac

SEQ ID NO: 14409 - DNA, 673 bp, Homo Sapiens
ggggcattggggcatgtgattgtgttgcttcagcaagagtggccacggggcgagaatcttttcctgaaagctgtcaataaaatttgccaacaaggaaatttccaatatgagaattttttcaattacgttacaaatattgatatgctggaggaatttgcctacttgagaactcaggaaggtgggaaaattcatctggaattactacccaatcaaggaatgctgatcaagcaccacactgtaactcgaggcatcaccaaaggcgtgaaggaggactttcgcctggccatggagcgccaggtctcccgctgtggagagaatctgatggtggttctgcacaggttctgcattaatgagaagatcttgctccttcagactctgacctgagtggagacctttccaccagacacagctcgggcctgtgtaattgtaggagaagacactcagcagtgattgccatggcacagagccgtggtcattgttgctgttacaaagaagaaaaccatctgagttctaactccttggttgcttaaaagtagttcccaagagtctgagaagctatttctatttttaagagtcattttttgtaatttttgtaaaacaaaagtaccaatctgttttgtaaataaaaatcatcctaaaatttgaaagacaacacacaaaagacacaaaagac

SEQ ID NO: 14410 - DNA, 851 bp, Homo Sapiens
tccttttattatatcaatttattcaagtgattaaaaaacttcttggcagcaggatgacaaaacaggtctgtaaacatgatctcatccccccatcccttcttccaaggagcttcctatgacaggaaatcgaattctagttggcaaatccagtgatgaggtctgtagaaaaggggtcccgtgtcacagccaggaaggcagactcgtccctttaacccactccagccaggggtgctggccaggatgtgctgttctgtcatgacgtggtcactgagtctggttcgttggcagccccttccccaggaggagggagactctttggcagtgcggcagccctcccgggggcacgggcttctcagcagcagacacaggcaggcgaaaagcaggcagctgagcctctccagcgagcatggtattgctagggttgcaggtgccctggcaggtggccaggtgaggggctgaggcacaagtgctatcaggaacttggctgccccacaggggctagaggacacccagatggtccacgccagtggccttgaaatttcccctgcagaagccagaccgtggggaaacaagctttcgcgacgtgccaccccgggcagcttgaggcttcagtccttgaaggggttgtgggcgccccctggctgctccttctctgacggccagaggctccccgattcatctcctgcagcgggtggtatgcatatgtccccatgcaggcgccggttcctctctgactctggacaggaacaaaggacaggtttgctgcagtgctgatcagcaggaggaaggccagcgccagggtgagggctagaccaagcggtcctggtgaaaaaggagagttctcccgccct

SEQ ID NO: 14411 - DNA, 479 bp, Homo Sapiens
gggagtgacaaccaggaagtgcaagactctgaaccaacgcccatgcctgccatccccaaacatgggctcaaaacccccttcccagggacggctgtgtccacccctcagcaggaggaggagaccccacagcaccgggtgagaggattaagtgagccagtcatgcatgggccgagaaccaggtttggcatattgtagctgctcagtggacgttagctgttatgattggaccacaacgtgcttccgtttcaattctgtgggccttttggaggtcctgctggatgctaagcaccgaaacctcaacccggaacaagaccagaacaacctgagcaacaacaggaccagcgatggctctccctgctggaggattctggaagtcacctggctggaccaagccctctccgtgttctctgtcagcccactccccagagccgctaggcctgatgtgcacaagcagactaataaaggcttgagggcaaaaa

SEQ ID NO: 14412 - DNA, 906 bp, Homo Sapiens
gagctactttcataattattaatccagaaaaaaatagagcgtatgaaaatatttttatctgagttctccctcattgttgagaggcagcttagtttgccttgagttcataactgttgagtgggtaggagtatgccctgcctaatactattctgtcccggagaagtttaaataaaacatagtagttgcagaagaggatgagagccatggaaagtgtgtggttccacttctccgaccgcagcaaggaatagagttgatagaagacgacactgccctcaataaggatgagcagatttaacagccttaatggtcgatgaaataagaaataaaagcgggcatgagatacatctgaaggcactgccacgttgtaaggccccatggctctatataaacatctgctgtgccgcaccagcaccccttgaggccatattgtattttctgaccaaatgtgctgtggagcattgctgtaggacccatgttccaacttctgccacttgcccaggtgagcagctgatttatgtagcaaatcacagtatttggatggcaacagttgcgtggtgagcatgacaaaagcattgatccacaccataatgaggtgctcacatgaccagcgcatgtcatagtactgggtactctggaagagatcagaagagagagaaatgatccatgcactggtaaaaagaggcagggatgggttggtgtacatatgccctgcagacaaatgccacactgagtcacacatgcactggtggtcctgctgtccgtgcagaaaagttcaagagcagagtcctccacaatccttcaacctgactttctggctgtatgagttagggatgggagggagaggcaattatattttaagtgtctcctttctagaagaactgagtgttctctgaaggatcattgcag

SEQ ID NO: 14413 - DNA, 441 bp, Homo Sapiens
  misc_feature (43)..(43): n is a, c, g, or t
gctcagaaaccgtgagagagcccccaccgtggacaccggctcntagggccacaggaaaaggaacgtttccaggcattttgtctccagggctcccgctggacaggcacgtactgccctggggagtaaatgcggagagttcacgaactgtgcccaacgcatgttatagccagggtcctactaactactcagtaaaagaacgtattgttgtattcctccagtgttaagctatagccatgttaaaagtcactgtgcatttattctcagcatcaaataccttgtaacgtcttctctgccttgttagtgcatatttttacttttctgatactgtaaagaatatatccagtatgtaaatgaatgttctataaatcttttgtatagtcattttctctgctccttaaatatcatctctattcagagtataataaaattatgaacttggta

SEQ ID NO: 14414 - DNA, 438 bp, Homo Sapiens
  misc_feature (366)..(395): n is a, c, g, or t
aagctgcattgtttcacattgagctgttacattagttcaggctaaatgttgggagctccaaccacatccaagaataaatctggaaacacactgctgggatactgctgttagagcccttcttggccttgtattcccagaaatgagctccctttccttagcttagaagaatgtgattatatccaggacatcatgttcagaaaacttagtttactttcagcatagaatgcattactgttggaataattggcctctagctcttaaatgtctctgataacttattaatatctatctttataaaatagagtgcaactacttttgtgtaaaaatgtttgcctttaaatttagtatttcatatcagcacatcgnnnnnnnnnnnnnnnnnnnnnnnnnnnnnntaaaagagtctgtaataaattatttttttcacgtgaaaaaacc

SEQ ID NO: 14415 - DNA, 538 bp, Homo Sapiens
atgtttgaaagaagaatgtgtgtacatttcaagaatttgggttttttggagggaggaggaaactgtttacttttttcctccacacgtttgatttttgacacatacacccctaattccctcaacagcagaacctacctgcagccaccaggggaccagctctgtgtaggtaaccagatggctctttttcccaaggccaccatctttccagctgaccagactaaactcccaaccccagaccagggcaggggacaggtctcaagtccttcccagcatacacacagggaacaaacacataccacaaaccggtaactgtacctgtcaccctccttgtctcctccttgggccctacaggctacacatctacctttggcccctggttttggaaaaattccgtgttcctgacccatgtttagttttttcctaccatttctatttcatacattctcatacatttaacttgtaaaatagactgtgatattattacataatgtaattaaaaatatgaattaaaatattcctacagtctttagcatggaaa

SEQ ID NO: 14416 - DNA, 795 bp, Homo Sapiens
gtaaacagtattttaagatgttcactttgctcttctttttggttacatacattttaataactggtatgttgaagtagtgtctaaaagtatctagtctttattcacagtacattatattgtgtgatgcactggactaactcttgtttaccattcatgtaacaaaacccagcacattatctgcactataagctcaaagaatgtcacatccgcccagacagctctttgatgagggtgatgggaactgaataaaccatacggactggcagtaacaagggcttttactgttctgttcagtggaaccttcttggtcaaattgtaattagctagcattatatttatatacagggtcttttttctttaccgatgtattttcctactcatagccaaccaataaattcagtatctgtttcaaatattttagaagtgtagtttgtatagctgtagtactgaggtttgaggaaaaataaatgttgatcagcagaccacgtatttaaaattctgaatcttctgggacagggttgtaactcagccttccaaagggaagagtgcagggggacggggccatgatatggggaaatggtgtaaactaatgtatttctttattggctgttattctgtataacactcatatctttgccaaagttcaattttatatttaggcaactgatggtccttttgcatttaggattttcgttgttgttaccttatacctcatgatataaggaatgggctcatgtgtcttccgtcttttggaaggaggttgacatattttaaataaatgcttttaaatacagt

SEQ ID NO: 14417 - DNA, 534 bp, Homo Sapiens
agtaacatcatggtgcaggagactgaccccagactagtcccagagagatgcccactcattcgtcatcttctgttctccaagaaaattggtctgttgcttctgaacttgaaaagatacagaagtttaacttgctactagaaaatagtggtatcctaaaccagatttctaacaagaaaaatgaacaacagtcttttgatcattataaaccagggatcttcagaaaccttgctaggagaagttaatgaaaatagagtatcaatagcattgaaaaaaacctctgaaatccttcacgatattgactgtcttctatcaaactctaaaaagtgaaaaatggaattattacaacatattattaaagtttaaggatgttgtttcaagtgactggtataaaattactagtaagccaagatattgtacgtattaccccggcacaatgattgtgaaagaactgacatttaactttgaaggtatttttaacttgtacatttttaaaatatgtatttatatcttaataataaatatttcgaagtttta

SEQ ID NO: 14418 - DNA, 339 bp, Homo Sapiens
  misc_feature (77)..(77): n is a, c, g, or t
gggaaagggaaagctggcccccccttccttatggttgtggagatcaagcggggattgggaaattgctggcccgcccntgcttacccccttcacatcctttgtggcaggcacccccttcaggcgtgctcttctgtggtgtcttgaaggatgttctatataaccattaaaaagactctgatgttgggttgacgttccttctgtatatgtttatgttttccattaggttctaaagtcatcctgagctaggactgggactcatgcatgtttagatttcccatgtttgcccatagtagatgctcagtaaatttttgttataataattaaattaggagctatctg

SEQ ID NO: 14419 - DNA, 368 bp, Homo Sapiens
ttctcatggacagtgacacattctgtctagcttgagagactaagctctgattattattttgttttatcttgcccaaattcctttctaaggggtctggggagtcatgccctacaaaccataaattctcatcagatgagttttatttaaccctgtataacgtgacttactttccagtctgactcaggcataacaaggaagaaaatcaaaatgttttaccctaaaatatatttctttgccataccttggaactgtcctgcaaagtctcttgtgggaaaaacccacattctatagagaattccctttcccctttgttttccttccttcctttccagatccaggagataatcaattaagagccaggcactctt

SEQ ID NO: 14420 - DNA, 481 bp, Homo Sapiens
cattgctggaaaaattattcataggacaaaaatgttaatgttctcttggggacttagagttgaaaatatttgtatagatttggttctcaagtccacagaatcgtatctgctgtggtctccctttggtgctcatctgggagccatgtgtatggaagattctgtcacaggcggctgggatgtgggcagatgctgttagcctccctcgccacgtggtggtccatgcctgacgtgtcccctagttcaaggaagcgccatctttagcatgaaaacaattgcgttcccctaggaaatgaagaaaaaatgagctgaaatttccttatacatttgaatttgttcattttttaaagagacatttttgttgtctgctttgtggtacttataaaatttgttttccattgaaattgccatttataaatttgcagatatgtactaatttagatttttttaagtgttcaataaaataaggatatatttactgtga

SEQ ID NO: 14421 - DNA, 692 bp, Homo Sapiens
  misc_feature (43)..(43): n is a, c, g, or t
  misc_feature (154)..(154): n is a, c, g, or t
agtcctcagcctgcctcttttatttccccgtgggaaacctcanaagagaaatcctgccaaagcgctcagggacaaagggattgccatgaaaagcataactgtgtatcagacagtggcacaccccaggaatccaagggaccctgaacagctactnattcccagcagggggttccagccagcatcacattttttagtccctctggcctcacatacaagtctcaagcacattcaggagttatctggtgacaatatcgatcaaaataagtttgcagccatcggccccactacggctcgcgcgctggccgcccagggccttcctgtaagctgcactgcagagagccccacgccacaagccctggccactggcatcaggaaggctctccagccccatggctgctgctgagtcagccacctagcgctggccccatgcagcctccctgggctgggctggctctggatggagccaggcatcggcaagggctctcgggagctgctgccgtcagactcctgcctcaagcctgagtggaagcacctgaggaccggggatcgggacctgacctggggctggcctcaggcccacgtgcacgtgactgccctctgtggaagccagcttaaaccctagccctgtgagagcttcctgtgcccagcaggaaggaagtcaaataaaccacactgactacctgtgcttactg

SEQ ID NO: 14422 - DNA, 680 bp, Homo Sapiens
gaagaagtgattcgaatgatgttagagatcatcaactcctgcctgacaaattcccttcaccacaacccaaacttggtatacgcccggctttacaaacgcgatctctttgaacaatttcgaactcatccttcatttcaggatataatgcaaaatattgatctggtgatctccttctttagctcaaggttgctgcaagctggagctgagctgtcagtggaacgggtcctggaaatcattaagcaaggcgtcgttgcgctgcccaaagacagactgaagaaatttccagaattgaaattcaaatatgtggaagaggagcagcccgaggagttttttatcccctatgtctggtctcttgtctacaactcagcagtcggcctgtactggaatccacaggacatccagctgttcaccatggattccgactgagggcaggatgctctcccacccggacccctccagccaagcagcccttcaagttcttttatttctgggtaacagaagtagacagacaggttacttggtgtatcttctgttaaagaggattgcacgagtgtgttttcctcacacactttgatttggagaattggtgctagttggcaatagataactcagcgtagatagtattgcaaaaaggggaggaaatacacaacaataataaatgtaaaaacctgctattaaaa

SEQ ID NO: 14423 - DNA, 519 bp, Homo Sapiens
atatcctttctttgttctcatcgggtctcagttcctttatcctcttagcaaaggatctcacaggatgacgagtctaatggtagtcatatgcactttttatacaaaagggcccctaaaatgcaagccaactctatatacacaaaaccatgtaaacggtacctctaggtgatttaggtaattctgactatatacagttcttaccaaacaccctgacaagcaccagattccagggtaacacgtttttagagatttaattccattctgatggttctgcttactgtcctgaagatttgcatccttattagaagaactgatgttgggtaagtataaaagccagtaacttgagatttctccatcactgaagttgtgtgatcttgatggggataatactattaaagtccaagaaaaaaggtccttctggtttaggcaaaaaggtactaggaatgatattgaagatcccagaaggtatattttctaattccaggtagcaaaacccacacctatagtcaccactagatt

SEQ ID NO: 14424 - DNA, 314 bp, Homo Sapiens
gcggccgccggcccccacgccaacctctgctcccaacaaagggggcggcggcggcggcagcagcagcagcaacgcaggcggccggggaggaaacaccggaaccagcggcggccaggctgggccagcggggctgtccacaccctccacatctacctcaaataactcgttgccttaaccgcatcactccccacccgccacccaccctggagcccgccggcctgggcagggggtccaggtgggccacacaagggccaggatggcggaagatacgggtggggagggaagatatccagaaaggagccacagctgacgcc

SEQ ID NO: 14425 - DNA, 660 bp, Homo Sapiens
gagttacgtggtaacaaggttgtccataaagaggttgcttctatatactagaggccccagatggccaggccttgggctatgtctggcttgcatggtctcccaagggaatcagccccatcaacaaagttcaaatcggggcagaggctgcacttgtgcccccagatgtttctgaggagccagactagggctggcattgctgtagagtgacggctgctgcccagagcgtgtcccagacatcacagcggggctcagcagttcccacagcctctgcctgccttggctaagcatgagttaagcagcaaaacgctcctccatgtctggatggggccggcaggtcctgtgtcccctgcacctggaggagagcaggctagaggcacagcggccacatggtgctggctctgaacgttggttggtggctggaaaacagccctgcttctgagggccgctcagttctgcacacgaaaccacctcctgagggctcagctctgcccccgccctgggctgcagcctctgcacgcaagcaccaggcatcctttgtgttgtcaactccgtgtaaccagtaactacagccatttacaattgactccgtttccttttgtaggtttccctgtctgtctgtgttagtagaaaaataaaatcctatgaaatctgagtacgttg

SEQ ID NO: 14426 - DNA, 930 bp, Homo Sapiens
gggggcatccctgggttcttggaagcagctcttatgctactcatagagatgggattgactttatttttttatagtgcttaattcaccattatgagaaatgcttccagtcacaaaaatgcagcccagctcactctgaggaagaagcaggacttggtacggttttacacaactccttaccattaaactgaatcagaaatccattttctggctgaataaaaagtttggcttgcctgtgtaatgcccactcccttccccctggctccctagtgatgggacatatatgagagagaagtgtttttctatcatagacaccataggggaaagtttggggatgaaggagagcttaaaggtgtttcaattaagttagaaaactgacacaggctgttgagaattctttgccacttttcccaccccaaaacagcatggggcctgacatcttctgccctggtcccctttctcttgatgtggaaagtctgaatgcagtatttatagacttctaaggttttaaaatccagtatcaagaagaaaatcagaaatactggttggtgaaataaagagtttaggcattgttggcctgtcttttttgaagcatgtgtgttatgtgtagttagatatatttcacttatgtgagtccatcatggttgttggtcttgtagcccgattatttttcctggcttccccagcttcccaaagtagtagttagaacttaaggtaaatatttattcttgggttggtggagtggatattgccagttaggagtcatggatcaattactgattatattgaaagtaaatataatcaattatgtacttttgagcttcgcaggttcaatttaggtaaaaatcacattatgaaactgggaaagttgaaggaatatgggcaaattttctcagtaagcttcatgatatccaccctgtacctgagtactga

SEQ ID NO: 14427 - DNA, 866 bp, Homo Sapiens
  misc_feature (134)..(147): n is a, c, g, or t
  misc_feature (151)..(344): n is a, c, g, or t
  misc_feature (844)..(844): n is a, c, g, or t
agaaaaaagacccggaggtgttttttggccgggggttgttgtgggagaggaagaaggtagaagggatgctgtgtcgttttttctgggtggggcccgcggcccccgaagaaaaaggtgttgaaaaaatttttttnnnnnnnnnnnnnncttnnnnnnnnnnnnnnnnnnnnnnnnnnnnnnnnnnnnnnnnnnnnnnnnnnnnnnnnnnnnnnnnnnnnnnnnnnnnnnnnnnnnnnnnnnnnnnnnnnnnnnnnnnnnnnnnnnnnnnnnnnnnnnnnnnnnnnnnnnnnnnnnnnnnnnnnnnnnnnnnnnnnnnnnnnnnnnnnnnnnnnnnnnnnnnnnnnaatttaaaaaccatttaatacacaaagtgaaaaactattagaatataaaagcatttcacattttttaagacaaataatatcttctaaattacttagcagatgatagaggtccacagtcctttctctgaaacccttggggcaagttgtttcagaattatgaaattttagattttagaaaagtagttttgtgcatataccatactacattaaccagccctcaccacagtctgtggcagcagccctccctctcatcatcaagcagcaaaataaaggaatattcacactaaatgggataaaaagattcaaggtcagttcagattagattgcaagcaaatgaattttgtcaccaagcttatggaaaccttgttttcagagctttttggattttggaattacaattacagataaaggagtgcagacctttataaatttgtatgacaagacatgaaagattgtttaaacaaatgactcatttttacaaatgaaaaaacatgtaattntcaaatacattataaattaaca

SEQ ID NO: 14428 - DNA, 785 bp, Homo Sapiens
gggaaacactctgtgtggctcctcggctttgacagagtgcaagacgatgacttgcaaaatgtcgcagctggaacgcaacatagagaccatcatcaacaccttccaccaatactctgtgaagctggggcacccagacaccctgaaccagggggaattcaaagagctggtgcgaaaagatctgcaaaattttctcaagaaggagaataagaatgaaaaggtcatagaacacatcatggaggacctggacacaaatgcagacaagcagctgagcttcgaggagttcatcatgctgatggcgaggctaacctgggcctcccacgagaagatgcacgagggtgacgagggccctggccaccaccataagccaggcctcggggagggcaccccctaagaccacagtggccaagatcacagtggccacggccacggccacagtcatggtggccacggccacagccactaatcaggaggccaggccaccctgcctctacccaaccagggccccggggcctgttatgtcaaactgtcttggctgtggggctaggggctggggccaaataaagtctcttcctcccgaaaaccccaactcgcgccaaacacaacccttgccggcccgccttcggcccctccagaaagttttctacaccctttccttttggggggcccgggcccccgccagggtaaggggaaacctgggtgccacaagcttgttttctcctcagagaaacatcctctgcgcccaataggacctaagcggcctctggggaattccccacccacacaag

SEQ ID NO: 14429 - DNA, 1147 bp, Homo Sapiens
aaatataggctagggtacgaggcctgcggtggttaattcggcacgagggcggaagcggtccggaataataagagtgtatctaccatgcattgtctcagaaagaggcgaatgactccgatgtccagccttcaggagcacagcgcgccgaggccttcgtgagggccttcctgaagcgcagacgccccgcatgagcccgcagcccgcgaggaccagctgcagcgcaaggcggtggtcctggagtacttcacccgccacaagcgcaaggagaagaagaagaaagccaaaggcctctctgccaggcaaaggagggagctgcggctctttgacattaaaccagagcagcagagatacagccttttcctccctctccatgaactctggaaacagtacatcagggacctgtgcagtgggctcaagccagacacgcagccacagatgattcaggccaagctcttaaaggcagatcttcacggggctattatttcagtgacaaaatccaaatgcccctcttatgtgggtattacaggaatccttctacaggaaacaaagcacattttcaaaattatcaccaaagaagaccgcctgaaagttatccccaagctaaactgcgtgttcactgtggaaaccgatggctttatttcctacatttacgggagcaaattccagcttcggtcaagtgaacggtctgcgaagaagttcaaagcgaagggaacgattgacctgtgaattctttgccgtctaaggcagttgtttatgacagctgaaaactggacactccctaaatgtccacctttcagtgaagagatagttaagccaattccatttatagaccacctccagccagtgacgctccgagttgaggatgttgaacaacatgggaaggtcgcagcgtactaagtgaagaagtcagaggacagaggaatttctctttctaggagattttcattttgtgtgactcccatggggaggaacagactggcaggaagcacaccggggttaacactggttgacttgaataggattattcgatttttaaaaatacttttccatgttttctgagtgctctatgataaatcagttgcatctgtgataatacagtacatatgtggacataaacagggatcaaataaaggaggtattgctgcaa

SEQ ID NO: 14430 - DNA, 692 bp, Homo Sapiens
tagacatgatacgactcgagctcggtaccagcggcgccctttattggtttggtgggtttggttttttttaaccacattcttagagatactatagaatccaaatgagaactgaatgggacctcaagtcttctattcctactaatagagttcttggtgatggtaactgcggtgtcgttggttttccacaagtggggatggattcatgtcgatacatcccaaggccctggacctcttaggcaattctcctgtgctctgacaaactgagccagccttttagatctacatgaataaacaaactattttaccaagaaaaatctcagcttgcttactgcttaattaaaaacctacaatttacacacctccctgccttcaagactgtgagctttggatagccctgcttaaatgtttgtcaacaacaagagtcgtaatgtgtcagtacattgtagctcctttgaaatttaactctttctgtgttacatgaattgttttaaggagtccggcaaacatgtttcttcacttccatgagaatggtgccaagtgtcagactctaatgagccctcagctcaggttttaatttctattgaatgctaacattcttctgattttttggtatcttttataatcatatcggtttctgctgtattaatgacaattattcatgaaaataaaaaatgaaatattttgtatactta

SEQ ID NO: 14431 - DNA, 456 bp, Homo Sapiens
tttgacagaaattgacctttatttgttgtactaaagcctgtttaacttttgatacaaagtaacattttagtacagaaaatcccaatctgtcagctcagtacctgtctgtgcacactgtaccatctcagtcccactctgcctgtaacttagaaaaaagcccctacccccagagggtctgcgagttaataccttgagaatagtctacagtttttcatagtttgtctgagctagaaaacttgtacctgtaaaacaaaggacagcattgaggactgaaacttgtctcttttttgaacaactgtgcaagaaaatatatccctttttaaaaaacatcagttatggctaaactacaatctagtgtctagaattacaaagaataaaatgaaatcaaagatttctcgctagtaaaatgaaatgttaggaacagtattaaaatataggtcctaccccaacgacact

SEQ ID NO: 14432 - DNA, 657 bp, Homo Sapiens
catccggctgcaggcctccagggccgggtaaccactgtggacctgcgggatgagggcgtggcccacggacgcatagacaatgtcgatgctgtcatgaacatccgcctggccaaagtcacctacacggaccgttgggggcatcaggtcaagctggatgacctctttgtgacaggccgcaatgtccgctacgtccacatcccagatgacgtgaacatcacctcgaccattgagcagcagctgcagattatccatcgggtgcgaaactttggtggcaagggccaaggccggtgggaatttcccccaaaaaactgtaagtgaggccctcagcaagccctggccccaactcggagtcctccagtgatctccggagctagttccctgccctcacaccctgtctggtacccgagaagaaagcagggccaggccagaagctggtgtccaacagacaccacctgtcaaagctgcctttcacagggttccacctcccagactcactctgggacccagaatcctatatgtggccttggggtaggtgacaatccccctttttgatgatctgaatctctgacttattgattatggaacctgtcaagtagttttcaactctcccagtgaggataattaaacatgctcagcctgagccacctctaagtgtca

SEQ ID NO: 14433 - DNA, 497 bp, Homo Sapiens
cagtaaggtaactttccattatgcacatactataccatcatcattcattgggtggagattagctgggaagtagctgtatatttttagtgagatcactgatggcaatggatctctggatcgtgctgctgcttatggttaaatcatatctaatgtgaaatttcgaattacatccagagctccagtatcaaagccgcacatatccaacatgcctctatcatctgggtctgcaatggtgaaaccatttgatgtcattccacaaacaatcaatttagctggaatatccattttctttcgatactccctcagagcaatagcagggatggacacctccagcaaaggtctcatttatcagtgaatacaatgaagacatcagcaggtgtgtttgtcttctgagcccagatcatgggaagagagcaatcagttccacctgctgggatctgactcatagccattaaaacctgttgtaaggtcatatctgtagtcactggacatggtac

SEQ ID NO: 14434 - DNA, 341 bp, Homo Sapiens
gcagggtgggcgctcagtctctctggtggagaagatgagcggaagatgctgaaggagattgtaaaagctgccaaggcccctgtgaaggccaggatacttccccaagatgtcatcctcaaattccgggacaagattgagaaaatggagaaagatgtgtatgcagttctgcagctagaggcggaggaaaaagagatgcagcagtcagaagcccagatcaatacagcaaagcggctcctggagaaggggaaggaggcagtggtccaagagcccgagaggagctggttccagaccaaagaagagaggaagaaggagaaaattgccaaagctctgcaggaatttga

SEQ ID NO: 14435 - DNA, 458 bp, Homo Sapiens
tcttatagaccatgcatttttgaagttagtgtccactagggtcctattaactgtacatttgcaagatttcattatttttgcctctgacactatgggaaaaattttttagaagctattgggacagattcaagcttttatgcacttggttactacagctgtaaaatgaaatctcgtcttgtagcatggattattcttctcatgttaaacccaccaaaataaaggggactaaataggtaatgattttcctagtgcatttgcatactgtgataatcctgggccttgcaatagttctacagggctcttgggcattgaattattaggatgtaattgtacatcattgtagtgttcaccttattgaagctcactctgatgttaatgagcttcgggttttgatgcttgtttagagatcagcagtcttggatgggagggaacaaagctaaataaatgttagtttggtg

SEQ ID NO: 14436 - DNA, 568 bp, Homo Sapiens
gctcggtaccctatacggagcacctcatggccagggcctggaggattcccaccataccctacccagcgcccataacagagggaccctggagttgtgtacacaagatagcagttcagtgcttgcacacatactagttgagaagggaaatcagggctaatgaaacagctcaactgtctggcagagccaggctccttctgccatgatacagtttggatgtttgtccctttctaatcttatatggaaatttgatccccagtgttgaaggtggggcctggtgggagatgttcctgttatcgggatggatccttcatgaatagcctggtgccatctttgtggtaacaagtgagttctcacttgattagtttctgtgagaactgtttgttaaaaagagcctggtggcacctccctcccttcttcctccttctcttgctatgtgatgctgctgccctttgccttccgtcatgagtggaagctccctgaagcccccaccagaagcaaatgctggcaccatgctgcttgtacagcctgcagaactgtgagccaaataaacctcttttctttataaatt

SEQ ID NO: 14437 - DNA, 465 bp, Homo Sapiens
tggcagctagcagggcaattggcggggaggagtgcggactgaggactgaggaccaagggggcccaggccctgccctcctacccggaggggctccgtttgcattccttggtgctctctgagtgcagctggtgtcccgccctgttctgggcggacgcctgtgtgcgtgtgtgtgtgcctgtccagtgtatattgtgtcttagcttccattttaaaaattgttctgtacagagagagatgcagcaggggcgggagggcagagtgggcggaggggagcagccgcacccccagcaccgggtgtctgcggtaggaacaagagggctgagagggtctggtcctggcccaggctcccccttgggctcagcacgaaagggctttcaatgaattaagtgaaaactttttccttttttacaaaaatgcaaaaatcaacaaagctccaaacctattggaaataaaatatgaacttgc

SEQ ID NO: 14438 - DNA, 558 bp, Homo Sapiens
  misc_feature (440)..(452): n is a, c, g, or t
agtgctttattagcattttccataatccactagtgacctagaccttcgatacagaagatccttagcagcttgagattcctcttaagtaatattttaaaagatcagaaagtttgaggtcttcatcagcagacactcgtgcttctatttttcttgttttatcgaacagttctgaaactttgagaaaaaacttgcatatatctgtagaatcctgagttcctaaagcatataatgaagaaccaattctattgtaatcatctgcagcacttttgtgggatcttgtcattctatcagatttagcagatgcatccttaactcggttatgatattccaaaagaaatgttcgttcgtgctcaaagaaatcatctacatcctttactcctgaaacgattactccatctgctgatttaaccatgtttttaaagaagtcttcaagtttctcnnnnnnnnnnnnncctcgcacactcaaatcttgattatattccaagaagacatggaaatttaaatctcttctcaaaataggatgtgctgccacacgacacaggaacacttcatgcatcg

SEQ ID NO: 14439 - DNA, 446 bp, Homo Sapiens
  misc_feature (226)..(270): n is a, c, g, or t
gaaggtccctgctatgcagctgtggccacagctcgcagcccaagcactgtggagcatccacacctttgatggcaatgcagattggtagcaggttccataggcgtacaaaacagtattaaagctcagtgttttgcatattgttagcatttacaaatatttttgctttagtatgaggaaagtaaggatgggcaaagaagcgatcaaaatagctattgctacaacattnnnnnnnnnnnnnnnnnnnnnnnnnnnnnnnnnnnnnnnnnnnnnctaaaaatgcttggcaaaaaaaatatagtgttaaaataggccagtgatattaatgagaaaatgaaagtatgtatcaggaataaagtgatattgcataggagtattgtatttttatgaattttatgccagttgtttacatgtactatatatgttaaattaaaaaaaatcatgagtaa

SEQ ID NO: 14440 - DNA, 353 bp, Homo Sapiens
  misc_feature (156)..(167): n is a, c, g, or t
cttggcctttatttttattacttaaggtatgagttatattttaggagatactttctagacagtttgaaggtttgggtgctatatgaagaaaaacatttaatgatatactcagatataaacaccttgttttcttgaatgtaatttatttattagctnnnnnnnnnnnncaaactgctctcaagatggtgcctgttaacctaaacatgaaatatatttattacatgcaaaatatttcttagccacttttaagcagtaatgttttatctgaatggatatttgtttctatatcctgataattatttaaattgttactttcaatctggaagaaaaaataaaccttaatattgaaacta

SEQ ID NO: 14441 - DNA, 884 bp, Homo Sapiens
  misc_feature (790)..(791): n is a, c, g, or t
  misc_feature (793)..(793): n is a, c, g, or t
  misc_feature (802)..(803): n is a, c, g, or t
agattggtagcaatcagctgtggcagttgatatcctgaagggccaccaaagaggacagatttcagggagttctctaacattgtcatacctctcatcaagaagaactcacttgaaagcagtggggtccggacaaccaaaaatgaagaggagaatgaaaaggaaaaggagctccagctggaatatctgctgggtgcctttgaaagcctgggcaaagcctggccgcgaaacgcggagacccaacgttgttatcgtcaggagctgtgcaaactgatgtgtgaacggctaaaactcagcacgtggaaagtgcagctaggagtcctgcaatcaatgaatgccttttttcaggggttaatgcttttggaagaagaacatgccgatcctgaggctttggctgaaattctgcttgaaacttgtaaatcaatcacatattctttagaaaataagacctactcatctgtgagaacagaagctttatctgtgatagaattgctgcttaaaaaacttgaagaatctaaacagtgggaatgtttgacatctgaatgcagagtgctcctaattgagtctttagctactatggagccagacagcagacctgaactgcaggagaaagcagcgttactgaagaaaacacttgaaaatctggaataaattagaaggggaagaaacaaacaagtgccatgttcattgggggttgaagtggtggtgttctttgaaaaaccaagtgggaaaaagtaaagattaatctgtagcatgcatcattccttggctgaaataaaaagaaaaagccccnngnaaaaacgtnntggaaccaagggagggccttgtcgggccgccttgggcacttcgagaaaatttttctagaccatttccctttgggcgggggg

SEQ ID NO: 14442 - DNA, 603 bp, Homo Sapiens
ccggattactgtggagagattatttctcaagatgaagctgacagaggagggaaagtgtatgataaatacaatgtgcagctttctgttcaacttgaacaatgattttgtggtggatgcaacccgcaagggtaacaaaattcgttttgcaaatcattcggtaaatccaaactgctatgcaaaagttatgatggttaacggtgatcacaggataggtatttttgccaagagagccatccagactggcgaagagctgttttttgattacagatacagccaggctgatgccctgaagtatgtcggcatcgaaagagaaatggaaatcccttgacatctgctacctcctccccctcctctgaaacagctgccttagcttcaggaacctcgagtactgtgggcaatttagaaaaagaacatgcagtttgaaattctgaatttgcaaagtactgtaagaataatttatagtaatgagtttaaaaatcaactttttattgccttctcaccagctgcaaagtgttttgtaccagtgaatttttgcaataatgcagtatggtacatttttcaactttgaataaagaatacttgaacttgtccttgttgaaaaaa

SEQ ID NO: 14443 - DNA, 1474 bp, Homo Sapiens
  misc_feature (110)..(110): n is a, c, g, or t
  misc_feature (618)..(626): n is a, c, g, or t
  misc_feature (707)..(792): n is a, c, g, or t
  misc_feature (869)..(877): n is a, c, g, or t
  misc_feature (1068)..(1211): n is a, c, g, or t
gaatgaaaaaagatgggggagagtggacacgtgcacccgggggagcgctgggatagaaggcgggaaacaatcggtagaagcccggtgttgagatatatgcggaaggacgnagggtatttaatctgtgggtggacactaatgttgcatagaggagcgggggggaagggaaacgattaaggcctaagggtaggggagattcgggtctgaactgggctgattgtgtggcagaggagtggggagaatagggggaacgcgcagagatagttcggtagaattgtctcgtggggaggggggcggatcgaatattggggagtaaatattcgacgggatttcgggcggggggtgttgtgtaatatggggggcgtcgcgggggacgttcgcaccgtcttataaggcaccaagacaaaaagggcgggaggaacccgagatttaaaggggggtttggaaacggcccacggtttccgcgccgaggctgtttcttatatgggggaaaaatcggaagcccgtattcggggccacgggtattcctgaggacccaagcgattggccaagggctttttgcgtgatggggggcccgccccccaaatggagggtgctaaaaaagtttttttggggccnnnnnnnnncaacaaagagtgtgtgtagggatgggtttatgggttaaagtgtgatgtgatcgtgtgatttgaaacaggttgttttgtggnnnnnnnnnnnnnnnnnnnnnnnnnnnnnnnnnnnnnnnnnnnnnnnnnnnnnnnnnnnnnnnnnnnnnnnnnnnnnnnnnnnnnntataccaaggcaaaaaaatcatataagctatatcataaatacaagagtttcaaaacatacaagagacatataatgtnnnnnnnnnttatatatatgaagtccaatgtaatttataatacaaaaaaatacagcaagggaaaatgctttagaaatgctcatctgcaaactacaaaacaaaatcctcctcttgaccgactgcatgaactgccatgaaatttgcagctccatcatactaggtatctcttctttcttcatgttaccttgtctttcttcccnnnnnnnnnnnnnnnnnnnnnnnnnnnnnnnnnnnnnnnnnnnnnnnnnnnnnnnnnnnnnnnnnnnnnnnnnnnnnnnnnnnnnnnnnnnnnnnnnnnnnnnnnnnnnnnnnnnnnnnnnnnnnnnnnnnnnnnnnnnnnnnnacaagggccattcaaggctttttaaaacctgatgtgtgttgttatactttataacagtcagtggcttttaattccaaaaggtaatactttatactctgcctacatgagatgagcccctaacagtgtgtacaaataaaattatgatttgggtattctaaggagacataccatttacagaaatttcttttgataaaattaaggtttcacttttcacatttgcttaaatcacagtaagcctgtaaactagctccttgacccacccc

SEQ ID NO: 14444 - DNA, 792 bp, Homo Sapiens
ggtaataaaaatagaagaagaaagaataaagcttagtcctgtgtctttaaaaattaaaaattttacttgattcccatctatgggctttagacctattactgggtggagtcttaaagttataattgttcaatatgttttttgaacagtgtgctaaatcaatagcaaacccactgccatattagttattctgaatatactaaaaaaatccagctagattgcagtttaataattaaactgtacatactgtgcatataatgaatttttatcttatgtaaattatttttagaacacaagttgggaaatgtggcttctgttcatttcgtttaattaaagctacctcctaaactatagtggctgccagtagcagactgttaaattgtggtttatatactttttgcattgtaaatagtctttgttgtacattgtcagtgtaataaaaacagaatctttgtatatcaaaatcatgtagtatgtataaaactgtgggaaggatttatttacagtgtgttgtaattttgtaaggccaactatttacaagttttaaaaattgctatcatgtatatttacacatctgataaatattaaatcataacttggtaagaaactcctaattaaaaggttttttccaaaattcaggttattgaaaattttacatttttattcatttaaaaaactagaataaccggatattttaaaagtgtttaatcttttgtggctaatatgggaatggaaatacactaattggacctccggtgtttttggaatttatttaaagggttcctaacaaaaggc

SEQ ID NO: 14445 - DNA, 294 bp, Homo Sapiens
gaaacctcaagtaacacatataaagaagcagtattcattgaacgaaaagaagctgctggaattgagaacagaaatagtggcattgcatgcccagcaagatcgggcccttacccagacagacaggaagatcgaaactgaggttgctggcctcaaaaccatgcttgagtcacacaagcttgataatattaaatatttagcagggtctatatttacgtgcctaacagtagctctgggattttatcgcctgtggatctaataaagtgtctatttaaagtgatttctactgttttgcct

SEQ ID NO: 14446 - DNA, 831 bp, Homo Sapiens
taattttaagctatttattttcataaacatgaggtatttcaaagtactataagatgcagcactaaatatatacattttgaagaaattaaacacagaactttgcatttacccagttctatgcaccaaacatgaacaaatacattaacaggaagaaacaggctaggaaaaaggcatatatatatagtaaatttctttacaaaagtttcttagttcaaaaagtgataaagtaatatctactcaaaactttcacaactcattttcatacgaaaatataagtatcaaatttagttatgtatcagcgtcatactaaagtatacaggcagtgtaagaattagtacagtacataacagagattaacaatatatttctatacaaaacatgctcctcaaacattgaggtattattacagtacttaggtaggaacttccagtctaatactggccgcaaaagccacctctcattacccaggatgtatacaaaaggcggatgtgtcaatggtatttacagaaatgttccccaggggtatcaaatggcaaaccccttatgtggcatctgctggaacttaagcaccattttaaaaagaaggaatgactttctgttgtttggaaacttggaacacacaaggtgacttcaacagccccagaggctcccaaccgtcaccaacgtttagcgctgtcatggaggtgaggtggaggaggctgcagggccacccagcatcctgggatgcaggctctccaaggtcccagcagaaccccacactggtggtcctactgcccacccagagccgaactcgacaggggaccgatttgaaagtaaaccaacattcttacc

SEQ ID NO: 14447 - DNA, 769 bp, Homo Sapiens
  misc_feature (141)..(153): n is a, c, g, or t
  misc_feature (208)..(293): n is a, c, g, or t
ggggggggaaaatcccacgaccccttgttcctttgccccggggttcttttttggggaaaaaaattattggccccgttgctccctttacctttgtggggccgccccgcccccaaaagaggtggtttgtaagaaaattttctnnnnnnnnnnnnncggcccgcacaaggggttttttttgtgttttgtggggttgttgcccgcggggtannnnnnnnnnnnnnnnnnnnnnnnnnnnnnnnnnnnnnnnnnnnnnnnnnnnnnnnnnnnnnnnnnnnnnnnnnnnnnnnnnnnnngtagatttcacagcatctttatttatagcacttaaaaccaggaaaacagtgcaaatatatctcataggtgaatggataaactactacatcaaatatgtatactactctcaaatataaacaactttcatctggttagatacatggtggtaaaaaaaataataaaacaactattcatcaactcatataaaccttaggagtaatttgctgagtgacaaaaatgccaaaagcttacatactctctatcaataaaaattcatataacttatttatataaaatttataaaaaccatttacaaaaacaattttatttttatcatattcatgaaatgatgaaattatactgataggagaaaagtggttggcagagttaggtttggatggagtgtaagcataaaaaggtagcatgagggactttgtgttcattagttttatgtggtcagggtacacgaatctgtacatgtataataagacggggc

SEQ ID NO: 14448 - DNA, 374 bp, Homo Sapiens
atgagccactgcacccggcctgggttctttattaaagcaatgaattctggatgtcctggcttaactagattaagagggaatgaagcttcttatgaaggatcagtgttaccacagccatttccttgcatgacaccgtccttctcaggacgtctatgagaagccctggcgcagcctggacagggactgccccatgagtgctggtggctcacttggggctttctgcaggtgaaggaagcagccctgggagcttcttcctttggcacacagtgggcttcagctgggactgcaccaatcctctgctaacagcaaccatccttggggggtccgagggagcagctgcgtgacttttcagcagtggctatggtcactcctga

SEQ ID NO: 14449 - DNA, 513 bp, Homo Sapiens
ggaaaagccaagaatcacttagtggaagaatgatgtcctgactgagacagggataagaaggaattgggtggagaagagctagcatagaggttgtggtagagttagaagggagatgagaagaaaacactgtatatatacaatagaatactattcagcctttaaaaagaaggaaactttgtcattgccacaacatgaggggacctggaaggcattatattaagtgaaaaaaaagccaagcacagaatgacaaatgctatgtgatctcacttatatgtggaatctaaaaaaagtcaaactcatagaagcagaaaatagaacagcagttaccagagatggggttgggaggaggggacaggattggcaagatgttggtcaaaggacacacaagtttggttagagaggagacataagctcaagagatctattgtccctcatgatgactataattaataacaatatattatatacctgaaaattgccagcctgggcaacatagtgagacctcgtctctat

SEQ ID NO: 14450 - DNA, 1116 bp, Homo Sapiens
  misc_feature (98)..(110): n is a, c, g, or t
agtcagaaagaagaacagtttaatgccaaaatgctggaaatggcacaggctaactcagctggaatcagtgatgcagtgtcaagactggaaacaaaccnnnnnnnnnnnnntagaaagtcttactgaggttcatcgacgagaactcaatgatgtcatatcaatctgggaaaagaaacttaatcagcaagctgaagaacttcaggaaatacatgaaatccaattacaggaaaaagaacaagaggtagcagaactgaaacaaaagatcctcctatttgggtgtgaaaaagaagagatgaacaaggaaataacatggctgaaggaagaaggtgttaagcaggatacaacattaaatgaattacaggaacagttaaagcagaagtctgccccatgtgaattctcttgcacaagatgaaactaaactgaaagctcatcttgaaaagctagaggttgacttgaataagtctctgaaggaaaatacttttcttcaagagcagctagttgaactgaagatgctggcagaagaagataagcggaaggtttctgagttgactagcaagttgaaaaccacagatgaagaattccagagtttgaaatcttcacatgaaaaaagtaacaaaagcctagaggacaagagcttggaatttaaaaaactgtctgaggaactagcgattcagctagatatttgactgtaagaaaaccgaagccatattagaagctaaaacaaatgagctaatcaacattagtagtagtaaaactaatgccattctttctaggatctgtctcattgtcagcaccgtacaactaaagttaaggaggcactgttaattaaaacattgcacagtttctgaattagaagcacaacttagacagttgacagaggagcaaaatacactaaatatttcttttcaacaggctactcatcagttagaagaaaaagaaaatcaaattaagagcatgaaggctgatattgaaagtcttgtaacagaaaaagaagccttacagaaggaaggaggcaatcagcaacaggctgcttctgaaaaggagtcttgtataacacagttgaagaaagagttatctgaaaacatcaatgctgtcacattgatgaaagaagagctt

SEQ ID NO: 14451 - DNA, 724 bp, Homo Sapiens
cgaggaagacattgccctggtcaacctggcaaacgttctacacagagcacacttctctgctgatgctgctgtcgtggtccatgcagctattacactttggggaatatatatgcaatgcttggggaatataaccactcagtgctctgttatgaccacgctttgcaggccagacctgggtttgagcaagctataaagaggaagcatgctgtcctatgtcagcaaaaactggagcagaaattggaggctcagcctggatctcctccagggaacactgaatgagttaaaagagtatcaaaagcagcatgaccactacctgagacagcaggaaatcctagaaaaacataaactgattcaggaggagcaaatcttaagaaatatcattcatgagactcagatggcaaaagaggcacaattaggaaatcatcagatatgccgactggtcaaccagcagcatagtttacattgccagtgggaccagcctgtacgctatcatcgtggagatatctttgaaaatgtggactatgttcaggtctttttcttggtccagtctaattcttataaacgtttgctttataaagattttttaaaacttttgtttttcctcttgattctttgtatatttgatccctaaaatttgtgattgtcatttagatctttaagattttgaggctgggcacagtggctcacgcctgtaatctcagcacttagggaggcagaggcagaa

SEQ ID NO: 14452 - DNA, 575 bp, Homo Sapiens
tttccatgccaggcagttaatgtgctgacatagtaacaaggtttgaaggaggaacatctcatgcacgtgcgtggaaacccaattgtcatgtgtatgaactacaaaaggatcgggaaaagaacacatttcctcacaacaggaatacatgagattagaaagaaaaccggaatgaggtagatgcatgaatgcacagacaaggatatgtgacaggaagctgggtgacattttgcatctgacatagcagtacacctagagagcccaaggaaatccacccccaagttaccagaggcaagaaatgatcttggcgaaattacaggacacacgttaaagccacagactgcattgaaagagaacacgggtttcaccgcaaacaccatgaacagctgttctgtcaaccttgacggcaaagaccagatctttagtgttaactctaaaagagcatttgtttgggagaaaattatagaactgaagatgggaaagagtcaaggacggcaggaagggatgccaagacaccacgtcccagctgggagcagtgacgactttatgctacgttctgagttaatgctgcattcaat

SEQ ID NO: 14453 - DNA, 480 bp, Homo Sapiens
tgtttaagcaaactctgcaggtgtctttcttatcctagtttgagaaccaatacacaacaacctacgtgattttggtgcaagtagtgtttgaaacacactgaagattactgcccaattactaagacatttttcaaaaagcatgttttaaatcagtgtagtccaggatcacactatattaaatataaagataacttaaaggatcattggatcattcattttggccaaatttttagcttctccaaagtgactaacatcagggcctacaataaaatctgtaattctccaagtttagtaattttatattgaggcaggaagggctcattaagtactaataagtacataatttattaaaaacatacataagtgtcatcaaaaaggtccacaattgttagtaaaaaaaattaaattgaagtagtaaatgctgttttataacatacatttttctgctaattcattctgttttgtgtgacctaataaagc

SEQ ID NO: 14454 - DNA, 826 bp, Homo Sapiens
gcagcagcttcagtagcgcagaggcggcggtggcgagaggtgcggcgaaggaggcagaggcacttatgcttgtcaggccaagaagcttgagagaagaaaaatttcagaaaaattgtctcaatttgactagaatatcaatgaaccaggaaaactgaagcaccttccctaaagaaaacttgggtatacaattactccacagacagagctgagggttttttacccaaatcagtcactggattttgctgcctgatacgtgaatcttcttggaatttttctcatgtggatctaaggggaatgctttattatggctgctgttgtccaacagaacgacctagtatttgaatttgctagtaacgtcatggaggatgaacgacagcttggtgatccagctatttttcctgccgtaattgtggaacatgttcctggtgctgatattctcaatagttatgccggtctagcctgtgtggaagagcccaatgacatgattactgagagttcactggatgttgctgaagaagaaatcatagacgatgatgatgatgacatcacccttacagttgaagcttcttgtcatgacggggatgaaacaattgaaactattgaggctgctgaggcactcctcaatatggattcccctggccctatgctggatgaaaaacgaataaataataatatatttagttcacctgaagatgacatggttgttgccccagtcacccatgtgtccgtcacattagatgggattcctgaagtgatggaaacacagcaggtgcaagaaaaatatgcagactcaccgggagcctcatcaccagaacaaaataagagg

SEQ ID NO: 14455 - DNA, 1008 bp, Homo Sapiens
  misc_feature (704)..(724): n is a, c, g, or t
  misc_feature (858)..(912): n is a, c, g, or t
ggggtgcacggagccgtagctgtcggagcggttagttcgatttcgagctcgaggtttcccccgccgccaggctgacttctcatcgcttgtttttctttttgcatttttcctcccaccgccgttgccgccctccccgtcctggccgtccgccctccgccctctgcagggacatctctacaccgttcccatccgggaacagggcaacatctacaagcccaacaacaaggccatggcagacgagctgagcgagaagcaagtgtacgacgcgcacaccaaggagatcgacctggtcaaccgcgaccctaaacacctcaacgatgacgtggtcaagattgactttgaagatgtgattgcagaaccagaagggacacacagttttgacggcatttggaaggccagcttcaccaccttcactgtgacgaaatactggttttaccgcttgctgtctgccctctttggcatcccgatggcactcatctggggcatttacttcgccattctctctttcctgcacatctgggcagttgtaccatgcattaagagcttcctgattgagattcagtgcatcagccgtgtctattccatctacgtccacaccgtctgtgacccactctttgaagctgttggggaaaatattcagcaatgtccgcatcaacttgcagaaagaaatataaatgacatttcaaggatagaagtatacctgnnnnnnnnnnnnnnnnnnnnnccctggtgccaatttcaagttccaagttgctaatacagcaacaatttatgaattgaattatcttggttgaaaataaaaagatcactttctcagttttcataagtattatgtctcttctgagctatttcatctannnnnnnnnnnnnnnnnnnnnnnnnnnnnnnnnnnnnnnnnnnnnnnnnnnnnnntttgcatgtggatcaaccatcgctttattggctgagatatgaacatattgttgaaaggtaatttgagagaaatatgaagaactgaggaggaaaaaa

SEQ ID NO: 14456 - DNA, 1167 bp, Homo Sapiens
  misc_feature (590)..(900): n is a, c, g, or t
  misc_feature (940)..(979): n is a, c, g, or t
  misc_feature (1001)..(1082): n is a, c, g, or t
  misc_feature (1097)..(1107): n is a, c, g, or t
ggtcttcgaatgccacatggatatgacacccaagtaggggaacgaggactcaagctttcaggaggagaaaagcaaagagtagcaattgcaagagccattttgaaggaccccccgagtcatactctatgatgaagctacttcatcgttagattcgattactgaagagactattcttggtgccatgaaggatgtggtcaaacacagaacttctattttcattgcacacagattgtcaacagtggttgatgcagatgaaatcattgtcttggatcagggtaaggtagccgaacgtggtacccaccatggtttgcttgctaaccctcatagtatctattcagaaatgtggcatacacagagcagccgtgtgcagaaccatgataaccccaaatgggaagcaaagaaagaaaatatatccaaagaggaggaaagaaagaaactacaagaagaaattgtcaatagtgtgaaaggctgtggaaactgttcgtgctaagtcacataagacattttctttttttgttgttttggactacatatttgcactgaagcagaattgttttattaaaaaaatcatacattccccattttctatnnnnnnnnnnnnnnnnnnnnnnnnnnnnnnnnnnnnnnnnnnnnnnnnnnnnnnnnnnnnnnnnnnnnnnnnnnnnnnnnnnnnnnnnnnnnnnnnnnnnnnnnnnnnnnnnnnnnnnnnnnnnnnnnnnnnnnnnnnnnnnnnnnnnnnnnnnnnnnnnnnnnnnnnnnnnnnnnnnnnnnnnnnnnnnnnnnnnnnnnnnnnnnnnnnnnnnnnnnnnnnnnnnnnnnnnnnnnnnnnnnnnnnnnnnnnnnnnnnnnnnnnnnnnnnnnnnnnnnnnnnnnnnnnnnnnnnnnnnnnnnnnnnnnnnnaatttttggcacccaaccccccccaaatttttccggcccnnnnnnnnnnnnnnnnnnnnnnnnnnnnnnnnnnnnnnnncacccggattttttttggccgnnnnnnnnnnnnnnnnnnnnnnnnnnnnnnnnnnnnnnnnnnnnnnnnnnnnnnnnnnnnnnnnnnnnnnnnnnnnnnnnnnaggttttaaaaaaannnnnnnnnnnggggttttttttgtggcgccccccaaaaaccacaagagggggtgtgggggggtatataaa

SEQ ID NO: 14457 - DNA, 792 bp, Homo Sapiens
  misc_feature (487)..(494): n is a, c, g, or t
  misc_feature (496)..(643): n is a, c, g, or t
  misc_feature (645)..(645): n is a, c, g, or t
  misc_feature (650)..(650): n is a, c, g, or t
  misc_feature (652)..(668): n is a, c, g, or t
ggggctgtcttccgatgtcgctcttcctttcccgcgcgaccggcgagggaggaagaagcgcgaagagccgttagtcatgccggtgtggtggcggcggcggagactgcgggcccgtagctgggctctgcgaggtgcaagaaagcctttgaggtgaaggtgtatgaaagtcatcataacagatgttttccaaaaacttgtagaaggttgtgaaaaaactactaggatcacgcggcatgtattgagcatataggttgctgtagatgaatgttcttagctgtcatgtttaaaaatacttctgcttcgttacctcaagtgtggcatgcagcattttggaaggaaaattgaagacgtgttcaagaaaacatgaacagaagcaaatgatgaaaatgagcattttacttgatgttgataacatcacaataaattatggagaaaaatacatatttggctaacttttaattgctgaacaataaagtgttttcttttnnnnnnnnannnnnnnnnnnnnnnnnnnnnnnnnnnnnnnnnnnnnnnnnnnnnnnnnnnnnnnnnnnnnnnnnnnnnnnnnnnnnnnnnnnnnnnnnnnnnnnnnnnnnnnnnnnnnnnnnnnnnnnnnnnnnnnnnnnnnnnnnnnnnnnnnnnntnttggngnnnnnnnnnnnnnnnnnaaaaaattttttacaaacctttttgtgggggcggggggccccaaaagaagaaagaaaaagggggcctccctgtgttccaccagaagacccccggcacaaaaaacaggggtttggttcccccccc

SEQ ID NO: 14458 - DNA, 1235 bp, Homo Sapiens
  misc_feature (1100)..(1100): n is a, c, g, or t
cggtccggaattcccgggataccagttggcgacatggtggcacccgtgctggagacttctcacgtgttttgctgcccaaaccgggtgcggggagtcctgaactggagctctgggcccagaggacttctggcctttggcacgtcctgctccgtggtgctctatgaccccctgaaaagggttgttgttaccaacttgaatggtcacaccgcccgagtcaattgcatacagtggatttgtaaacaggatggctccccttctactgaattagtttctggaggatctgataatcaagtgattcactgggaaatagaggataatcagcttttaaaagcagtgcatcttcaaggccatgaaggacctgtttatgcggtgcatgctgtttaccagaggaggacatcagatcctgcattatgtacactgatcgtttctgcagctgcagattctgctgttcgactctggtctaaaaagggtccagaagtaatgtgccttcagactttaaactttggaaatggatttgctttggctctctgcttatcttttttgccaaatactgatgtaccaatattagcatgtggcaatgatgattgcagaattcacatatttgctcaacaaaatgatcagtttcagaaagtgctttctctctgtggacatgaggattggattagaggagtggaatgggcagcctttggtagagatcttttcctagcaagctgttcacaagattgcctgataagaatatggaaagctgtatataaagtcaacatcttttaaaaactcaggatggacaataacataaggactgaaaagaaaatacttttaccatagaaaatgaaagtgttaaaatagcatttgctgttactctggagacagtgctagccggtcatgaaaactgggtaaatgcagttcactggcaacctgtgttttacaaagggaggaagaaaaccatacacatatcccttactccagttaaatcttatggcacagtaagctgaccaaatcaagtggagaatttttttactgtgattagaaatctcaaatacatgacattttcaagttgacaaagtataatactgcatttcctggtctgctggacactcagntcccattgaacattggaactcctaaggggggaaaagtggtaattcccggcccatgatggcggaaacctaccaccccccccggtaaaattttttaatctaaaagagttcccaccttgattatttatggggaacttg

SEQ ID NO: 14459 - DNA, 807 bp, Homo Sapiens
ggaagagaaatttctacatgaacaaggcaatttcagtgtcttacagcggccaaaccatgacgtgaagaatgagataggagacaggagatcaccataagcgtccctgatatagcagcacacattttcacatttccacttaaatcgttttgcacaaagtcttgcttcgctcagatgagatgagatatgatttcctagagatgtaaaaataagaatgaatgtggcgcccccttcttccagatgtaatagaaagctctgccctatcacaaggggggtgttgaagcgccccttgtgttttaactgtatttaactgagcacaagatgcacaagctgtggtgggaaaccctcagtttacctttggagtcttccctgcagatcgcagacctgtttccaggctgatgtttctggtgtgtaattgctagcgtttctgaagggttttcccaattgttttagccttgtgaagtattcttaattataacttgcctttcagcgatggtacatgacttgattcaacgtttggttctgaacttacacactgatgcgtttactcatctaacataatctgacaggccctcagcaagggagccatacatttttgtaacattttgatatgttttaatgcatctgacttagatcttactgaaataaagcactttttcaaagaaacaacccccgtaaccgcactatctgcctccctcttttacaccctcgggaaaagaagcgcccacgccccactccaaataaatcaccttggtttgcgcgcgccctgcgggcccctcgaaaaaaggctttttctaagaaaccactttc

SEQ ID NO: 14460 - DNA, 1351 bp, Homo Sapiens
aaaaaatagcgtcgagaaggtggagccgggacacgagcggtaatttgtgtaaatggtaatatactgtgggggaaaagtcggggagaaaagcaaataatgggcctttagtataaagccttttcagctgaacatttaccccaaagacctggtagcggccccaggcacctgaggaggcaatgacagtctaggaggacatcttctgcagcaacagccatcaggagaccagcagcagcacagcactcagggctcggtgtccacctccctgcagatcactttctccctcactggaatcaaccgcagcacttggagtctactcatggagtagaaacttccttatgggggtctgccagaggcaggcgaaggaaatcagatgaagcccggtgtttgccaagagctctttttccagccacacggcacagacacagcaaggttctgggaacatttctggcctctttaaagacctgcaaggcctcagggtccacttttcttcttcctctcgactctgggcccagcgattcccacttcactagattcaggttggctccaaattctaccagcaggctcacgaaggctgcctcacagccgtggcgcagaacagcatccatgacgcacccaggggagcccctgtagaatccctgtgtgttgacaggaccattgcagttgaagtcagggttcgcgccagccaggaggagcagccggaagcactggaggttgtggtaggctgcgctgatgtacaaggggcagaccaccaaggaggtgagccgccgggagaatcgaggctggacatcaggagtcaggtggtggttgacgtcaacatcagccccgtacctgatgagggccttcaggatgtctgcccggcccacgcgagaggcgtggtagacaggggtgctgcgatggtgccggcttccgttggggtccgcgccagcttcgagaaggatctgggtactctctaggtgcccgttcaccacagccacatacagggccgtctgtccttttacgtccaccagatccacctcggcccccttccggatgaggaagtccacacagctcccatggcctgcaatggccgcgattcgcaacggtgtgcaggggagccagccacagcaccagacagacttctcgttgatgcggctccggtagctctcctcttgcaataggctcctgagggtctggaggtccccgacgtaagctgcatcatggagcctcgtgtcctcacagtgctccagcggatgatcacaaaattgctccctcagccactccttcagattacgacctgcactgcggagcccggccctgcccgcccgtctgggctgccgccctccgccatggatgcttccgcctccgcggccgc

SEQ ID NO: 14461 - DNA, 1266 bp, Homo Sapiens
  misc_feature (1148)..(1148): n is a, c, g, or t
acccaggacgcagccctccgtgggcactgccggcgccttgtctgcacactggaggtcctccattacagaggcacagcgcacatcgctggccccacaaacgttcaggggtacagccatggcagctccttcctctgccgtgagaaaagtgcttggagtacggtttgccacacacgtgactggacagtgtccaattcaaatctttcagggcagagtccgagcagcgcttggtgacagcctgtcctctcctgctctccaaaggcactgctccctgtcctctctcactttacagcttgtgtttcttctggattcagcttctcctaaacagacagtttaattatagttgcggcctggccccatcctcacttcctctttttatttcactgctgctaaaattgtgtttttacctactactttggtggttgtcctcttttcggcaaagttggagcgagtgccaagctctccatctgtggtaaattctgccaagagcgactcatagtaaccaggatgggagagcagctgccttattctgaatcccaaaaattacttgggggtgattgtcacagaggagggacagaaagggtatctgctgaccaccagcctgcctacccatgcccatgtctccattcctgctcaagcgtgtgtgctgggccggggagtccctgtctctcacagcatctagcagtattattaaatggattcattttaaaaatagctcctatattttgtaacatgtctcaaacactcatactgggttccacaatccactgttagaatacctatggttagggcttctgaactaaaataatggaaaattttaacaatttgtatagtgcctggatcattactagtgccataaccctgtcttcttcaacatttcacagaacttctcttttatattaaaggcaagagcacaaaatgagttcagatgatcacaaacaggtgagttttgttggagaagaaagttggagtaggagactttcacaagtggtttccatggagatagaatgaagcattctgtggtcaagtaagtttagggagctattcatgtttcacttgctttgtggagattcacactatgcactgggaaagtatctgaaaagtcttataataaagaaacaggccaaaaacaaaattacccaccccaattntaaatcttgttggccgcctcggccccccgaaaagctttctaaaaccttcgtttgggggcgcgggccccgctaggtaagtgaccctgggtcataagctgtttcccaagaagatctataa

SEQ ID NO: 14462 - DNA, 395 bp, Homo Sapiens
gaggggcttggggctgagaagagacaagcttaaaaggactgctttggctgctgtactgagactagattgcaggagggcagggaataaagcaggttgatgaagtaggaggcggttggaataatccaggcaaaagataaagaggcttggaccacaatgatagtggaagtggtgagaagtggccaaattctggctagaatgtgaaggtagagccaataggacttgctgatgtttgggggagtcagaaaaagaggcataaaggaaaatctgaggtttgggacctgagattctggaaagataggaaaacttctgcagtggatttcagagggaaagtaggagttcattttgggacatgtcaagtttgatagtattatagaaatgttgagaagggccagacc

SEQ ID NO: 14463 - DNA, 509 bp, Homo Sapiens
ggattattttgagaagagggcatgccagagtggatggtctatgtgtggccagaaaacctatcagttgactgtgtccctcagaaatgcctgtaagacatttcatttaccaaaacaataaagagtgccagtgatggcactggtgtcattggaaactcagtggttgctctgtactccagagctgatggcaaaacatgctgttgcagaactgagctgcctgacagtaatggggatgaaaggtcttgtaataatagagggcatgcacttagccttcagaaataaggtgagtgcaattattataatgagcagcaaggtcagggtggcagtggtgaggagaggaggatcatctggagagagctatggagaagattaatagaatatggattccctagggggaagtagatggacagcaaaaaaaagtattgctcaatctataaacctgtgaattatgtcaagtaaaataaatgtattactcaatctgtacaatcaaaagaaatcaaagatagataatg

SEQ ID NO: 14464 - DNA, 517 bp, Homo Sapiens
cctggctgcttcccctcctccccatttctcctctaagtaaatgtgatggctccagaaagagagataaaagaagaggtgtgtaggaagaggggtgcgttttctacagtcagcaacagaacagaatagacacatccagcaggccgtttgctgggccacactgtctgatgttaaggagtctcttactgttcttcctacttactgcccaaacctaattaaagcagagtcactcgacagttaggaatgcagcactgtatctcctcatgcacaaatccccaaagcctgtgagctctttcttgagagtgaaccttgagttttatttgcccattatcagttatccccatcttatttgtccaaaacaaaatctcatctcacttcctctgatgtcactttacccagtctatccacccatccatcccataattatcctatctgaccagcttacccagcacaaagttggcctctgtttctttgccacgattgggtctgtgcccagataattggttcattcatcaaatat

SEQ ID NO: 14465 - DNA, 515 bp, Homo Sapiens
  misc_feature (304)..(384): n is a, c, g, or t
accagtgcagtaacaaacattccacacgtgcagatggttgccatacaggtatcttggaacataatacaccaagaagtcaatactgagcaatataatccttttgaggaacgacaaggggaaatttcacggattgaaaaggagcaccaagtattacaagaccaacttcaagaagtgtatgaaaattatgagcagataaaacttaagggcttagaagagaccagggacctggaagagaagttgaaaaggcacttagaagaaaacaagatctcaaagacggaattagattggttccttcaagatttgnnnnnnnnnnnnnnnnnnnnnnnnnnnnnnnnnnnnnnnnnnnnnnnnnnnnnnnnnnnnnnnnnnnnnnnnnnnnnnnnngtttcaaatgccagtgaaatgtatacccagaaaaatgatggaaaggaaaaggaacatgaattacatctggatcagtcccttgaaatcagcaacacacttacaaatgagaaaatgaaaatagaagagtatat

SEQ ID NO: 14466 - DNA, 428 bp, Homo Sapiens
cagagcaaaaatgtaaagaatcagaaaaagacaagagacttgaggatttaatccaaacaactgaacagctaaaaacaagagctacaggggcagaagaagaaaaagtttaagaaagagacagtatattattttctctgagaagaggtaaagctggaaacctgttgtaagcaagatttattgaattttctcatcatagtcttaaaagagcagtactccaataggtcttgtttactaaaggaagatttgttgaaagaatcaaacaactgatggaggctgatgaaaagaatacatgacgatcaatgacacttggtacacacgttcacactcacagacacatacacaaacgttggataggaaaaggctggctggcaacatgtggcaacagtgctctgtaaggactcttgaagtagaataaatagtcttactga

SEQ ID NO: 14467 - DNA, 329 bp, Homo Sapiens
  misc_feature (148)..(166): n is a, c, g, or t
gtatgccatcaaaaggcaattgagttatgttaacaaatgtgttcacttttcctattttactaaaacataaaagagatatgggcagctctggcagtctgttaaaatgcttgtgtatgactgaaagttctcaatcatctacccctcaagnnnnnnnnnnnnnnnnnnnttcctgtaagacattagttacttagattaaaagttgtaattataatactatgagtgtttaagactaaactaggggcaacagtgtcaaagaaacaactgagtatatacttttgttttttaaagagaaagaattattttgccctaaatcagcaggtcacttcagc

SEQ ID NO: 14468 - DNA, 459 bp, Homo Sapiens
  misc_feature (32)..(34): n is a, c, g, or t
taggtgctatggaaataatgaaaagaaacggnnnattcagaagaaaattgtaaccaaaattatactttggatatttttgatatcatgatcacaagtgattcacacggtaccacacataaacacacccaacagtgcagcctgaagtaactcccacagaaaccatcatcgtctttgtacatcgtatgtacaatgcaatcatttcatactttaaactggtcaaaaaactaattgtgatttctagtcttgcaaagctgtatgtagttagatgatgtgacaacctctaatatttatctaataaatatgtattcagatgaaacctgtatattaggtgttcatgtggttattttgtatttaaagatcaaattatttgactattgctagacatttctatactctgttgtaacactgaggtatctcatttgcccatgttaatttttttctaaataaattgacaaaaac

SEQ ID NO: 14469 - DNA, 488 bp, Homo Sapiens
ttttttatcttaaaatatctagtggccaagaggtctacaatgacacactttgtagaaaccacacaggacattaacgtaagtttaccttctagtaattattttacaaatgtgttatttcaattagattacatattaagacactgctatgctgtaacagcactgggatgtcactaattaaggctgtaatagggcaaaagtgaactcctaataaatactgaattagagatttcttctacaagtctgtgagtttaagacaggttcaaaactaaaataagaaaaaaacactgaaaaccactttgctcacataatttatatgttaactaaaatatgtattgttcacaggttactaatccatttcaaagtgtagattttatacaaagaatatcacagaaatattttacctccctctgatgttaactctgataagctatgggatttaaggaaatggataataagctcgaaaagttcaaactaatggatttgaatca

SEQ ID NO: 14470 - DNA, 496 bp, Homo Sapiens
gggattcctgtaatggctgcttcctagaaggtcgtgtcacgtggaacctcttaatctcagcatccggagctccaggaagggaaaatttcaagtcagatagaattctatatataccatttctttggaaccttcagccctcaagattccaacatcatgacctcagtttcaacacagttgtccttagtcctcatgtcactgcttttggtgctgcctgttgtggaagcagtagaagccggtgatgcaatcgcccttttgttaggtgtggttctcagcattacaggcatttgtgcctgcttgggggtatatgcacgaaaaagaaatggacagatgtgactttgaaaggcctactgagtcaaacctcaccctgaaaacctttgcgctttagaggctaaacctgagatttggtgtgtgaaaggttccaagaatcagtaaataagggagtttcacatttttcattgtttccatgaaatggcaacaaacatacatttataaattg

SEQ ID NO: 14471 - DNA, 1397 bp, Homo Sapiens
  misc_feature (348)..(348): n is a, c, g, or t
  misc_feature (970)..(1032): n is a, c, g, or t
tatatggttcacgcggcggaggggaatgtgttgcgcgcggagtatatgagtagggaatgagaatattctccgggcgccgacgaaatgtgtacccgcgcgcgaacgggcggtgttatttcgttctgtcggacgacagtggttaaaatagacggtgatagtgtcttgcggagggaggcaatatattttctggtgcgggggagaggggttttttatgtcggcgcacgcccggtcggtggtggtgactatcgaaagatagtgtgtggggcgcgcccgattattatttgggagcaactggcacagaggtgtgtattatgcggcacatacaccgcaggtgtgtgttactaaacnacccacatatacgcggccggccacgatcgtggtcttgtttataccgaaccacaaagggtggcgtcgtattaataaaacggaacgggttattaagagtctaccgcgcagtcgtttggggcgcggaaaattataacagatgtggatgtttccatacacagatattgtcacccgtatattcatatcggtggtgggggctatataacaaagggcgggcggggagcaagagaaaatgggccctggacaacagtgtggtttttggaaacagaaggtttgatcgccgagaagaaagttggcccacaaaagttagggtgcccggaaaatatgggcctttggggaggctctcctcctagagaagggtcctcgcttgagaaagaccctccggggaagacccccctccaggaaaattcccactcggaaaatgttgtgttacgaaacacctctgggttttcgctcccggggggttttgttgtgggcgcgacgattgcagagccctagtttctatgccagagggcggcccaggaacacagaggaagtgcccagttcgttttcgctgggtgggaccggcggggcaaaagaagtggtttagggaacttttttgaggggctagggggcttgacaaggnnnnnnnnnnnnnnnnnnnnnnnnnnnnnnnnnnnnnnnnnnnnnnnnnnnnnnnnnnnnnnncaaagtcaattaaattttatttcaaccaaaaatataaaataaatgcaatgtaatttattttagttttaacagtcatttcaagaaggaagtcaggtcaactcaaaagcaggaaaccctcgctccaaagcagtagctcgtcctgcactccatggagcaggcctcgctggggtgcagcggctctgagcacaaacctcgcagtggagcacgaaaagctacagtcatctttataaccatataaagggggatgcgtgcagaaaatgactgaaaaaagagacaagaacaggtccacttcacaaataggaattataggaatatacaaactaggcagtttagaaaggatatactacataacatatataaaaagt

SEQ ID NO: 14472 - DNA, 791 bp, Homo Sapiens
  misc_feature (581)..(581): n is a, c, g, or t
  misc_feature (596)..(596): n is a, c, g, or t
  misc_feature (598)..(693): n is a, c, g, or t
gggctgggcggcgttgctctgcgctctgcggctgacggcgcttttgtctccggtgagttttgtggcgggaagcttctgcgctggtgcttagtaaccgactttcctccggactcctgcacgacctgctcctacagccggcgatccactcccggctgttcccccggagggtccagaggcctttcagaaggagaaggcagctctgtttctctgcagaggagtagggtcctttcagccatgaagcatgtgttgaacctctacctgttaggtgtggtactgaccctactctccatcttcgttagagtgatggagtccctagagggcttactagagagcccatcgcctgggacctcctggaccaccagaagccaactagccaacacagagcccaccaagggccttccagaccatccatccagaagcatgtgataagacctccttccatactggccatattttggaacactgacctagacatgtccagatgggagtcccattcctagcagacaagctgagcaccgttgtaaccagagaactattactaggccttgaagaacctgtctaactggatgctcattgcctgngcaaggcctgtttangnnnnnnnnnnnnnnnnnnnnnnnnnnnnnnnnnnnnnnnnnnnnnnnnnnnnnnnnnnnnnnnnnnnnnnnnnnnnnnnnnnnnnnnnnnnnnnnnctcgcccaacatgggcgaaaacccccatcttctaactaaaaaataccaaaagttaaaccctggggtggcggggtgggcaaaaaagggccttgccaaaa

SEQ ID NO: 14473 - DNA, 1055 bp, Homo Sapiens
  misc_feature (656)..(718): n is a, c, g, or t
  misc_feature (781)..(781): n is a, c, g, or t
gggaggtggcggaggagagcccggagctgctgaaccctgagcccaggagactgagcccagagttgaggctactgccctatatgatcactctgggcgacgccgtgcacaacttcgccgacgggctggccgtgggcgccgccttcgcgtcctcctggaagaccgggctggccacctcgctggccgtgttctgccacgagttgccacacgagctgggggacttcgccgccttgctgcacgcggggctgtccgtgcgccaagcactgctgctgaacctggcctccgcgctcacggccttcgctggtctctacgtggcactcgcggttggagtcagcgaggagagcgaggcctggatcctggcagtggccaccggcctgttcctctacgtagcactctgcgacatgctcccggcgatgttgaaagtacgggacccgcggccctggctcctcttcctgctgcacaacgtgggcctgctgggcggctggaccgtcctgctgctgctgtccctgtacgaggatgacatcaccttctgataccctgccctagtcccccacctttgacttaagatcccacacctcacaaacctacagcccagaaaccagaagcccctatagaggccccagtcccaactccagtaaagacactcttgtccttggaannnnnnnnnnnnnnnnnnnnnnnnnnnnnnnnnnnnnnnnnnnnnnnnnnnnnnnnnnnnnnncctggccggccccccccggccccccagaagcttttcaaacccttccgtttgggccgggggccncccgagggaagggagactgggctcatacctggtttctatgaaaaacccttgggtccgtactaaagcggttggaattctcccccaaaataaaaaaggcccgcgcgggaaacccgagggtttttttcaacaatttcccggctggggtgctcttaggcgtcttttcctggtactcaggagcagaagcaaatattccccctgtcatcatgtgattacttcatgacacaaggaactatcggcactgctatcgagagtctcgacgaactcaccgccagag

SEQ ID NO: 14474 - DNA, 663 bp, Homo Sapiens
  misc_feature (589)..(589): n is a, c, g, or t
  misc_feature (602)..(602): n is a, c, g, or t
gggagagcggtggtgaaactggcagttgacggctcctgggactagatcccgcgaggtagcccccgaactatttctctacgttttctcttgatcctcccgaaatcttccagatccgcgtagtgaggaatcgtctccaccgtcatggggggcggagacctgaatctgaagaagagctggcacccgcagaccctcaggaatgtggagaaagtgtggaaggccgagcagaagcatgaggctgagcggaagaagattgaggagcttcagcgggagctgcgagaagagagagcccgggaagagatgcagcgctatgcggaggatgttggggccgtcaagaaaaaagaagaaaagttggactggatgtaccagggtcctggtgggatggtgaaccgtgacgagtacctgctggggcgccccattgacaaatatgtatttgagaagataggaggagaaggaggcaggctgctcttctgaaacaggactactcccaggctctatctttgccccatcaggtgccaattcccttcttgacatggccagaaagatccggggaggacccactcttcatcatcaggaagaaagagggagaganaacgagaggtatntaataatccagtgaaaatgaggaaatcaaagaattgttgcaaatgagtctggaaaaaaggg

SEQ ID NO: 14475 - DNA, 1179 bp, Homo Sapiens
  misc_feature (470)..(472): n is a, c, g, or t
  misc_feature (474)..(474): n is a, c, g, or t
  misc_feature (476)..(476): n is a, c, g, or t
gattcattctcgccgggcggatggctccgagaatagtcggttgggtgcgccactctgttgtcggtggtcttgggcgcgccaggggatatgtcaaggggactacaggggcgcaagagtaaggagagggtggaagttcgggggacgtggtgaaagggcgttgttagtcacggtgcgaacatgtagcggaacgcggtacggcgggtaggcgtgatttcagggggctgcggtggtgtcgatggggggggtggcgaggagggaccgtgagaaaaggcgcttcgggagtcgtccggaacggctcgttgccctccgggggtttttagttggggagagtccaagccttagtccaggaccaggatttgcctaggaagcgggtagggccgtggtcacttccctggggggcccgcgcgccaagcgaatggtttaagaaagcttttcggggggccgagggggccgccagggtgtttgttttnnntngngggttttttttcctcctatttttgccactcccatatacaccaatgtcggtccgggggctcagcacctgtaacaatgtatggctagaattcttcttaagaaacgtccgcccagtccgttctctccatgcccgtgctgctgctacctgtgattccacttgcggcagtgcttcaagacgcacaggaatagggcgtcctttcgcagacaagctctcaagctgctccaaataagcgtaattgctgccactctgaatagcttccactttagcggtccattctcgagccttttgtaaggcttctttcaaggacaacacattgggtagaaaggctggaatgttcttggcttcattcacaatgctttctaaacttgccacactgtgcctcggtcttgcctgtaggcagaccttagccttttcttcccatcgttcagagactgtaaggagctcctgtagttcagccattgctttctccacagcatggtggggtgccaaccctaccccagagtctatcagcttcttcatgacatccaaagtgacttgttgcggatctgataaggtcagtcttacttcgtccaaccaccgagcctgttgtagctcttgcttcagtcgtggtaattcagggagttccacatagagactagagcccatatctatcaacatctggagtttggaagaatctggggtatcaatcctccatgtatgaggcc

SEQ ID NO: 14476 - DNA, 141 bp, Homo Sapiens
aatcattaccccaatagcctttcacctctggagagctggattcaatgcctgttaagatacaagtgaaaatgagtttggtggtctcatcctaaccctatcggacaagttattccttatacagaaaagccccaaaaacgaaac

SEQ ID NO: 14477 - DNA, 531 bp, Homo Sapiens
atcctgcagcacccactctggaaaatactgctcttaattttcctgaaggtggcccactgtttctagttggtccaggattagggatgtggggtatagggcatttaaatcctctcaagcgctctccaagcaccccaggcctgggggtgagtttctcatcccgctactgctgctgggatcaggttgaatgaatggaactcttcctgtctggcctccaaagcagcctagaagctgaggggctgtgtttgaggggacctccaccctggggaagtccgaggggctggggaagggtttctgacgcccagcctggagcaggggggccctggccaccccctgttgctcacacattgtctggcagcctgtgtccacaatattcgtcagtcctcgacagggagcctgggctccgtcctgctttagggaggctctggcaggaggtcctctcccccatccctccatctggggctcccccaacctctgcacagctctccaggtgctgagatataatgcaccagcacaataaacctttattccggc

SEQ ID NO: 14478 - DNA, 431 bp, Homo Sapiens
tcttgctttcttcatgccctccccactgctcctgccacctttagataagtttctctagctaattttgtggccaatgtaaaattcgtcatcaacctaacaaacacaaccttctcagcagcatttctcccctgtgatggaaataaataaagtgtttagggcagtgggaggagaaaattctccaggtgaatggggaagggtctgttccagcctctccctactcccatcccatttccaccaactggggaactgtgactatctatctcccccgacttctaccagggatgccttcacgccaaggctgttctcaccagctgcctcagatgacaaatgaggctaatggacataatctacagtgtcctttttcacttgcaccttttttataagaatatattgtaatactaaaaaatattaaattcataccatccctaccc

SEQ ID NO: 14479 - DNA, 1087 bp, Homo Sapiens
tccactagtgtaggcgctcacacttccttttatctataggtgttaacttaacaaggccttcagttttctttttttctgagttgcgactgggagcatcacaatcatattcaacttctggtttagataagtctcggcagaaagtgcaaatccactctccacttggaaaatttgtcaatgtgggcacatgacaagaaagatggaatactttggggcacttttcacagcagaggagttcccctccgttttgacaaactgcacaccagtcctcattggggtcatcctctttccttgtctctccaacatgaagaggtgacttctgggaaggatccaaccattcagactttccatttgaggaattgtcctggtgaagtccaggttgatctcctgtactatcaggggcatctgatcttagcacagtctcctcagaagtagagctctgactgctatttaagagcagggaggtgagtatgcttcttggataattggcattttgaggcctagattcttcatctgattcttgcttcactataacaacagggaaatcataattttccggtggtccactgttttcttgttttattcgaattggctccagcatgaccactgggactttgtgtgtagagtcagctcctgctgctttgctggaagagccagagcttcctcggcttccaacgctggaggcactaggtgaacgtattggggggtgtacactagtcatagtaacaggtcctgcaaggcctggagatggcactgatgaatttggtgactggaccgttctgtttgtgggtggtcttggctggccatgatctatattagtatctttcctcaccatattgtccagcataatagtacttgaacagtcaactatccggaagagagggaagattataagaccctccccctggtgagctcaagtcgatcataggtgaaccgaaagcctttccatcatatcctgctgcactagtaatcgtggggctggaaggagtagaggatgtgctgttggtagttgatggggttcctgtccactgctgatctgccactgttttatggcttgtgagccaagaaagccatctgtccagcatatcag

SEQ ID NO: 14480 - DNA, 370 bp, Homo Sapiens
gaaacttgaaatggctttgctttggctgtcgtcttctgccgtgtgccagatgagcttgtgatctgggaagcggggcacccccgttttgtttctctgggcggttgtggcagctgaaggcggacgttgtttcctaaccataggtggaacgaggagacgggagcgagtgggctctccaccagcacatcactatgcatctgttccaggaaagaagaaaagcgagcgaggaagacggaaaagactgcctgccttggaggggtcacatgagggagacctgtgcctgatttcattaggaaatccattctgttattttttggtgctgttggctactttatcaaaaaacccttcaatagcatccttaagatttaaaaaa

SEQ ID NO: 14481 - DNA, 860 bp, Homo Sapiens
  misc_feature (662)..(694): n is a, c, g, or t
tgtttttggccaggttaattcatgtcaacaacaaaaaaatataatgaaagtttcacaattctagcatgcttgatggcttcctatttaaaataaaatggtaaatgatgtatttatactacattaattatcagtactgacctctgcctgtggctttacctatactgatatctttcataacagacatatctggatcatttgaatgtacttcaagttttttcagactgacggtaggtttcatttcctgaagttgctgttaagacaagctcagtgcaatctttaagattcttgtctaaaacaatttttacattatcactgcactgaagctgtgatggattggcaaactgtacaaacgtttcgctttctttacaaggacatacatgatttccactagtcacagcagtcttatcaatattttttcttgaatttgaatgggatccttttttgtttccagtattcggatggtctttgtcagtatttttcttctgcttcactgcagactcctcaagaaacttcagaaatgatacttcaaatcccattggcttaaaagagttccagtcaaaagatgcaggatgctcctcaatggtttgaatggcaacagcagtttcttcttctttacgcacgctaattaactcagctgctgatgctggtgcagctccttcaannnnnnnnnnnnnnnnnnnnnnnnnnnnnnnnnccttattaactctcttcaaattacttgctttttgtctttctgactggcagaggttatcttcctgaaaatcattacttacatttgaagaagtattagcttgggtctctacacttgtgctatcttcatttattaattttgtaataaacaattctgttagttcatccat

SEQ ID NO: 14482 - DNA, 412 bp, Homo Sapiens
  misc_feature (264)..(289): n is a, c, g, or t
ctggctaagagtgaagaaaggaaaaacttttgagagaaagaaggaattgggagaattgttagagaataggcaagtattcattagaggaacacggctaagattgctaggcaaaattggattgctcacttggattagagcatgaaacaagttgacagcaaagagcataagcttcctttccccaccacagccccctccccacccatagcaactcgaaagcagcaaaagtttttgaagagtggcataaactggtatgtctttttagcnnnnnnnnnnnnnnnnnnnnnnnnnntagacccaaagaattctctgatggtccaggtaagagatgatggggaagcatatacaaagggatgtagtggcagtagaaatgatgaggaggagcctgggcaacatgacaaaacttcgtctctac

SEQ ID NO: 14483 - DNA, 463 bp, Homo Sapiens
aaaaggaaacacttaggccccataaaaagactcaattaatatcatttatggggcccttaaacgaaatgggcagtgaccaaagccaaacaatttaaaaatcagtaaagtaaaatgcaatgaataatatgtaatgctttgaaattaatctgagctatacatcattaaaatacattgcaaatatatcacactatactaattgaattattgtgatggctcctagtaccctagaaaataaataccaacatttttaggttggcagttaaggccctctcaaatctagccccaatcaatcctccaacgttttcttgcactattccccttggtattctactctttattctaatggaagtgactagctgtttgctacacaagcacatagaagaggctcaaatgttagcaaaatgttagaaactggctttgttaaccaatgtaaaatttgggggggtggggcatgctttattga

SEQ ID NO: 14484 - DNA, 493 bp, Homo Sapiens
tggggccacggggagagaggagtagcccctcagactcttcttactaagtctcaggacgtcggtgttcccaactccaaggggacctggtgacagacgaggctgcaggctgcctccctctcagcctggacagctaccaggatctcactgggtctcagggcccagagctttggccagagcagagaacagaatgtgtcaaggagaagaatcatttgtttacaaactgatgagcagatcccagaccttctctaccttcaggaatggcagaaacctctattcctggggccagggcagagcttgaggtgttctggggaaggtggtgctcagagccttccctgtgcccctccacttgttctggaaaactcaccacttgacttcagagctttctctccaaagactaagatgaagacgtggcccaaggtagggggtagggggagcctgggtcttggagggctttgttaagtattaatataataaatgttacacatgtgaaaaa

SEQ ID NO: 14485 - DNA, 1336 bp, Homo Sapiens
  misc_feature (1227)..(1227): n is a, c, g, or t
gggaagtacatcctgagaggggatgagacgtttgctgtcctgagccgcctggtggcccatgggaaacagctgttcctcatcaccaacagtcctttcagcttcgtagacaaggggatgcggcacatggtgggtcccgattggcgccagctcttcgatgtggtcattgtccaggcagacaagcccagcttcttcactgaccggcgcaagcctttcagaaaactcgatgagaagggctcacttcagtgggaccggatcacccgcttggaaaagggcaagatctatcggcagggaaacctgtttgacttcttacgcttgacggaatggcgtggcccccgcgtgctctacttcggggaccacctctatagtgatctggcggatctcatgctgcggcacggctggcgcacaggcgccatcatccccgagctggagcgtgagatccgcatcatcaacacggagcagtacatgcactcgctgacgtggcagcaggcgctcacggggctgctggagcgcatgcagacctatcaggacgcggagtcgaggcaggtgctggctgcctggatgaaagagcggcaggagctgaggtgcatcaccaaggccctgttcaatgcgcagttcggcagcatcttccgcaccttccacaaccccacctacttctcaaggcgcctcgtgcgcttctctgacctctacatggcctccctcagctgcctgctcaactaccgcgtggacttcaccttctacccacgccgtacgccgctgcagcacgaggcacccctctggatggaccagctctgcaccggctgcatgaagacccccttccttggtgacatggcccacatccgctgagggcacctttattgtctgggacaggccctcagcccctcctgccccatccacccagacaagcaataaaagtggtctcctccctgtgcatgcttctgctttcagccccagcctcgtcacttgactgtgaggatcctctgggtgtcagggaagtcctcctccagcagtgagtcatcgaagggttcacaaaaggtgtcgctgccaaagacagggttggcgacagagaccagggtggggttggtcccttcttgccacggtgagaagtcgtcatcagcatcatcttccgcctggaaagcagagaagccaaatgcccatgggcttgcctcgggcacggaggtagagagctccggccaccaagccaagcagtgctccagcggcaagcacagnccccatgcctgctggcacaggtggggcttcaggcgccagaactgcctggggctgtgggggtgcacggagggggctggcaagagcatggatgatgccatggggccagcgg

SEQ ID NO: 14486 - DNA, 558 bp, Homo Sapiens
  misc_feature (17)..(17): n is a, c, g, or t
tttggcgatgactaagngacaagttttcacatccaaaaaatggcatgcagttcagtacctgggacaatgacaatgataagtttgaaggcaactgtgctgaacaggatggatctggttggtggatgaacaagtgtcacgcgggccatctcaatggagtttattaccaaggtggcacttactcaaaagcatctactcctaatggttatgataatggcattatttgggccacttggaaaacccggtggtattccatgaagaaaaccactatgaagataatcccattcaacagactcacaattggagaaggacagcaacaccacctggggggagccaaacaggctggagacgtttaaaagaccgtttcaaaagagatttacttttttaaaggactttatctgaacagagagatataatatttttcctattggacaatggacttgcaaagcttcacttcattttaagagcaaaagaccccatgttgaaaactccataacagttttatgctgatgataatttatctacatgcatttcaataaaccttttgtttcctaagactag

SEQ ID NO: 14487 - DNA, 981 bp, Homo Sapiens
ggcaaccagaatcttcagaaaggttaggacattactttttaagctgtcagtggtatcaaataacttacctagttggaggcagataaaggatcccttacgttttttcctataaggcctaaattgaaattgttaaccaaggaaacagggtcagccttgaaaaatcaaggaattcattgtacctaataactgaagtaaaaataactagttgttcaacttttcctaaactcaaatctatttttataaacaaatgtaaataatgtttatattagagttgaactggttttcatttttataactggtagactagaccttccttaaacttttagaaataaaatgaaggcttcactggatttgtgaggataaaatacattttctttaattgtcctagagcaaagtacattagtcaccatgtgttttttgggccaatgtaaattgtaatttaccaaagaaaaatacatacattgccttggccttgcagaaaagttcccttgaaagaacctttccaataaataaaacggtcccagaagaaaaaacggggggaggacaggatggggtgcgtgtcgggcccggcctcggccccgcgaagaagctttttcaaaacccgtttcgttgtggggcggcggagccccgcgcagggcaagggaaaaaggggtcactacccggtttgcgtacggaaaaccctggatctgcaacaaatgcgggcggggattgttgcccacaatgaagaaacccgccggggggcaactcctagaaacgtgtctggagaaacacccgaagtaaggagccgctcggagagggccttcccggggatgagctcaacacccgaggacagcagaagaggagcaccatacgcagctgacggcgccacgtgcgcatgtgtgcaagtgtttcgaagagagctggaaacggcggcctacgaagatatataatgtagacaagaagcatatagagatacactcacacctcgacaaccaaccctca

SEQ ID NO: 14488 - DNA, 1363 bp, Homo Sapiens
  misc_feature (299)..(299): n is a, c, g, or t
  misc_feature (579)..(579): n is a, c, g, or t
  misc_feature (583)..(608): n is a, c, g, or t
  misc_feature (613)..(613): n is a, c, g, or t
  misc_feature (625)..(625): n is a, c, g, or t
  misc_feature (627)..(627): n is a, c, g, or t
  misc_feature (651)..(661): n is a, c, g, or t
  misc_feature (663)..(663): n is a, c, g, or t
  misc_feature (679)..(695): n is a, c, g, or t
  misc_feature (698)..(706): n is a, c, g, or t
  misc_feature (712)..(716): n is a, c, g, or t
  misc_feature (721)..(751): n is a, c, g, or t
  misc_feature (756)..(758): n is a, c, g, or t
  misc_feature (760)..(760): n is a, c, g, or t
  misc_feature (762)..(762): n is a, c, g, or t
  misc_feature (764)..(765): n is a, c, g, or t
  misc_feature (767)..(768): n is a, c, g, or t
  misc_feature (775)..(776): n is a, c, g, or t
  misc_feature (780)..(780): n is a, c, g, or t
  misc_feature (784)..(784): n is a, c, g, or t
  misc_feature (786)..(786): n is a, c, g, or t
  misc_feature (788)..(789): n is a, c, g, or t
  misc_feature (791)..(798): n is a, c, g, or t
  misc_feature (805)..(910): n is a, c, g, or t
ggtggcgggcagcgctctttccccccacataataatatacaccccgcggtcgggagaagagtcactcacggttggtttattcccccccagatatttgttgcccatagagggagagattattatttttctaagatcgcgagtctcgcgtgccgccggggggaaggctctcgtggggtagacgtgttgtcacgcacacataacggagtgtgttcataagagggggggcccaattttaggggggcgcaccttttgttttctctcacccggtggtgtttacaccaccactaatgcgacgaaanaaggtgattacccccccgtggggcgggggagaaagaccattttttgtagtattgcctccggaggggttcagctttcacagcgcggttgtatttggaaaacagcgcttcttcccggagagaggggcgcgcccccacaaatccccggcccactacaaatgaaatttctttatctgagaaaatatcccccgcccgcgtttgcctcgccgccggcggcggggggctttagttttcggggggaggataaaatatctaaattttgcgggggcttccgggttgcggntttnnnnnnnnnnnnnnnnnnnnnnnnnngtacntcgcctcctttncntcttccccctctgggcccccgctnnnnnnnnnnncnctccgctttttcttcnnnnnnnnnnnnnnnnnttnnnnnnnnntttccnnnnnccttnnnnnnnnnnnnnnnnnnnnnnnnnnnnnnnccccnnntntntnntnnttttttnntttntctntntnntnnnnnnnntttcttnnnnnnnnnnnnnnnnnnnnnnnnnnnnnnnnnnnnnnnnnnnnnnnnnnnnnnnnnnnnnnnnnnnnnnnnnnnnnnnnnnnnnnnnnnnnnnnnnnnnnnnnnnttttccagttttaacaaaggattttattttgttccctaaaaagtaaaatctagaaaatagcaacccactgcaagaagagttctatactaaaacattttcaatcattctctcttctcttcacatggtgtactctttcatgtacacatcatcggaaaacagactgataaatgcaaaccctgtgtgaaaggcacatggcactaatattgctcacacctgctacacctccttgggagccaagggaagccttttctgcaatctccccattttgatagaaacttatcacaaatttttttatagcaaaatatttaaaggtctctttccctgctcttcacttatctactaggaaggtatagaattaaaaagctttttttcccccagctgtgatcaagatgtattaaaagaatatgaaagagcatctgggttattctagaagttctgtgatcaaaacatatt

SEQ ID NO: 14489 - DNA, 984 bp, Homo Sapiens
  misc_feature (291)..(293): n is a, c, g, or t
  misc_feature (295)..(308): n is a, c, g, or t
  misc_feature (310)..(333): n is a, c, g, or t
  misc_feature (336)..(336): n is a, c, g, or t
  misc_feature (338)..(340): n is a, c, g, or t
  misc_feature (343)..(390): n is a, c, g, or t
  misc_feature (394)..(395): n is a, c, g, or t
  misc_feature (400)..(402): n is a, c, g, or t
  misc_feature (404)..(409): n is a, c, g, or t
  misc_feature (411)..(453): n is a, c, g, or t
  misc_feature (461)..(475): n is a, c, g, or t
  misc_feature (482)..(502): n is a, c, g, or t
  misc_feature (523)..(535): n is a, c, g, or t
  misc_feature (607)..(618): n is a, c, g, or t
  misc_feature (641)..(733): n is a, c, g, or t
  misc_feature (754)..(767): n is a, c, g, or t
ggtgggatttgaccgatacaaaatggtggtgcaagtagtgattggagaacaaagaggtgaaggagtattcatggcttctcgctgtttctgggatgctgacactgacaactatactcatgatgttttcatgaatgacagtttattctgcgttgtagcagcatttggctgtttctactactgaatgaatctttgaaaagctggtaaaagacatgaccatgaagaaatctgaactttttaatattgttaaatatcttgacaaaataaagatgttagtagtttgacaactgaaannnannnnnnnnnnnnnnannnnnnnnnnnnnnnnnnnnnnnnaanannnaannnnnnnnnnnnnnnnnnnnnnnnnnnnnnnnnnnnnnnnnnnnnnnnaaannaaaannnannnnnnannnnnnnnnnnnnnnnnnnnnnnnnnnnnnnnnnnnnnnnnnntttggggnnnnnnnnnnnnnnnaaaaaannnnnnnnnnnnnnnnnnnnngggcgcgggcccccccaaggnnnnnnnnnnnnngtgggttaatatttttttcttcaaaagaaacaccggcccaacaaaaagaggggtggtgttttcccccccacnnnnnnnnnnnncccccggggggaaaacaacagtnnnnnnnnnnnnnnnnnnnnnnnnnnnnnnnnnnnnnnnnnnnnnnnnnnnnnnnnnnnnnnnnnnnnnnnnnnnnnnnnnnnnnnnnnnnnnctcatttataattaatattannnnnnnnnnnnnngggggctttttttatggggaagagagggtgtgggtaatatcttatataaaacattctctccgccggcgaggggggaagacccccctccccaacacgcgggggtgttggaaaacccgtataatcgcccccgcggggggatatacacacacccgttggggggcgcccggtggaaaataaatattttttcccccgcgggggagaacacaagggggggcag

SEQ ID NO: 14490 - DNA, 960 bp, Homo Sapiens
gggcatcgccacatccctggatggcttctacgtcgcggccgtgcagcagcagcggcaggaacagagctacttcgtacgtctgggctccctgtcggagaggctgcggcagcacgcctatgagcactcgctgggcaagcttcaagccaccaagcagagggcacaggaggctctgctgcagctgtcgcaggccctaagcctgatggaaactgtcaagcaaggcgttgatcacaagctggtggaaggccaggagaagctgcaccagatgtggctcagctggaaccagaagcagctccatgggccccgagaaggagccgcccaagccagagcaggtcgagtcccgggcgctcaccatgttccgggacattgcccagcaactgcaggccacctgtacctccctggggtccagcattcagggcctccccaccaatgtgaaagaccacgtgcagcaggcccgccgccaggtggaggacctccaggccacgatttccagcatccactccttccaggaccgtgtccagcagcattctgacccagagccgtgagcgtgtcgccagcgcccgcgaggccctggaccacatggtggaatatgtggcccacaacacacctggcacgtgactcgtgggaacctgttgcccctgcaatcactgagaaagccccggaggagaagaagtagggggagaggagaggactcagcgggccccgtctctataatgcagctgtgctctggagtcctcaacccggggctcatttcaaacttattttctagccactcctcccagctcttctgtgctgtccacttgggaagctaaggctctcaaaacgggcatcacccagttgacccatctctcagcctctctgagcttggaagaagcctgttctgagcctcaccctatcagtcagtagagagagatgtccagaaaaaatatctttcaggaaagttctcccctgcagaattttttt

SEQ ID NO: 14491 - DNA, 1195 bp, Homo Sapiens
  misc_feature (580)..(739): n is a, c, g, or t
  misc_feature (847)..(910): n is a, c, g, or t
gggcatggtcaccggattgaaactgtctcaggaccttgatgatcttgccattctctacctggccacagttcaagccattgctttggggactcgcttcattatagaagccatggaggcagcagggcactcaatcagtactcttttcctatgtggaggcctcagcaagaatcccctttttgtgcaaatgcatgcggacattactggcatgcctgtggtcctgtcgcaagaggtggagtccgttcttgtgggtgctgctgttctgggtgcctgtgcctcaggggatttcgcttctgtacaggaagcaatggcaaaaatgagcaaagttgggaaagttgtgttcccgagactacaggataaaaaatactatgataagaaataccaagtattcctgaagctggttgaacaccagaaggagtatttggcgatcatgaatgatgactgaacagggcttgcaggtgctgatgccagaagcttctgtgccattgcattaaagacttctgtcatttgatccatgttcaagacccttgaggtattgtttcatcatttctgtattgtctttcaataaagaaaacaaacatgnnnnnnnnnnnnnnnnnnnnnnnnnnnnnnnnnnnnnnnnnnnnnnnnnnnnnnnnnnnnnnnnnnnnnnnnnnnnnnnnnnnnnnnnnnnnnnnnnnnnnnnnnnnnnnnnnnnnnnnnnnnnnnnnnnnnnnnnnnnnnnnnnnnnnnnnnnnnnnnnttttgcgcccccccccgccccccaaaaaaattttataaacccttttccttggggcccggggccccccaaaaagagaaaaaagacaggggccaaaacgtgtttcccacnnnnnnnnnnnnnnnnnnnnnnnnnnnnnnnnnnnnnnnnnnnnnnnnnnnnnnnnnnnnnnnnaacacacgaagggtttctggaaaaaaacccaaaaggggatttctcgggggggcttttcagtgggttttattacacagggaggcccccaaggcgggctctcatattttaataatatacgcccccgcgcccggggcaattttataagagaaatagagggtgggaaaatttaactataacacttcccccgccgaccggcgggaaccccccccacaaacaggcggagtgtatgaaaaaccctcatactccccaagggggacactcaaaccctctttgggcccctccgtg

SEQ ID NO: 14492 - DNA, 792 bp, Homo Sapiens
ggtagtgaagttgtgcaacggccagggttgtgctttctagcaaatatgctgttatgtccagaaattgtgtgtgcaagaaaactaggcaatgtactcttccgatgtttgtgtcacacaacactgatgtgacttttatatgctttttctcagatctggtttctaagagttttggggggcggggctgtcaccacgtgcagtatctcaagatattcaggtggccagaagagcttgtcagcaagaggaggacagaattctcccagcgttaacacaaaatccatgggcagcatgatggcaggtcctctgttgcaaactcagttccaaagtcacaggaagaaagcagaaagttcaacttccaaagggttaggactctccactcaatgtcttaggtcaggagttgtgtctaggctggaagagccaaagaatattccattttcctttccttgtggttgaaaaccacagtcagtggagagatgtttggaaaccacagtcagtggagcctgggtggtacccaggctttagcattattggatgtcaatagcattgtttttgtcatgtagctgttttaagaaatctggcccagggtgtttgcagctgtgagaagtcactcacactggccacaaggacgctggctactgtctattaaaattctgatgtttctgtgaaattctcagagtgtttaattgtactcaatggtatcattacaattttctgtaagagaaaatattacttatttatcctagtattcctaacctgtcagaataataaatattggaaccaagacatggtaaaaaa

SEQ ID NO: 14493 - DNA, 538 bp, Homo Sapiens
  misc_feature (504)..(504): n is a, c, g, or t
ggaccggaagtcccgcctctgccgtgggcctgcgagaatcgaggcactcgctggcgtacccatgtatcgaaatgagttcacggcctggtaccggcggatgtcggtggtctacgggatcggcacctggtctgtgttgggctcactgctttactatagccggacaatggcgaagtcgtcagaccaaaaggatggctcagcaagtgaagtacccagtgaactctctgaacgcccaaaaggattttatgtggaaacagttgtcacatataaagaagattttgttccaaatacagaaaagatcctcaactattggaaatcatggactggtggccctggtacagaaccatgactggctgctgaattctgaaaaccaggacttggttcaacatttaaatttgatagttgccctgattcccattttgggtttgtgaaaagtgtatgtatttaaatttgctgtaaaacataatcactaataatatgcaataaatattttcttgaaggaaaccncacaaaaacaaacacaaaaacaaataaccttgtc

SEQ ID NO: 14494 - DNA, 894 bp, Homo Sapiens
  misc_feature (801)..(801): n is a, c, g, or t
ggggagctgagtatttaagatgtattatcctcgggtcatcctgaaaattaatgtattccctaaaatttcttcttgtctatcatcaaggcctttttttatttgttaagaatttttatattaaatgtaaaacatataaatattttctattgtataatcttggattcaacatctgtgaggatcatttttgtaagatacatagaatttgtgcatttctttatgaacttactgttagtgttcttggtttcggctgtttatgactcatgtttatgtacattctgctccaaaatgtttttgtactctgcaactaattacttttggataacaaaagccttgtgtttaatgccctaaagtatttgggggtttccttgtgagagggtggccgaatcatctacctctctcttccatagttgctgtgcaatcgtacgggtaaaattcttaattacttacaaaaactgtgatagaggggagaggtacagatttggtttttaaattgattttaaaatactttatagaaatttagtaagaagtaaaggcaaaagactttttttccccccatcctaggaaaccccgagctatgattataatgtaaaacagcctctattcagtgtctaaaatgaggtcctcaaaacccacgaaagaaatagatccattttacctgaaattcatctcatgccctttatcttaccccttctggaaaataacttttggcctccttttttaaaaagaagctttgagggctggggcgctttatgaaggcaatattatgtaagggagaaagatccgccggggccccccaaaaanggcgacacgggcgacggtagacggccgcgtggtgtgggcccctggggccccgaggaaacctgttccacaaaccattcccttcggggagggggg

SEQ ID NO: 14495 - DNA, 353 bp, Homo Sapiens
agttttaagtacctataaagaacactgaaaggtgatgtgtgtggatgagctaggaagacctgaaataggctctctctaaattaatcaaattaatcctgaagccattctgcaatactgtctttaatgtatactcacttgttatagaagccagggttttttcccctaatttgtatcattgctatatgtgttattgtaccaaactacactgttttaattgctgtaaattttaatatgtcttagtatctgggtgtgggaatcttgaaagcatggagtttgtgttattcaccactgtattctcaaatatcagaagagtatctggcctactaagtgcacaataaacatagttaaaatga

SEQ ID NO: 14496 - DNA, 645 bp, Homo Sapiens
ccagtgttgaatcatgctatatttcccatcatcccagattgctaaatgttctttccaagaagtctgaatgaattattatatacatttgctatcatacatgacagttgtgtcattattagagatttcagtaattaaaatgggaaacagaagcctaagttatttaccttatcaaaaccacgttccttggaaccacattattatgatggtttttgtgctcttgtacgttggatgtcttaagctgagtacagtttaggggatcctttctaatgacaggaaggcactgctttcctcaacactgtgatctgacctgtgacaagtctgtactatccactatgtaaatggctcacaagtcaattgcaaacaaactgaatgtacaaatcttagtgctggtgctgaaatctcttcagaatagtcatcatgatttaaaagtttgtttaaaaaatttgcaagcatcaagtgtcaatcaaaactgaagatgaaacactaatgaatgttgaattctcatggcttttaggtgtacttcctttttagaattttcagttttctgctatttttaccgtaactatttcgtttaaatttgtttcatttaagtttcctacatgctaacttcaattcccccattgaaataaaattgcagtatatatt

SEQ ID NO: 14497 - DNA, 795 bp, Homo Sapiens
atccttccttaattacaacagtcacaccttgcagccttgtagtacaatcctgaaattttttacagcaatcttcactgcagaaatctctcacaacaccatcgagttctttagttgctcccttcttacatagctgagaacaatagttgcaagtaacacatctcaatcctaaacgtctggcaaaatcctgtttgtataataatttgcagccttcactacagaaaggtctcttaacgccagagaaattaactgtttcatgaagagtcttctcctcttgacagtattcgcaatatgtaactatgcaatgcaacttcttatagtcatctgaacaagttttgctgcagaactgatgcactttgttctcccattccaggatttctggttttgaacaaaaggaatttttgcagtagttgcatttcaactgaatatcacttggcgctacaaactggccatttggagatgactgcatacttagagcctgaaatttagccacacaactggaattgcaaaagttgtacagttttccatcaggcattgtggcttggtattgaggtaaagagtttcgcttacaaaaatggcaaataattcccaaactttgtgattttgcatattttgtcttgtgactgttcatacaagcagttgaacaatatggctccatatatccattaggacctatacactgagtcatatcaaaaaaacctgcactgtgttcggcaaccagtacaagttgtcagttttccatatttctccggctgcattaagaaagagtcctgcatgtgaactcgacccagtgtgacg

SEQ ID NO: 14498 - DNA, 580 bp, Homo Sapiens
acactgggtcgagtccactgtcaaaaattagtaattatcattcttcttacaagtttaagactcaaatggaactgactttttcagcctatttgtatgtctatggtaaactaacagcaaacagctggatgttcttctgtggttacataaccttaatggagattagttccttttatccttctatactagcttccctaccaaatgattagattttttgaggggcagatataaaccccttccattgtttaaaaaacattgttaataacccttcgcactacacaccaaagtgcagcctttaatatagttgccagaagcagttctgagtgaaacactgaaatgaaaagtaaactcatgtcatttggtctatgataagcattcacagtttgaaaaaccccaaacagggatagttaagttgcaagcactatttccagaatgagagttcgaaaattatatacataatgtggaaacaatagatcaatgaaagggagtatagaacaaaagagagaagaatttccatagccactccatagaatatcaggtctatagaatgtccagaggggttatgtccacaacagggttctag

SEQ ID NO: 14499 - DNA, 911 bp, Homo Sapiens
ctagtcactctataggatctccacactgggttcgagttcagagtgtggatccaattccagtgcagttcttaagagtctctgagaaaagaaaaacaaaatgtccctggccatgtggaaaattaatgtttaaaatttggggcttaggtaggaaggacaaagtaacttaccagcactcgtacggtaatgtggtagataattgaggcacttgtcaaaatgctcatcaaaatcaaatggatcaatgatccacatatctcttaactacagaaaggaaactgtttaattctgtgcccccacacaagaaaggctgaggattctattgcccttgtttgccttttatctcctcagcctcactgttctacctcatctatcttcataggagaatattcccagcctccctcctaaattgagttccaatggtcattggtttggccaggcaatatgtgaacactaccagagcattgcgctgtgtactaggaaggccttttcagaatggcagtacaggaagctagcctcctaccttcacagcttcatcctccctcatgattgccacttcaaacatatactgcttgcaaagcatccagcagttccaggataggacaatttcattcgcctgagccaaacgctgagctaactggacatcactacaacctgcccaatcaccaagaggtactgctgccgctcatctccaacaataacctgggaaatccgacttgcaggtagacctatccagaaaaaaatgagataaatggagaagagtcaaattcaactgggaaactatgcaacaggaggggtctggaatccccacatggctctgtgcatcatgcctatcttgttactgccctcagctgcggaagtcttaggtgagctaaccctttaaaaataatacctttacggccaggcacggtggctca

SEQ ID NO: 14500 - DNA, 547 bp, Homo Sapiens
tcgcgggcgacctagaggaccccacactgggttcgagttccctatgtaattctgcctataactactacaatgtgttgtctataactgatgagaacttttgaaaaaaacataaacaccatgcattactattcctgaagaaataagttcttagtatcacctatggttaagtccatatctcaaacatgtcttctcatactggacaaagaagtcccatattcggcattttgttatgctgaagcaccgtggatttttgtcaggctcaaatttaaagcacaagaggccagatacacagtgacgctgaaagatctggtatgagctctcttcaaagaaggtaaaaagaaagaaccagtttctgttattatcagaatttaaaatatgactgctttgaaaggaggcttgaagaacacccaagctcatccaaatgcccactgttgttgatcagtgtcacctcctcctcacctcacccttcctcccagaattctgagaataagaggataattttttttaggttttactgagatggagtttcgctcttgtagtccaggct

SEQ ID NO: 14501 - DNA, 620 bp, Homo Sapiens
ccttatcgactctaaggacccacactggtcgagtcacagacatattatcaatatctcttgatgctaagagtataatttgtattagtgctactcatagtgtggttacctattttatcagtgtgaggtgaagaggctgagtcagaatatacgtcaacgatgtcactaggcacattgttttagctcagatttgagcggggggccggtagcaacatttttctctatgaaggaatctgtgtgtcgatttatattctggccctcaagcatcttatctcatcacagactggtactctgagtaacactgtatactaccacgaagtatagacaagtttttgtatctcttgtagttttttccaaacagaatagccccttaccctattccatcattatctttgaggaatctgagttccattaaattattctgctagtagcaataaagtatctcctttgaagctcttgaaagtagagatcataacacggtaaggttaacaagtagacctcacaatgtcttaaatttgtatctatgacacaatggatatttatgaaactcaatttctgcctaagaggcagaaaacgttttatatgcctgtgtgtaatttacactttgggttttctagttcgga

SEQ ID NO: 14502 - DNA, 618 bp, Homo Sapiens
  misc_feature (562)..(562): n is a, c, g, or t
tgaggaccccacactgggtcgagtcacagtctgtcagttgtgtgactttgggcactctgtaacttctgtttctcagtgtcttcatctggaaagtgagcatgacaataaaaagcacttatcttgaagtgggaggagggctgactgagataacacatagagctgagagtaacacaggcacatggtgtgcatatgatgagtgtggttctgatcacttattcaacaagtgtgtaatgcctactatgtaaaaggcactgtgatggcggtgggggatcagttgaataatacagacatgattcctaccccacgatgcatccagcttgaggagacaaacaacaaacaagtaatcacacaccacctgccagtctctttaaaatagagactgtgatgagcgtcctaaaggaaacccactagaagctgtaataaagacgtctatttagaattctgcataaagatgaataatttgacaaatatatatcattttgcattcatctctaaaccacagtaatgaatatttttaaaaagatagaacccacaaggaagtggaaagagaggagataagagncaacaaaatttgaagctagtaagcagatgggtgaatggcacctgtgaggggaaagc

SEQ ID NO: 14503 - DNA, 586 bp, Homo Sapiens
ttagaggatcgtcacactgggttcgagttccaagaatgaaagctgatgaatgtagtggatgtgggaaatcactcctccatattaagcttgagaaaactcatccaggagatcaagcttatgaatttaatcaaaatggggaaccttatactctaaatgaagaaagtctttatcagaaaattcgtattttggagaaaccttttgaatatattgaatgccagaaagccttccaaaaggacactgtttttgttaatcacatggaagaaaagccctataagtggaatggatctgaaatagcctttctccagatgtcggacctcactgtacatcagacatctcatatggaaatgaagccctatgaatgcagtgaatgtgggaaatccttctgtaaaaagtcaaaatttattatacatcagaggactcacacaggagagaaaccttacgaatgtaatcagtgtgggaaatccttctgccagaagggaacccttactgtgcatcagagaacacacacaggcgagaagccctatgaatgtaatgaatgtgggaagaacttttaccagaagttacacctcattcagcatctgagaat

SEQ ID NO: 14504 - DNA, 720 bp, Homo Sapiens
agggtctttacactgggttcgagttctccctggggcggtatggcagaggaagccaaaatagctcgcctttatcagggctaaatcgtggaactaaatctagggttctgctagcggtggtggctaagggaaaccgctggtgataaaagcaaagaaatgggggagaagccgtgggggagggagccacagtcacactccttacagaataaactatctcgcctaggggcagtttcagcagaaggcttcagagacccccggaagcagacagaaagaagtccacatgccttgcttggctgaggagcaaatcgggtcatgaatttcatctcagcaatagccaataaacacagcagctgctatacccagccctgagacatctagcacaggagactttataaagaacaagccgatctcctctggcaagcaagccacaaatggagaaggtcttggcaggatttttgtgtcctttattcatatggtatcagcacctaaaacagtgcctggcattaaagcactaggtaaatatgagtgactgaagaaatacatgcgtggggagagaatataaaccagcagcaccagttagtaactatacaaaggtaagcaagccattcagtctctaggagcctctatttcttcatcaggaaaatagggtaatgacactacttggaagggcctataagattaagccgggcagtgctcatgcctgtatccaggacttggaagcca

SEQ ID NO: 14505 - DNA, 607 bp, Homo Sapiens
  misc_feature (128)..(128): n is a, c, g, or t
gatcccacacggttgagtcctgctgccctgacagactacgtgcaccatggcatgtcagttaatcactaaacattgcttttcccatcccatctgtgaaaagattggacaacatcatcttgttttcctcntttagatgaagatacttggatatggacagaactcgaatgtagtgagagaagagaatcacatagtcgaaatcataacctagaacttgggaactaaagcgatagaagagctgaactatggtagtctagtgtatttccctcttgaggcttccataactggcctggttgatttttctaggtcatttgggagcctgaattctcttgataaacatgcttttgataatatggtacaacctcactgtacaggcagtcctttgaacggcagttggcagaggtaaaaatggccatgcaaaaaactacccaaagtgctgggattacaggcgtgagccaccgcgcccggcccacatgaaacgttttacatttatcacttaggtaatattaatggtatagtgaagctctagtctctgactgtagatgcctggaaaatgtctttgaggtaatggagaaactcagaaaaaattgatgaaagaatatgttttctg

SEQ ID NO: 14506 - DNA, 645 bp, Homo Sapiens
  misc_feature (86)..(86): n is a, c, g, or t
ccctagaggatcgccacactgggttcgagttccgggagctggccagggactccctcgaaacggactttgcaggattcttgctacanactggacacggaagcctgaggctgaggcctcatggagaagaggagcctggctgaagttcaggcctggtgagaggctttgttacactccaactctgtcttcacagagcagaagcatccgtagacgatgtgaaatgaatggatgtggctgtgttccaatacagctttatttatgggcacagagatttggcttttatatagttttcacatatacacgaaatgtgattcttttgattttatatttttaaccactgaaaaatgtaaaagccaatctctgcttcggacctgtgccagaacagggagtagcctggccgtatttggcccatgtgccgtagtttgccaaatctctgtggtaggtattctataacccaaatttttacagtgagcaaatccagagaagtaacgtgcccagtccttaacaatgaaatgtgtaaccaggatccacacagagcctctcttagctaaagctcatgtaatgtacgtcgcatgtggctgcctgtccttggatctcccgtcggagagagctgcacaaaccgtaacagcagagatagttgtatacgga

SEQ ID NO: 14507 - DNA, 648 bp, Homo Sapiens
catgcacagttctaattgcagtgacccatgacaagtgactaaggcttcaggcctcagtttccttcatcctaactgcaaggatgctgcctgccagctacacagccttgtacattggaggaggacaatcaggatttgttgagtgagaacctgctggtcatggcaatgaacactgacctttgttgtatcttggctgttcattttccagagtgttcacgagcccacaggcccaagtgagagttatttgcaactgggaggagctggtgaagcaagtggtttctcctttcctcggcaatcaagcggggaccgtagcttctcaggccccacgtacacgctgggtaaggagtgcagctctcaagttgtcaagaggccacaagtgatcatgataccagcactgtttaactgagcactgtttaactgagcactgataccagcactgtttaactgagcacagccttttgcttcctgtgcgggtcagtgcaaatccgtgcatcttaagcactcacattcctggcctctggaggttgcagtaaccttctcccccttgatgattcctccccaaggaccgatactgtgcctttgcggtggtgcttgtctgatcacataaatgcacccagggaactcgaacccagtgtaaaggatcctgctaga

SEQ ID NO: 14508 - DNA, 554 bp, Homo Sapiens
tctgaggagctgtcacactgggttcgagttctaaatgggataatagatatgaaataactcaacaagtaaatagctcagctgttggaaatcaaacaaggagaagaaaagaaaaaggacatagtgctataaaagaaaatctttataaaattcaaaaccatttaaaatatgttgccattgatttccttattaacaggttttaatacctccatctttctctaatagttttcagtttattagaaacagtatgtgaactttttagattaaaaatttccagcataggtttatcacttattatatccttttattccttgaaatggatgattgtcaggcagaaatttaggacaaaggagctgaaaaatatacatgagactcaggaacaaagctattactccaactgtaaggatacattataagcacgtaaatatagttcaaagttaccacatctgtaaactcaaaaatgctgctcacttggctggatccaatcaatatttgctaaccattattttagttattcttcatatagacaggcgctttgtttcttagaagaaatcact

SEQ ID NO: 14509 - DNA, 153 bp, Homo Sapiens
gctttcgtatctggcattttacaactgtttctctcatgtaattttaatttttcatgcaagaacactccctgctctcttaagataaatcaatgataatcacttccacatcaatgacatgaactcgaacccagtgtggagatcctgctagagtca

SEQ ID NO: 14510 - DNA, 598 bp, Homo Sapiens
tagacgatcgctacactgggttcgagtctcaataagaatgcataggaacagtaagtagaactgtaactacgtaggcactggtacgaattctcagtgagaatgcaatgaaacagtcaactgcagtgtttctttttgatagtcttttattttacaactgggccaaaggcacattatgtatataattagtttatatttacacactagcatataggaaatatttctgcacttgacccatatttgaattctgagcattatttataagtataaaatgatgatatataagtgaattttgtgctcttgtgagtatattattaaggaaaatgaaaataacctggcatcagttccatttggctaaatatctagtcttcttcaaacagtatcttggagggtgacattggctaccctgaaaaatcttaggaggaatagctcacaatacaataaatctgtagattctgcttagagcaaattatggtacttttattcagacttgtatcctttctagttaacagaaatagtgacatttagaggttttaatcagaagttaggtttatctgattcaggaacatcgtaggccagccatatgtaattcttaactttg

SEQ ID NO: 14511 - DNA, 1019 bp, Homo Sapiens
gcagaggaagggaagtcggcgtgagaggcggcgtgcgggaagcgggggcggtgctgcagaccggcacacagacactccgccggcttcgcctcctcagcgggaccgagcgaccgccatttctacataaaaatactttattcattcctgataggttatcaaaatgtacactgttaaccaagtaaaaatggtatgctgaaatagttaactagggcatatttgaagaattttgtttacttttaaaagaggaaaaatcacttccaatcttcccttccacacattcctaacaagcctgcactatacctgcttaaaactgaaaatataaacaattacatgggccccacttcattacagaatgcattttcctgtactcttaaaggaagctattacattgaagttaccttcctttgccaaaaactttcagacaagttactgctctttatattttgtgtaactttgtaaattatacaagaaatatagcacacaacttgaattaatctaaaaacacatacacataaacacaggataaagtgcaacacaacagaacatgtctgcaacattcactttctcaaacccccacagaaggattttcggagtaaatggaaataatgttgttctcaagtgcatgaacactaaattcaacagaataggttatttttccacactgatatttatattgaaaatcctatttgctttgcttcccctgtggcttctgtctctcattttcagttaaaagttccgaagctgtgattctttttaaaccttaagaaaatccaactccacagagctacacaaagtgttagaaggcagcttccaatgatctctcgtcggtaacaaggagaattacagtcatcttaacaaaagtgagccttccactaacttggcagcaaatgctttaaggacctttgacaccagccaccaaacatttctataggcaagtatcaactataaatgtccagaagttttggttgcatgtagtttcgatgttaattatttaacttaaaatgctttgtccctagatg

SEQ ID NO: 14512 - DNA, 710 bp, Homo Sapiens
  misc_feature (97)..(204): n is a, c, g, or t
tcgctacactgggtcgagtcacagaaatccttctatacctaaactcctgtttgttaccaccacctaggcaaacgttttttctcccctaattgtttgnnnnnnnnnnnnnnnnnnnnnnnnnnnnnnnnnnnnnnnnnnnnnnnnnnnnnnnnnnnnnnnnnnnnnnnnnnnnnnnnnnnnnnnnnnnnnnnnnnnnnnnnnnnnggtttgtgcataattttcctgatacctgccactacagataagcaaaaaaatccgtgcgttccacggtttggacacgggtggtttagggctatattttaggttccttaagaacagggaacaagcctgacactgtcattccactctttcatttttcccatgggccctcttacctaaagactgaagtgggaacactttagcagagcatatgggcattgtcttgatcacattcctgccttcccagccagcctgtctcctgccatcctcctcctgcttcccacgcttcagccagagcaactctgtctggttccccaggcatttcctgttcactcataccctttacttactgtttcttctcgtgggattcctgcttttagtctctttctctacctgccaactcacagtccttgagactcagtcctgctcatctccatctttagaggcttttccagatccctccaggcttacacaccttgaccagaactcgaacccagttaaggatcctctaa

SEQ ID NO: 14513 - DNA, 831 bp, Homo Sapiens
cagtgcgctctttgtgcaagcttatcttcctgtccagtctgctatcgaagctatagagaagaagatcttattctgcaatgtagccaatgtgatagatggatgcatgcagtttgtcagaacttaaatactgaggaagaagtgtaaaatgtagcagacattggttttgattgtagcatgtgcagaccctatatgcgtgcgtctaatgtgccttcctcagactgctgtgaatcttcacttgtagcacaaattgtcacaaaagtaaaagagctagacccacccaagacttatacccaggatggtgtgtgtttgactgaatcagggatgactcagttacagagcctcgcagttacagttccaagaagaaaacggtcaaaaccaaaattgaaattgaagattataaatcagaatagcgtggccgtccttcagacccctccagacatccaatcagagcattcaagggatggtaaaatggatgatagtcgagaaggagaacttatggattgtgatggaaaatcagaatctagtcctgagcgggaagctgtggatgatgaaactaagggagtggaaggaacagatggtgtcaaaaagagaaaaaggaaaccatacagaccaggtatagtgcctgaggtagacatttcaatatcatcaacacttggttaattaaagaaaaatacaatactgaagacttcaattaaaattaaatattcaggcttcagaactgtctaaacaaaaatatgtgcacattaattaaagaactaaactatttgaatacgactttttagctctagagttctttattttgaatgtgtgaatacttcccatgaatcttat

SEQ ID NO: 14514 - DNA, 571 bp, Homo Sapiens
ttagcaaaatctacaaaaaatgagaccatcacaaaatttcgacagctgtgtatatttcctcgatgtattttttcagcaattaatgctgtttactgtgctcgttttgttgaattggaacatcaacagaaaactccaaatttttccacacttctttgctatgatcgagttttctctgacataatttacacagttgcaagctgtactgaaaatgaagccagtcgatacggaaggtttctttgctgcatgttagagactgtgaccaggtggcatagtgatagagccacatatgaaaaggaatgtggaaactatccaggattccttaccatattacgggcaactggatttgatggtggaaataaggctgatcaattagactatgaaaattttcgacatgttgtacataaatggcattacaaactaaccaaggcatcggtacattgccttgaaacaggcgaatatactcacatcaggaatatcttgattgtgctaacaaaaatacttccttggtacccaaaagttttgaatctgggtcaagctttggaaagaagagtacacaaaatctgccaagaag

SEQ ID NO: 14515 - DNA, 682 bp, Homo Sapiens
agggccgccgtggcacctgctcgccctagcccactgtaggagtcgggaggccgagacaggtcagggagggtgcctggctggctggggagggccgcgtggttgtgcatgaggctggtgctgcctgcgaggccgtcctcggggtggctgcctccaaccaggcctgcgtgccgcccgcccagtgacatggggccggtgaaacctgaggccagcgccccgtggccaggcagcagcgtgtgcatgtcgccggctgtgcccacggcgtggctgcggagcacgtggatggcctcgtccaggtggtcttctatcttactctgcaggccgtggagacccccgtcgtagctgggcgataaggcaccgggggctcctgctcgaggccactgtgacgttcctgccaggccctggggggagcccacgggggtagaagggctggacgagaagttattgcttgagtgatccggagagtagatccaggccagtgcctttgccgaggcatccccagagctgccaactggggtccatcgggagcccaagaagctgtccggcctcgctgacaggcagcgtgtggctggagacgcccgcgtacgtgacttccggggctgaggagaatgaagatgcagaatagagcccaccgtatacctcttgtgcatgcagcggggaggccgatacgctggtgctggtgagg

SEQ ID NO: 14516 - DNA, 780 bp, Homo Sapiens
cgcctctgcccgccagcccgctccaccgccgtagcgcccgagtgtcggggggcgcacccgagtcgggccatgaggccgggaaccgcgctacaggccgtgctgctggccgtgctgctggtggggctgcgggccgcgacgggtcgcctgctgagtgggcagccagtctgccggggagggacacagaggccttgttataaagtcatttacttccatgatacttctcgaagactgaactttgaggaagccaaagaagcctgcaggagggatggaggccagctagtcagcatcgagtctgaagatgaacagaaactgatagaaaagttcattgaaaacctcttgccatctgatggtgacttctggattgggctcaggaggcgtgaggagaaacaaagcaatagcacagcctgccaggacctttatgcttggactgatggcagcatatcacaatttaggaactggtatgtggatgagccgtcctgcggcagcgaggtctgcgtggtcatgtaccatcagccatcggcacccgctggcatcggaggcccctacatgttccagtggaatgatgaccggtgcaacattgaagaacaatttcatttgcaaatattctgatgagaaaccagcagttccttctagagaagctgaaggtgaggaaacagagctgacaaacacctgtacttccagaagaaacacaggaagaagatgccaaaaaacatttaaagaaagtagagaagctgccttgaatctggcctacatctaatcccagcattcccttctctcctc

SEQ ID NO: 14517 - DNA, 660 bp, Homo Sapiens
tacatatcagtttctgcaagccttgaaaatagggtgtgtgagtatgttgaccacctgcatgagcatttcaagtatcccgtgatgatccagcgggcttcctacatgcctccaaaggatcccggctactcaacagaaatgaaggaggaatctgtaaagaaacaccagtatccagatggtgaagtttggaagaaactccttcctgctcaagaaaattaagtgctcagccccaacaacttttttctttctgaagtgaaagggcttaaaatttcttggaaatagttttacaaaaatggatttaaaaaatcctaccgatcaagatgagttcagctagaagtcataccaccctcaggaatcagctaagtaattattacttgattcttttagcaaatcaatgcacgttatcctacttaatccttaaataagtttagatttaactaacccaaagtccaggaggatgttcttacaaaaatagctatatcaagggctggcacctagacattaaactgtaatttgaaaataagcaacatgttgcataacttgttggaataattccttgttctgtttaacacttgtcataaattagcagaataaaaatagtcgtgcaacaccgggggtatctggtatgcaacgaagggaaaaatatttcactgattaaccccg

SEQ ID NO: 14518 - DNA, 578 bp, Homo Sapiens
tttttttaaagcaggaaaggcacttcagggagagggaagaacttgtacaatgccccagaggtgggaggcggccttgtgacatttcaaaagagcataactccagtcacagagcggccgacactttaagggctggtggagattaaagtctcagcagggggagaggcgggctgccgtgctgggacttctgccaccacttgaagagttggtttgccccagccaagaagggtcaaggcctggcctcaaaagtcctcctgggccttcctggtcctccgcttccggtgccaatggtggaacctgctggggaacgtctctgaacagaactgcatccaagcctccctgaaattctgtccggcccgtggaactgggttgaactccacaaaatgttccgcctcgttgaaatggggccaaagaggcagagccttgctattggggtcccctgtccgggcaaagtgggtccactgggccatcatggtgaggcttagctgcttctcctcctctgtggcctctggaaaggccaggcgggagctctcgtccatgaggaagggacctccgaacacaaaagcaccctcggccccatg

SEQ ID NO: 14519 - DNA, 524 bp, Homo Sapiens
gcccccaaaggaggatttacagctccatcctaatggtgggaggtggtttgatgtttcataaagctcaagaatttcgtcagcacagaattctcaacaaaatgccaccatccttcaggcgaattattgaaaatgtggatgtgatcacaaggcctaaggacatggacccccggctgattgcatggaaaggaggggcagtgtgggcttgtttggatacaacacaggaactgtggatttatcagcgagagtggcagcgctttggtgtccgcatgttacgagagcgggctgcgtttgtgtggtgaatggggaggaaatgtcactgccgaagaccaaaaacaagcttcttggtataaaagactcttacagaatatgtgtattgtaatttattgatctggatgcttaagtgtcatggacagtaaatgaatttgaactttatgttgaggacatgacattggtttgaaaatataaactgcttttgagcagtttagtcagggcatttgagaataaataggaactttctcttcaaa

SEQ ID NO: 14520 - DNA, 449 bp, Homo Sapiens
actgtagcgatcttatgcggcgcctttctgcattgaaaggtaggatccacagcaatcccctcattctctatagggagtatgaaccactcctcttgtctctccaggcaggaggctgagttcaataacgtccatgggagaactcttgacttgtacccacatcctaaacgtcactggtgagtcaggcaatggcaattactcagttctccatataccctgggctgactgtctggaggtactgtggcaagagcgaacctccataacctgttacggtccaattggaccggtacttgtgctttagtccaactggctgttccctttaccctggcattccataagatacctgaaaattcacatggccaccaaaaccggagacatttaacaaattcctttaatcccaatatctacattgacacagtgagtccccaggggggggaaagggcaccgcaaaa

SEQ ID NO: 14521 - DNA, 419 bp, Homo Sapiens
gaggagtcgctcttgcggctgcctttcctggcagcgcgggcactgttttctggaatgtttctccttgtctgttagacttcgtgtccacatttaggaggacactggagaggaaccttcttggaggctgcgtagtttcttctatgggatcaaatgcctcctggcttttgtagggattactttaggagctgaattgtcagagggtttgacaaactagattgtagtttctttggtgatacgatttctccacattttcagtagtgacattctagcttcataacatgagttgggaaggtttctgcctcctgtttcctgaaatgtttatgtaggattagtattatttcttccgtaaatgtttgctagaattcaccagtaaggcaatctggatctggagttttctttgtggaaagggcaccgcaaaa

SEQ ID NO: 14522 - DNA, 659 bp, Homo Sapiens
gcttcaccccgagttgctgaggccggaattgggtccccctttgcagttgtcgctgctccttcaagggaatcccacagtctgtgcaagagcatgaggtcacctcccagacctcccacctaaacctgctgttggggttcatgaaacattggaaggcccggctgggctgtggcctggagatactgcccatggccctggagcagaacctgtcagacctgcagctgctttttattgttcccacggctgacagcgtggcaacggagactgtggaggcagtggagactgacttcttcctgctgacagctggatgtcacacatgaaggtctggcctagcgagtgatgggtctaggccctgaaactgatgtcctagcaataacctcttgatccctactcaccgagtgttgagcccaaggggggatttgtagaacaagcccccatgagaaacagctgttactctacacttttgatagcctatttctgatggcaagagatacatactctctccaaagagcatgagatgcagccattctttcagcaaagcttcattgacacctgcacctgttaactgtgttcgacattgaaggggagaaaggcaagatgtgcactcctggactccagaaactcttagttcacggggggaaatgagcagatacgtagatcat

SEQ ID NO: 14523 - DNA, 327 bp, Homo Sapiens
  misc_feature (327)..(327): n is a, c, g, or t
cccctggtatccccaacccttgtggtgtttagctaggaagtggaggttgctctaaggtagctctggtagcagactccagggagcacatggcaggcggactcatctgagtatctgtgctgaggagtttgtgttaaactgttgaaacacttagaaattgctatagaaaaagagtactcccaaagttgccagctaatatggtaccgaatttcctgaaagacctttcttttgccatgtggtttttctataaagctgagtcaattaggcttctttatctccctgtccttggcaataaaacgacaaaagccgagggttgaacaggtagacacn

SEQ ID NO: 14524 - DNA, 444 bp, Homo Sapiens
tgccccaggcatgttgtggccagccaatgtctcacagagagctggctgccttgagggcattcacctggcaccagtgtcagggcctcacccaagcttttgcaggggaaagcacagagggaggaattacactgaaaaaaatgcaagcataaggttgagtaccgaccaggtgccccttaggaaggaaccaggtttaaataggctctacccttacctttcccagcagcaagttcaggggaagaggcctactctttagccctggctgagtgtgaccctcttcctgtcctaagactttggtcctaccacctcttgtttcatctttcctttacattgctgggggttaaccgcaggtgcctaccaacagggaatcaccagtatgggccattaatagctctatctaaaactgacttctagatgaaggtttcattattgggggtgggataccag

SEQ ID NO: 14525 - DNA, 347 bp, Homo Sapiens
tattatctgtacatgctgagtgaacaaagcgggcactgatagcagctatgtaactctagttgattagagaacgcaactctcccagctccttttgggtattttagctcagggtcggtatctaatcccagcgtagcacacacctccatatagccgatccattatcatcgcaaggctccacagctcgaaagggtcgaggaacaccaccaacaaatatagttctacgggggctcaagtggctgtaaaccatccatcacaaagtcactgtcactgagattccaaggccgaactctggactggcttatccttgactagctggcgactcgggcgtggggataccagggggggta

SEQ ID NO: 14526 - DNA, 964 bp, Homo Sapiens
  misc_feature (819)..(819): n is a, c, g, or t
  misc_feature (830)..(830): n is a, c, g, or t
tggaagggccttgatggatcatgttcgtgaccagttcgctgttatagactaactcaagaggcaggttggccagcgagctcttttagacataagcatctttatcaaactgttgttgaagggtttgcttgttgtaaaatcttcgtccaccatgatactttgtccgagaagacatgacagatgtggccccgttgtatgtgtatctgggtgttttgttgttgtcagatactgaaaagcaaaatatgacaccaccaattatgcacagtgaggctcctgcccatccaataaacagagcggctcctaattcatactctttgctcaacaaagagaggatcaaagaattccgttgtgattttgtttgcatatagggaacatgccagtcattgagcacagccctgacagtatgaatacaagtcgccagccagaacaagcaagttttagctttggctttatcggagcctccgagctttggtacacgttcagttccaaagagcgcaaatatggaaccaaagaagcccaggctgacagcagcgatcataagtcctctacatgcctgtatataacctgctactttgaagatagtaaaatgcggtcggcaatggaaagaacccaacgcgttacctgcgcagttcatccacagaccctggtaaacccaagtggctgttatcaccgaggaggctcgcgtggtcactttccactcattggacgtggtagcagcaacgagagctccaaaccctccgacaccagacaccagagcccagatctgcgccctggacatgtcgcgccgccttctcacagtgacactgtaccggtcagaacgcntttggtggtcntaggcatgcagctcgatagagaacactttgacaagcgtcacagccagcggatgtgggtaggtgacagcgtttcatgctcggatggcctgaggaagtacaggaatttaggatcaagtatggttaccaatgacatt

SEQ ID NO: 14527 - DNA, 370 bp, Homo Sapiens
  misc_feature (38)..(38): n is a, c, g, or t
gtcccggtatccaccacgtgctgctggcatgaggtccngctgacttgctcagagttggaattagataatgaagcatgtaactgcatattcactttagctggctggtttacctgggaaggaaacgtcagaagtgaaactctggccagggaaatgtggatgcccagcctcatagcaatccagtcgtccagctggaagggacgagttggtggtgatgagccatcttcaaatgccctgaatatgctgggcaaagcattctcggcctcacttcacagcataagtgtcatgttctctatttaactgaagctcagaaatggacaatgacctgctaaaactaccacatgtagttagtggtgggtggggataccagggg

SEQ ID NO: 14528 - DNA, 483 bp, Homo Sapiens
gtaaagtcaagcaatctgattagcaccttggtccatgtccatattctgtattaacaagtcgtcaaaacactccttaaattttccaatctaagactatttcagcactctaaccgcagccaccaacacaaaatctatctatagcatcccacttaaaactgctaaatattccatatggatgaagattcaattttcttcctcctctccaagctaacgaacgcgtaggcgggaaaggggaattttactggccacctcagcaccctgttacatcttcaatcacgtgaagagaggtgcagatgagccagacagcacatgggagacgtggccttgcttaccaggaattatattcaggtgaaacgtgagtgatttaagctagaactgcccgaatccccaataaaggccgtctacttcatttagaaaaacaaggtaaaataatctgtaggaagtaaaatacagtcggtttcactaaaataaaccgatctcgag

SEQ ID NO: 14529 - DNA, 414 bp, Homo Sapiens
ttcgtaggttccctgtatccacctgaggagtcttaaatctaggacagagtaacctgttagaaatgtcttctctgcacataatataagctctaccaactgttaacgtcttttcatttatccaagtactgccaggtaccacaccacataacaaaaagactcagtccctcttccttcagatatctgaagctggtgatattctcctgggtcttctcttccccaggctaaacaaaaagacccagtggcgattgcctgactcaggtctgccaactgggaacaaggaagacagactgtcggatagaggggcagaagagaagaggatccaggagtagagtgacctccttcaaagaaaaaagagggagtccttagggaggactctgtggaattaggttggaggttgggtggggataccagggg

SEQ ID NO: 14530 - DNA, 347 bp, Homo Sapiens
aaagttgtcagttatggatttatatttttaacaataataagatattcaggataagtatagatttagaacttaaagatgttaaatcatgttaaaattattccaaataccaatatcaaagaaaactaagttggtaatctatctcagaaaatatatgaacttaagaaggaaaatagtatttatgatttgtagaattggttcaacttttgacttaatactgactttggactgaattcaaagttttcttgaaatttcacatctggactttttaaagtgtctacatttatattactttggggatcattttgtcaaagtcttgaataaagttacccagtcctggcatgataaac

SEQ ID NO: 14531 - DNA, 555 bp, Homo Sapiens
gcaaccctaatcttccttctccatctgggccctggggcgtcttccaccacccaggccggatgctttaaaaaaaattgctttttaaagtgtctgtcgttgaaagaaattagtcttacccttgaagtcaggggcgcgtcctcgcaatacacatcttgttagggaaagtgttcggctccagctagggttctacaaggcgtttcttgtacaccgccggagggaagcaggctccggagtgactgccttctgaaagtcggtcttgtaacaattggatggatgcctttgaagagcccctgtccctattctatgcttgaaaacagcgtgcagtcctaatgttcaagaaccacgaccacataaaaacattgctccccttctgctgctttgaaaacgacccctaaattccgtgtagaagttgccaggtcgtcttgacgtacacttcgtttgtatgatgtttgtctgtcaaatactgtgatggaagagtgtatgcgggggaggagcaggggaatttttaaaagcattttccggtcacctcagactgggagatcatgttctttcctg

SEQ ID NO: 14532 - DNA, 980 bp, Homo Sapiens
ttcattccccaatagacatcaaatgttaccctgtgctgtacccaacgggatttcatcttctgagaatgcaaactgcagaccccatatctttgaggatcctttcagtatcgactctggaaagaaaatgactacatcaactgaccatctcaaacgaggcacaattctggactgcaatacatgtaaatttgctaccatcacatgtaatctcacttcttctgacatcagccaagtcaatgtttcgcttatcttgtggaaaccaacttttataaaatcatatttttccagcttaaatcttactataaggggagaacttcggagtgaaaatgcatctctggttttaagtagcagcaatcaaaaaagagagcttgctattcaaatatccaaagatgggctaccgggcagagtgccattatgggtcatcctgctgagtgcttttgccggattgttgctgttaatgctgctcattttagcactgtggaagattggattcttcaaaagaccactgaaaaagaaaatggagaaatgaaatattttatgaaagaaaataataacaattattcaataatctatcctcaggtgggcctccaaatatgtggacaagaaatgtataattcacgacatagtcatgtaactatggtgaatccatcagggatccattacttggaaaatgacaggtcatgcattatccaaaaacaataccaaaaagacatatgtttataaaatgacaaaaaagattttacataaggactcatcttttgttgagtaagcaaaattacaaagtgtttttaaaagaacctgtacacatatctttatgtatgaaccaccaggccaaaatatttaaggaatatataaaaagattttctatgatcatagcaaacatctatgtttcacaaacaatataaacttaagcttcttccccttgactcctgttgatatccatgttcagcatgacagtcacactcgcaaatgtcgctggtcca

SEQ ID NO: 14533 - DNA, 724 bp, Homo Sapiens
  misc_feature (28)..(28): n is a, c, g, or t
gcgataggtgaatatgaccagcggtganaaaaagcaggctggtacagctccggattacccgggatatcgtcgacccacgcgttccgtaggagtcttgatctgtcgtcggcgggtcgctggcacaggactaaacatggctgaggctgggctccagccagatctggctggggacagcaccgcgtgggcccaggatccacccagagcaggcaggccttgctggggccccagtcaagtccacttccagtgaggagagccagccgggaggtcagtgccagagctctggtggagcccagaccctgccttccctgagggccgcccctgtcgccgccctggggtccctgtcctcctatcctgactcctgccccagggccaccacccctgaactgtgccctggggcccccaccctccacctggccgacttcagataagggccagtgtgtgtccctgaaggtcaggccagccggggaaggggtccatgctgcgaaaattcagcctgcaaaggctcctctccccacttaatcaggcccagaccaggtgggggttggcgctggcctgtgttgcaggggacaagggcccacccaggccttggaacataagctctgcccctgcacaccctcatgtcaccacacctgggatggagacatcaggtggcccagcgagagatggaggactgatcctggaacgtgaagcagctttcaataaaccagctcctggggaaaaaaaa

SEQ ID NO: 14534 - DNA, 779 bp, Homo Sapiens
ccagttcctgcttcttgaaacaaggcactctttcagagtttgttgtagtcagtgggaatgaggcctctcacaaacccaaatcactcactcatactcatagctgcctctttgcaatatgtggctctcacagcctggtctgcttataaacaaagttggtggcctgaatgacaagaattgcacaggataacgtgttctaatcttaggcgcttcaggcggagttggtacttctgctatacaggtaatgaaagcatgggatgctcatgtgacagcagtttgctcccaagatgccagtgaacttgtaaggaagcttggtgcagacgatgtaattgattacaaatctggaagtgtggaagagcagttgaaatccttaaaaccatttgattttatccttgataatgttggcggatccactgaaacatgggctccagattttctcaagaaatggtcaggagccacctatgtgactttggtgactcctttcctcctgaacatggaccgattgggcatagcagatggcatgttgcagacaggagtcactgtaggttcaaaggcattaaagcatttctggaaaggagtccattatcgctgggcatttttcatggccagtggcccatgtttagatgacattgcagaactggtggatgcgggaaagatccggccagttattgaacaaacctttcctttttctaaagttccagaagccttcctgaaggtggaaagaggacacgcacgaggaaagactgtaattaatgttgtttaaataaaaatgcagtttagtg

SEQ ID NO: 14535 - DNA, 518 bp, Homo Sapiens
gaggaatccccacagcactgggtttgactctgtaattaagctggtaaagtggaaaaataaaagtaggaaacctaagtggaaaccaaaccagaaagccaggcagcccgggagttctgagccctgcttccctccagctgtgcggcctcagcggctgacgcggtctctgctgctcttctataacacaggatgatggcagctacaccctctgagtggtgtcaccaaggccaatgagtccagatggttggagtgtgggtatccgggggcctctaggtcactacccacttctagccctttgctcctagtctctggggaggtggcagcataggggcatggagcagaccagactttgcctctttctgcccccaggccagttgatatgagccctgcttgaggggttcgcagggcctggggagccttcttcagcttctctttgttttcctaagatgaaaattgtgacatctgggcttgttgcgggaaatttgtaaattgtgcacagagaagaatatgaaattgcacat

SEQ ID NO: 14536 - DNA, 468 bp, Homo Sapiens
aatgaaagctggcagaattcgtagggagagctttcccatcctgccagccccatgtctggctttaagacagttctattagtgaattaactgttctcaaaaccccaaattaatttgaaccgaatgttactaaaaatgaaatagaataaagtgacctactcttgcctcatccggagttattacgaaggagctccgcagcctgactgagctctggagagcagggctctgtgcacacgcctcctggtccagaggcctccgtgaccatccatgatgccactctgtcccctcagcaagctgcctttttcttcctagcacctgccccagcggtggtatgttttccagtcagttaccacctgtctcatcagaatggaagctccatgagagcagggcctttgtcttgtccccttgtatctccagtgcataggacagtgctgacacagtgcagagtctaaataaacgctgttgaacgaa

SEQ ID NO: 14537 - DNA, 442 bp, Homo Sapiens
tccaaaaattcttttggattttattccaagtgtgatgggaagccttggggggttttaactagggaataatgtgatctggttcacattttcaaaagatcattctgctatatagaaaagtaatgaggcaacttatgaagcaggaagatccatttggaaggcatattatagtggcccactaggtgacagtagccaggaccaggatggtaacagaaaagctggagagaagcaacagcctcaggatgtcacatggagtgtaaccaaaagaacgttctggtgaacagatgacagctgtggtggtgggacagaagggataatgaatggggagtcatcaaggataactccacggttgtggcttgttccaacattgagaggtcaggggcaaccagggggggtcatagttttcgtgagagagatcaagagtttgacttgggatgaataaatt

SEQ ID NO: 14538 - DNA, 384 bp, Homo Sapiens
ctcatgctcttcagggtcagttcctatctggagttgaccaggcctaccccagttgccattcctgaaaaatctcagctgccaggctgcctttagggtccctgcagacccaggagagttgagagggtgggggacacagagagaatagagaggatgtgggaactgccagagggccggagcgcaggagttcaagtggaggaatgctggctttgagccctctacactgctggttgtatgaccttggacaagtcacttcacctctctgtgcctcagcatcctcatctataaatggggatctctgaaaccttcctaccctacctacctcacagggctgttgtgaggacccagggagtttggatgtggaagtaaaagtgctgctaaaaccta

SEQ ID NO: 14539 - DNA, 700 bp, Homo Sapiens
ggatgtcagctgttgattggctgtgacacagctttgtgtcatcttcttaccatgatcaaaggcgaaggaagggatctcttttgggacattgtgattgttttagcagagagagaaagagatgaaatacacttcggttttctcttaaaagatgcatgtatcatacgtgctttaagcaagtcatgtggccaagcctagcatcatggagccagaaagtatagccttgctggtctgtctacatcatgatgtataaattgatatatctacatgaattatagaaacttagaagtgatctttattcagtcttataatttttacatgaagaatcttaggcctaggaggagaaaatgattttaattctattacctaactagattggggcatatttctgataaagacccacctctagtgagattcatcttttttgtttgtgtgactatattccatagagaagagaagatgagatagctcaacttcattatataccaaagcaaaacacatgccaaatgatgactacattttaccaacatatttagacgagtattcttgactagtgtttactatctatacccccaaaactactactatatagacagaatggaaagtatttctatttgtcctttttttgttttctgttctaattgtcagggacataggtagtggctataggtttacttaaaaggaataaatttggaatgctcaa

SEQ ID NO: 14540 - DNA, 408 bp, Homo Sapiens
gtatcccaccccctgtgctcaggttagatctctgtcttgcacgaagagaaaaggcagttggtctcacagctgaaaaaccaaagggctgcatcccagatcaatgtcttgtggtgtgatggaagcggtcctatagctgcggggaacgcctcccatgctggaacagctctcccgggccctgaagaagtggcggggaataatacatcgactatgaggaggaagaaatggagaccgtaaaacagagcacgcagaggataaaggagttccggcaacttacagcagacatgcaagccctggagcagaagatccaggacagcagctgtgaggcctcctcagagctcagggagaatggagagtgccggtctgtggctgtgggtgccgaggagaacatgaacgacatcgtcgtgtacc

SEQ ID NO: 14541 - DNA, 494 bp, Homo Sapiens
tctggtatccccacccctaggaaacagcacccaggtactccaggcctcctggctggagagggctgtggcaatagaaaattagtgcacctgcagtgagtcagcctaggttacatagagagtgtaagagtgctggacaggaacctccaccctcatgtcacatttcttcaatgtgacccttctggcccctctcctcctgacagcggaaacaatgactgccccgatagggtgaggctggagggaagaatcagtcctgtccttggcaagctcttcactatgacagtaaaggctctctgcctgctgccaaagcctgtgactttctaacctggcctcacgctgggtaagcttaaggtagaggtgcaggattagcaagcccacctggctaccaggccgacagctacatcctccaactgaacctgatcaacgaagagggattcatgtgtctgtctcagttggttccaaatgaaaccagggagcaggggagttaggaatcgaac

SEQ ID NO: 14542 - DNA, 436 bp, Homo Sapiens
cgtggatgagaacgtcactcataggagcactgccatctgcacccaaatattcctacgatcctcatgaaataaatgctactcctattgttctctgcaacaacagagacagtctctcaaaacccaatccataacatactcatatttttcagaggccatctataaatctaacagatgggtcgggatggtttgatggcctatcctccctcccttatgtaactgtatctctctcttcctccactgtacctctcacagacattctctttagctgaactgcaggaatcctctctcactctgacagctgaggttccagagcagaccaggttgaacataaccacagcagaaagattctcaaggcccatccctgacttgctttaagccaccagacaatggaaaccccaaaggacatggagttacatcagtgacgtccctcagggta

SEQ ID NO: 14543 - DNA, 450 bp, Homo Sapiens
gaggaacgtcactagaggctgttcattctgctcaggaagtggcagcagtgcactgtaaaggaataccacaggggttctgatgaaactgcatggggaaatatgttatctgaccaaaaagctaaagaggcagccatctcaaaagacacctctgtggggactttactcccctctctccccagtgaactgcccttctccaatacactaaggaagaaatagatcgggccgcgaggaacaaacagcagatgcccttgccttccagtccaagaaactgcctcttgaaatggatttaacaacagccactcaccttttcctcctgagcctgctctctgatcagctggatcccaacgtgagcaacagctggcccaggaaaggctgcctccaagaggacaggtgtgtagaacgtgtcgagagccttgaagtgacgttccagtgacgttcctcatcccagtg

SEQ ID NO: 14544 - DNA, 912 bp, Homo Sapiens
  misc_feature (660)..(660): n is a, c, g, or t
  misc_feature (870)..(870): n is a, c, g, or t
ctggtattctctgccccctcaacactgctctccttactttcttgtcactgaggtgatctctgctatttgagtgacacattgaactctccactggatttggtcgcaataaaagcccagaggactcttggaatcctgattgcttactttacttggttgggtaatattcatattgggagagttatccaatttggggcctggtgatgacagagtagataaaagggaagtccccacaccttcactgatggcttgcagggcactgagagagctgctggaaaagctgtggttcccagtattgccagaagatgccatgggagagtgcacacctgcaacaggagaaaactgatgtgaggctatctttggactcccacgattacgaggagaaatcatgatattctgctggtttggggcaagaccaggactcccatgtggggggctactcatgttgagcccatagttgttgttctggtaggaagatggtgatggcatgcctggcccacgggtcaatgaagctatgttagctggaacccccatacctagctccactcatctgccctgtggtgctagggtctgccaagccataggccctgctgctcggcatctgtaagccttggtttggcgacatactcatgccgcctaccgaactgttgcatccagccatangatggtctaatcccttgtccaacaggatttgggtttggtctatatccattctgttctcgtctgaaggaagtgggttgagacaaagccatgtcgatcatttgttacaggatttcggaagagtttgctttttgtctgtgcagtcactatagttccatcagccaacgagaatcgatatactggggtttctgcatggccattaagataagcttncttgatagtgacgttcctcatccaaaagatcctctagagcac

SEQ ID NO: 14545 - DNA, 203 bp, Homo Sapiens
tgagggtgtggtggctgtggcagtttctcaaaatgaaccaacctctgctagcttcatacttttcttctgtagcttccttacctctctcagccttcacagaattaaaggcagtaaaagggacctgttctggattacacttcggcttaagggaatgttgtggctggtttgatcttctatccaggccactaaaactctctcctcat

SEQ ID NO: 14546 - DNA, 584 bp, Homo Sapiens
gtgactagaggacccgggatgaggaacgtcactatgacaggctattcagctagaaacagaccagatcattcattaccatggtgtagtaaagtccatgttaggtcttggtcagctgtctactgttatcactcaggtgaatggagtgcatgctaacaggtccgagtggacagatgaattaaacacgtacagagtggaagcagcttggaaattgtcacagtgggatttggtggaaaactatttggcagcagatggaaaatctacaacatggagtgtcagactgggacagctattattatcagccaaaaaaagagatatcacagctttttatgactcactgaaactagtgagagcagaacaaattgtacctctttcagctgcaagctttgaaagaggctcctaccaacgaggatatgaatatatcgtgagattgcacatgtcatgtgagtcggagcatagcatcaaaccacttttccagcattctccaggtgacagttctcaagaagattctctaaactgggtagctcgactagaaatgacccagaattcctacagagccaaggagcctatcctggctctccggagga

SEQ ID NO: 14547 - DNA, 272 bp, Homo Sapiens
atgagaggtggtgcctctctctcggccttgtgtgatagtccaggacagttgggcccgtggaattgtattaaatcagtggaaggagggtttactacacttagcttagcaaaatggcttacgtggttctcaaagtcatccccacatcacaagcatcagttaagccaggggtctgcaattttttctttaacagtctagagaataaatactttaggctttgtggccaagaacaaatgacatctatctggtagttatatataaagatcctctagatc

SEQ ID NO: 14548 - DNA, 470 bp, Homo Sapiens
gacatagacgatgaaggaaggcagggatgaaaacctggctgagtgggatgggtcggctggagcctgtgtggtgtcttcctgagcctagcatgctcacttttcctgcaaatggagctggaaacctgagccctgtcatggccaagtgctctatcgagagatctgagtgctaaacgaatccataggtcaagaaggaccccaactacccactacttattagctgatttgcagcaattagcttctcttcccataaggacatattttaaatggctgctagtcaatcttgtggccacctgaaaattctcaaaacaaccactgtcatcaaactcataacaagtaacaatttcacttttccaaagttcatgaagccatgaatgttatcaaataaagccagtactttaggggttttcttccagttttcttgttttgtatcttttttagacctctctcgcagccctctctctagtgacatt

SEQ ID NO: 14549 - DNA, 254 bp, Homo Sapiens
tcactgggatgaggaacgtcactgggatgaggaacgtcactggatgaagctccagcttcatgtctacccaaaccagctgctctcaacgaacgtctcatcatttcccgtaatctcaaacttcggctacttgatgatccagcccgattacctgggccattacttgaaacaactgatattgcatttgcaatggcctcaacagcagaaagcctttctgcaaatatacttcttgcagaacgctccgcttcctcataaaa

SEQ ID NO: 14550 - DNA, 782 bp, Homo Sapiens
ccagccctactcgggatgagtgctttacccgtcgggctccttaccccaactatgaccgggacatcttgaccattgacatcagtcgagtcacccccaacctcatgggccacctctgtggaaaccaaagagttctcaccaagcataaacatattcctgggctgatccacaacatgactgcccgctgctgtgacctgccatttccagaacaggcctgctgtgcagaggaggagaaattaaccttcatcaatgatctgtgtggtccccgacgtaacatctggcgagaccctgccctctgctgttacctgagtcctggggatgaacaggtcaactgcttcaacatcaattatctgaggaacgtggctctagtgtctggagacactgagaacgccaagggccagggggagcagggctcaactggaggaacaaatatcagctccacctctgagcccaaggaagaatgagtcaccccagagccctagagggtcagatggggggaaccccaccctgccccacccatctgaacactcattacactaaacacctcttggatttggtgtcctcattgtctatctaatgtctcacccgcagtgttttaagtggatcttggtgccctggcccaggagggcactggcgttttcagacacaccacagacaaacacaccctcctaagcctgcttgtatttccttcagtgcctggcccctgaggcccacggccctgcccccttcactgagcagatgttcacaggctgtgggatgcgaccataactaaacagcttgacgtc

SEQ ID NO: 14551 - DNA, 327 bp, Homo Sapiens
ccccagggcctgggggaggagacccttggaaaagtcctctcttcccagctcctgattctggatctgagattctcagatcacaggcccctgtgctccaggccgaggctgggctaccctcagggagatccagagactcatgcccatggccatccatgcgtggacgctgtgtggagagtccaggatgacgggatcccgcacaagctcccttcagtccttcagggctgggcagtgtggttgatttttctaaagctggagaaaggaagaattgtgccttgcatattacttgagcttaaactgacaacctggatgtaaataggagcctttcta

SEQ ID NO: 14552 - DNA, 739 bp, Homo Sapiens
ctttgtcatctgtgggaccctctatgtcgtctataacacccgtcctgccagtcgggcccgcatccagtgctcctttgatgccagcggcaccctgacccctgaacgggcagcactcccttattttccccgcagatatggtgcccatgccagcctccgctataacccccgagaacgccagctctatgcctgggatgatggctaccagattgtctacaagctggagatgaggaagaaagaggaggaggtttgaggagctagccttgttttttgcatctttctcactcccatacatttatattatatccccactaaatttcttgttcctcattcttcaaatgtgggccagttgtggctcaaatcctctatatttttagccaatggcaatcaaattctttcagctcctttgtttcatacggaactccagatcctgagtaatccttttagagcccgaagagtcaaaaccctcaatgttccctcctgctctcctgccccatgtcaacaaatttcaggctaaggatgccccagacccagggctctaaccttgtatgcgggcaggcccagggagcaggcagcagtgttcttcccctcagagtgacttggggagggagaaataggaggagacgtccagctctgtcctctcttcctcactcctcccttcagtgtcctgaggaacaggactttctccacattgttttgtattgcaacattttgcattaaaaggaaaatccactgctcaaaa

SEQ ID NO: 14553 - DNA, 531 bp, Homo Sapiens
cagacgctgctgctgctgaccgtcgtgttcggctttctctacggcgcgatgctctactacgagctgcagacgcagctgcggaaagccgaggcgctggcgctcaagtaccagcagcaccaggagtccctctccgcccagttacaagttgtatatgaacacagatcaagattagagaaatccttgcaaaaagaaagacttgaacataaaaaagcaaaggaagattttcttgtttataagttagaagcacaagaaacattaaataaaggaaggcaagattccaatagcagatacagtgcactgaatgtccaacatcagatgttgaaaagccaacacgaggagctaaagaaacagcacagtgacttggaagaggaacatcgcaaacaaggggaagacttcagtagaacatttaatgaccataagcaaaaatacttgctttgggatcttgttggatgcacttagatatggaaaatggaagccaaattttatctttaaagactgtattttcaaaataaaactttttcttgtttgttt

SEQ ID NO: 14554 - DNA, 686 bp, Homo Sapiens
  misc_feature (90)..(90): n is a, c, g, or t
gatttcttggtatttgacatgctccctttttcttcaattcggggaaaaagtgtgaaatgaagctacatgacctcacaaaaacctgttccngactctttctgcggcagaacactaggggcgccaggccgagttctttcttcggcacggagactcagtgagatggggctgggcagaggagctgggggtgggggaagatgggcagccgagaaaagaagtgagaccaaggcagaaaatgtgtccagaagacagccacagcctcatttagcccattctggactggggaccaccatagagaaattcagactcctaaaactaatggataacttgcaggagattggggtgggagagggtacaaagtcaccaccgaggcttagcatctattttatactctttactcaagagggacaaggtctgtgtagtatcagaaaggagaaggactggtatggagtgagcaaggaattggaatactggtatctgtgagcacatgcctccatgcctgaggcagaaacccttctatgccccagctggtgggcacagatgtgaataagacaagtgctgggtgacttttactttctgtgctcccatcttccaaaccagtcctctattgaccagaaatccatagtgttgagaatgctgatttgctcatgttttcaataataataaaataaaatacattcacacagaca

SEQ ID NO: 14555 - DNA, 780 bp, Homo Sapiens
tgttttggtacctcagcaatgaaccttttctagaaattattattccaaccactagaataccctagtcactattcccactttgagcattaacccctttgaaaagaaatggacttaaagtatctctgttttggcaaaattcaggttcaggggctggatggtatgtgttcctgctgccttattcaatccaccacttctctgtgaaacactctacctgctttttggtttgattctactgatgtcagggttcacccggctagaaggagtagcttcagtttgtcaattcaggagaaactgtactggtcagtcacatcttacgcgcgcaagggagcagggaccttaggggagcagcagcaagacaggcaaagttgtggactgtttgatcttgtattacccacaggaatgagggcagctaaacccatagaaggagttggaccaaggcgaattacgagtcctggtcccagcagtatgtgtgctgacttctgggtgccccagaaatagacctctcctgtagagtggtgatatacagaatgagtttcagtttgcattgcagctgggattgaaagtaatcagtcgtgagcaggcaggcaggaggtcctgttagccctgccttccaggaaggttggggtgggagttttgagtgggaaagaggatgacatgtgtgagagagttctgagcctgtttgctagggagagtgagtgagtgctcttgggcactgctcaggccgtttctgctgacttgcctgacttacaataaatgcccaataaatatttgttgggcata

SEQ ID NO: 14556 - DNA, 774 bp, Homo Sapiens
ccactgggtcccaggggccaggactccccgctgcttcagcgtccccagcacttgatggaccaagggcaaatgcggcattccttcagcgcaggccccgagctgctgcgacaggacaagaggccccgctcaggctccaccgggagctccctcagtgtctcggtgagagacgcagaagcacagatccaggcatggaccaacatggtgctaacagttctcaatcagattcagattctcccagaccagaccttcacggccctccagcccgcagtgttcccgtgcatcagtcagctgacctgtcacgtgaccgacatcagagttcgccaggctgcgagggagtggctgggcagggtgggccgtgtctatgacatcattgtgtagccgactcctgttctactctcccaccaaataacagtagtgagggttagagtcctgccaatacagctgttgcattttccccaccactagccccacttaaactactactactgtctcagagaacagtgtttcctaatgtaaaaagcctttccaaccactgatcagcattggggccatactaaggtttgtatctagatgacacaaacgatattctgattttgcacattattatagaagaatctataatccttgatatgtttctaactcttgaagtatatttcccagtgcttttgcttacagtgttgtccccaaatgggtcattttcaaggattactcatttgaaaacactatattgatccatttgatccatcatttaaaaaataaatcaattctaaggca

SEQ ID NO: 14557 - DNA, 952 bp, Homo Sapiens
ccagaacttgtgcagagaaaagaatgaagactggtggggaataattgaaaggttctgctcccccagcttaactatcattgtgaaggttaaaataaaagaagatatgaagctctagcataataaagaacacagcagaggctatatataaaaaagttaacataaaaatctgacaggtgaaggaatagaatatcctgggaaaagcaagaactacttactaaaacctttgtttttccacttggaatcatgcatacttatattgaactaataaagtattgctatgaacaaactagtagaatgaattattttaacttctcaagaccctgatatagagctatccattttgcattctaaaccctctccaggctaattgacaaaggataataccagaaatagatcaggagttaaattatagtcagaaaggggagagaagtaaggtaggacattaaaattttattctgaaattatctctggccacaacaataaaatttaacagatattcactaaacagtcttactcctgtcatcagctgtataatacatacagtatcatagaactggccactaggattaaaatccactagaacatatttaatgttaagtggcgacagcagcatctcacagaaatttttacatacatatatacacagtccacattcaaccattttcacatattttcagtacacacagttgcagcatattacagtcacgtgtctaagttgttgctcgataaaaacccaagccactgcctagacagaactgtagcagttgagctgagtataattacaattaattttatgtatgtccatagcagagagatgtacaagcccctaagaaacagagttcacaaatactttttttaatgctattacagcattatgttgggcaatattaaaacctttaccgagaccagatcagtttttttaaaaagtcttccgcctaccagacatattagg

SEQ ID NO: 14558 - DNA, 528 bp, Homo Sapiens
  misc_feature (53)..(80): n is a, c, g, or t
gacgccgccagctcgggctggtgccgttcccgccgccgccgccgcggacgccnnnnnnnnnnnnnnnnnnnnnnnnnnnngccgccgtagagccggcgcgcggctgggagagcggagacctggagttgtttgacttagtggaggaggtgcagctcaacttctaccagttcctcggggtgcagcaggatgcatcatctgcagacatcagaaaagcatatcgtaagctttcactaactttacatccagacaagaataaagatgaaaatgcagaaactcagtttagacaattggtggccatttatgaagttttaaaggatgatgaacgaaggcagaggtatgatgatattctgatcaatggacttccagattggcgacagcctgtattctactacaggcgggtgagaaaaatgagcaatgctgagctggcattactcttgttcattattctcacagtgggtcattatgctgtggtttggtcaatctacctggaaaaacaactggatgaactactaagtagaaaaaagagag

SEQ ID NO: 14559 - DNA, 430 bp, Homo Sapiens
gagagcatggagctttttcgctggtccggcgcggtctcttgcgttcctgtggcgggcacctgactccccatgcccgagtactgtcctcaggcggaacggcgtctgcagcgaggagcggggttccagcaggctcggctgacgcggtccctggcatttcccgtgctggccctgggtcgccctcgatgctgcttcccgctgggagcctccttctgacggcggaaaggagcttcacctggggcggccggcggggaacggagaaaaatccaccggggaagtggacggggctggctcccgggcctggcgctgcggctctcgggccgtcagacctcccgcgggttgcgtcactttcctcggttttctagacagcagttgtggggttgaatccttgccgtggttttgtaagaattaaatgagataatgaacgcgaaaa

SEQ ID NO: 14560 - DNA, 665 bp, Homo Sapiens
ggtgatctaccgatctttgatgaggaacgtcactatagccacccttattcatcagtgacctgtttcttcacgtggaggtcaactcagtaggtgagaataattagtaggttcagcagaataaactctttacaaattaataactcagtgggaaaatgatgttcagatggtgaaatgtggaaatgttttagaacaactctattttcagcctgtgcttctcactcaccatcctgttggggatttaaacagttgagggccatcgctgcctaaacatttagcgtgcggtttcccatcagttttaccgtgaatgtgaaaaggtgaaactggtgctgacttcggcagcaggtataactaaaattggaatgacacagaggagattagcatggccccctgcgcgaggaagatctgcagattcatgcagcattccatatatttttaagaaaaggttacactgtgcaccgacatgtggagctagaaggaaaagcttttaagtctcatgtttgctgactataaaaataaatcatagtaataatattgaacattctactttaaaaattattaataaaaccataaatgaaacacttgagcacactttaaaaagtacataaatccatgagtccatatggctatttttaggttgtctggtttattatccaggattcatactc

SEQ ID NO: 14561 - DNA, 320 bp, Homo Sapiens
  misc_feature (242)..(279): n is a, c, g, or t
catggctgatgataagaagggtccggcgagaaggaaggggtatgggcatgggcgctgagggacacctgaactctgaagaatcttgtgtcagggggactgagcagagatgtgggaggaggcaggaggaacgagtctctccccaccctccaggcgagtctggtgaataagcctgacatggacctgcttcttggcacttcctaaccatgtggtcttgggcttgtaaactaactctagctctacannnnnnnnnnnnnnnnnnnnnnnnnnnnnnnnnnnnnngggatggccggtgtggtgggtcatgcctattagcccagcat

SEQ ID NO: 14562 - DNA, 289 bp, Homo Sapiens
  misc_feature (52)..(52): n is a, c, g, or t
tgatcgatctaaggatccgtgcgagtgaatggctggggatgaactcacaggngtgtctaacactgtctttgcatagctgagtcagtttccgggagggagtctcaggaccagggggtgtttctcagcctgccaaaatgccaaatctgaaacatatctcaaaagaccagttacttaggtttaacaatacgtgatgttatctgtaggacgtagtcgggcgaagttatcgactcttgtgactcccttaatggctgacggcacgtaagcaactcaacttaccgacacaccaaca

SEQ ID NO: 14563 - DNA, 405 bp, Homo Sapiens
agggctgaatcagagcgtcgctcaaggtgaaaaaggcgtgtcacactggggagattggattagatgatgtgagcttgaaaaaagggcatgctctgaagaacgctaacaactccagaactaacaatgaactcctatgttgctctatcccctttttccaattctcatcttctctcctcttctcccttttatcaggcctaggagaagagtgggtcagtgggtcagaaggaagtctatttggtgacccaggtttttctggcctgcttttgtgcaatcccaatgaacagtgataccctccttgaaatacaggggcatcgcagacacatcaaagccatctgtgggtgttgccttccatcctgtgtctctctcaggaaggcattcagcatgcgtgagccattgcactccggg

SEQ ID NO: 14564 - DNA, 249 bp, Homo Sapiens
cataaatcacttatctatggtcctccttcctgacacctcagagcaatcaacatggttgatcacgccctctctccttgaagctctgcccttgatttctcctgcacaaccttgcctggttttcatgcttctttgtgcgctacaggcctacctcatttagcaatgccttgtcaagctcagtcaagtcctctcttccggtctctccttattcctcatcagtgtcagccatgcactacgagaggatcctctaga

SEQ ID NO: 14565 - DNA, 197 bp, Homo Sapiens
ctaaggatctctgtcgacttctgctctaggggtgactgcagtgagagcagggaggatggtcaggcgtcaccaacaaccccatcacccagtaacaagaaccttgactctcgtcagtccctctgcatcaagacacttacccatttcccacctcatgcctgctaacttgaatgaaacaatcgctgggaaagcattaagag

SEQ ID NO: 14566 - DNA, 405 bp, Homo Sapiens
tgatttggcttgagcccaggaggtcaagaactcaatgagccaccgtgcccgaccagttatcctacttctaacccttaggtaacttaagtatcctggatgttagtgactattttttctaaatgatatccaaatagctttattggcaagaatccacctctaggatgtccttcccgtattttgcttcatccttgaaactaacatcctaggagcaacacatgctgcctctttttaaaggggcctggaggcgtggggcagacccttgaaggaaggaaggagttggtgagctgagatggtgaatgagttgacattgtgggctatctttcagaatccgtttctgaatctatgtagctacttgattacagtttgggcttctcaccatgatcagagcagaaggtcgacgaggaa

SEQ ID NO: 14567 - DNA, 576 bp, Homo Sapiens
tcatctagaggatcctgtccgaccttctgctctggttaatttagccctaactctcatctgctggagagtcagctcccaaactgttctttcttgtaggcagaggatatgtgtgtgtgtattacatgcgactgtctagaggttcccatttcccaatagggtgggttgcctttccttgtccttaattaggcctaactgttccagagcagaggccatgatttagtggaccatgaatgattgagattttgcctgtgtactatcaatgccacttgaacccaagcattcactttaatacttactgagcatctcccatgtgcaaggtcctggaactacagggataagacagggtccatgccgtctcaaggcatttacggtttaaaaagacctttgtaattactaacgaaaacgcaaagcagaaagcagtctgtaataaagattaaaataatgccgtgggagcaaagaggaagggataatgaattctgattggggacagtgggaaaggctttatgcaagaagcaatgaggatggccttgacaaatgaggatttttggttttggaaaatggatgcagagaagtttt

SEQ ID NO: 14568 - DNA, 426 bp, Homo Sapiens
tatatcatgaaaaaagatttagagaattacaagagtttaggttaataggaaacacaaatcgaggtggaaatttaaaaacaaaggaatggaactcaactctccacagattgaacccacacaggtgtcactgtttactgaattagcaccacttttgtgcagtgaagacacccgtggctgagatttcttaaatctcactttttccatgcttttcttctgacaaactgaccacggagggagagctctcctcccccctccctatcccagactgctgctgctttcctgcaattctggtggtctttttgttgcctcatctgattgagactttggggaaacaacacagcagcaaaccaggacatatattccctctaaaaacagcttgaaaattacaacacaaagatctcaataattatgagatgcagtgatttt

SEQ ID NO: 14569 - DNA, 467 bp, Homo Sapiens
actacatgatgaatttggtattaaaataagacggagacacacataaaatggccacaacacacatttggtttctgaatccctgtttggggccaaactgaccctggctgtacaggcagccgctctggcacaggccgcatctgaggcaggaggcacagagccctcaggcaggggacacagccactgccgggccccatgggcccagggacaggggaggagggacagttggctccctgggaggaggagcaggggctggcaatccccaaagttccctactttaaaaacacgggtctagaaatgccttctcggcacacagtacagagtgcagcttagaaggtccgactcgttttctgttaaagtatgttctagtgggaaggggaggagcttgcactccacatcacgtgtttactgaaaaagccctgtggaagatttccatttggcatctgtgtagcagcatcttgggttaacaa

SEQ ID NO: 14570 - DNA, 595 bp, Homo Sapiens
attcctcttccccttggtagcagttccctgaccaagggcaaggtgtgtctcaggaaggtggttctgtgcatgcctgggtgtggttaaggcgtggcccagaaggcttccctggtgctctcagtccaggcaaagcccagagcatctgagcacgtctctgacttccagtggcaacacaagttgaacgtggtgaaacagggtgtagttcttttcccacattctgtgtcatctagtcgtgcaaggtagggaaaaagttggtctaattgaagattgtgcatttccttagtgacagatgccaagaggttatgatacgggtttcttgggtctgatgtacagtgtgaataaatgcttgcagctcttagctcttttttgatcgatgaagcacttttttattaatattttcctttgttaaaggaggaaccgtaactctccatagctgtacatataacccttttctcctaaagaggagtcaatcagtgctcctatatttttcattttttgtcaaagcaagaagtaaatactttagaattgttaaatatataaataaagcaaataaagttgagtgttccacatggtagcatttgctaacacttcctaa

SEQ ID NO: 14571 - DNA, 721 bp, Homo Sapiens
tctctgttcttcagaatggataatttctactgctccatccacaagttgtttccaagcctttactaaattcaacatctggacactcagacagtttctactgatgatgttcttcctcagtacgggtcacactgtcatacttctttgtattttagataatacatttgtagcaattctggattctaagttttccctttcgttgttaccaccgaggcctgtctggttgtccgtgaaatccatctccctcacagctcgtggccaccccgttccttcccacatgcctatataaattttcaaccttggctatcctaggggtcaccaccgtgtctgcacagcttagcaattagacagccactggaaaaacgctgggctcaaatacctcgagcacagtaaggcttccttggcccacggctgtgtgtggacagggagcacactgaacgttcaggcgtcattcgcatctgtggcggcttctattctctgccaggtcttcccttgaatttctaactttaacaataacattatcattctaataactatttatttcgttttagttgttctttcttagcaatctaatttagcactaaaaatgctttctctcgactttgtctccctgaggatactacatagaatacagaatttcctctgtcctgaattatctatctcctccacgagtccgggtattttttctctcaacctgctctttcgtcctcatttttcttcaggt

SEQ ID NO: 14572 - DNA, 639 bp, Homo Sapiens
  misc_feature (112)..(121): n is a, c, g, or t
ttacagcttacaaaacataattttatttaaatttgtatagataaaaatctaccaaaatttaaacaaaaattttatccaaatcctttcccacaacaaaattggacatcatggnnnnnnnnnncacattcaaataaggttcccatctttctaccataaactggtagatcctgggaggatgaggagtaagagagaaacgaggagagaagatactgataccaaacacaatttgatcttcagtgttgtctcatcttgaaatatcttaataacagagatttccataagaatcaggattcatttttgacacaaaaatggaagcttccactcccaaaatcacaaataaggcttctggttttctttttagtgtgaggtaaacagtatattcaatattaaggcaaatggtaaaaacacatggatggtatattaatgcagatattccattattaaatatattttggaatactcacggatttttcaaacatatgttagaattagaaacctgtaaaatctgcagcagtgtgtaatagctatttgtttgaatgtcttggcagtgcctttttagtagctaatgttcagtgtaatcttgtgcctttttagtaattaatatattaaatataatcttgtctgagttattaaaaaaaa

SEQ ID NO: 14573 - DNA, 308 bp, Homo Sapiens
cgcagcttttaggtttgtttgaataagagatctgacctgaccggcccaactgtacaactcttcaaggaaaattcgtatttgcagtgggaagaataagtaacattgatcaagatgaatgccatgctggagactcccgaactcccagccgtgtttgatggagtgaagctggctgcagtggctagctgtgctgtacgtgatcgtccggtgtttgaactctgaagagccccactagccccacctgacctctacttccaggactcggggctctcacgctttctgctcaagtcctgtcctcttctgatcaaaga

SEQ ID NO: 14574 - DNA, 408 bp, Homo Sapiens
cctccacaccctatatagacacttcctgaatgctagaacaatgaattcttgttttgagagagtctctgctattttctatctctgtaaatgttcttagcctgcctttccaccactcccacttaatccctgattcactgtctgatttgggctttctgctttacttccctcctaacatttttcatctttaattgtgatttacaaccctaatatcccaggcacatacaaaacttatgaattacccagcacaactgtgaaactctgtattgcttcttccggtccacaccctatactcatgacattaaataaaaggtagggatgataacagtggggtaaatattatcatcctgtttgactcatgaacatttaggaagtttaaggtggtgatcttctctttcaaacaaagataaa

SEQ ID NO: 14575 - DNA, 389 bp, Homo Sapiens
ccccgcgccgaccttctgctctgcgacgaccttctgctctgcgtcgaccgtctgctctgccctttcacctcctttcgctccccaggctactactccactccctcattcatgccttgctcatgccctttcccctgcccccagatgagtgagcagtttgccaggtacattgaccaacagatccagggtggcctgattggtggagcccctggagtggaaatgctggggcagcttcagcggcacctggaacccattatggtcctttctggtctggaactggccacaacttttgagcacttctatcagcattatatggcggaccgtctcctgagctttggttcgagctggctggagggggctgtgctagagcagaaggtcgacgggtaccgagc

SEQ ID NO: 14576 - DNA, 627 bp, Homo Sapiens
acgaccgtgtctacttctgctctattattgtcagctaatgtcttcattgtggaaggctgtcctgtatgctatagggtgttaagcagcattcctggcttctaccctctgcatagcaatagcacatctataccgccacttctaccctagttacaataaccaaaaatatctctagatattgcttaatatcctggtgaatgaggaagaatcgcccccagttgagagccacttgagtagagcagtctgggactgaaccctggggcacaccaacatttagaaaaatgacgaaccaacaaaggagcccaagaaggagtaactgaagtgagagttgaacaaagaacgtggcatcccagaagctaagggaaatgtttcaaggaggaggagagtgaaaacctgtcagtgttgcatttaagccaggcaagatgagaaacgaaaattgccctttgcatcatggaggtcattgatgacctggtcaggaattactgcagtagtcgtacaaaagcctcagtggagtgggttcaagagggaaagggaggagaggaatcgtgagtatagaatagcccttccaaggtgtattgctataagggaagcagagaaatcacatggtaaccagagagcaaaaggtcgacg

SEQ ID NO: 14577 - DNA, 469 bp, Homo Sapiens
attcaagtcatctgggatgtcatctgtggcccactggccattttcaaagtcaacatacactgcttttgaggggccattgtaatgaacaggtggtttcagtcttgctggttctggtctggcctcttgcctgttttctaactttatgacaggttcctgcccattctccactttttctgtggttaccatgttatttgaggcatttgatgtgggtatattacaggtgaggaactctgcgtttcttctggtctcagggattgcagctggagcggtttcaggaacactgttcgtatttctcttgatttgcattctctctcgcttcttgtctgtcaaatgccatatgggaaggggttgtcccgtgtctatagacatccccctgacattccctcgtcaattagcacagcatttatatctcgggaaaaagtaaggccaatatttttagccaaattcagagcagaaggtcggcgcgggt

SEQ ID NO: 14578 - DNA, 439 bp, Homo Sapiens
tttggtctggttaccacggtatcctgtgcgtgactggctcctgggtgacctgttatccggccttgagtgtggccatcatgcagcttccgcagggcttggcctacgccctcctggctggattgccccccgtgtttggcctctatagctccttctaccctgtcttcatctacttcctgtttggcacttcccggcacatctccgtggggacctttgctgtcatgtctgtgatggtgggcagtgtgacagaatccctggccccgcaggccttgaacgactccatgatcaatgagacagccagagatgctgcccgggtacaggtgggctccacactcagtgtcctggttggcctctaccaggtggggctgggcctgatccacttcaaaatcgtggtcacctacctgtcagaccctcttgtccgaggctatgcaggggtcctcaa

SEQ ID NO: 14579 - DNA, 384 bp, Homo Sapiens
  misc_feature (232)..(232): n is a, c, g, or t
  misc_feature (249)..(249): n is a, c, g, or t
caggactctctgaagtgaattcaaatggccattgatgagagctgtaggtcttcatgttcacaaaataaactgccattgatgtagtgaaaccgatctcccgggaccaggcgattcccggcaggtagagcatgtaaaacacttaagatgatacacattgccttgcgccctcatgacgagttcactcgcaggaatcgactgtccgcaagcgctgcaaggcaaccgttatttccanaataacctaaatgtacngtcatttctgcaaagggatcatgccacttttggtgtaacaggacgtgccgatgtcgcccagctgcgcctggcagcaggagcacttgaggcaccggctgtgccaatagctgtccatggcatagagcagaaggtcga

SEQ ID NO: 14580 - DNA, 254 bp, Homo Sapiens
atgaagtaccgaatttcgagctccggtatccactgggtgctggtcctgcatgggccaagaggcgcaagcttggctttgagagttccagcaacatccctgtgttgtgacgtctcctgcattcggccctaatctgcacgcactgccatggcctcggacagagcatggatgggagccagcctgctatgctggctcggtgggggggtctgctcgcagaggcaggtgccgggggatgagcacccatggatcctctagag

SEQ ID NO: 14581 - DNA, 201 bp, Homo Sapiens
atgggtgctcatccccctgtgtctctgtgatgacatctctgtgaattctcatcctctgtatgtgtgtgaaatacccagtgaatcgtaaatatacataagtattcttctagttccttcccaggccatctgcactccatgcttctgtgtgtcagaagtggagtttgtttcttgtaaggtcctgattacctgggttcacccctt

SEQ ID NO: 14582 - DNA, 349 bp, Homo Sapiens
ccggttatgataccacctctcatcgacaggtcacctggtgaagaaacaaacagtgacatggtaatcattggagaatcaacatcgtcatgttcctcccactacccttgaagatattgtagccaaggaaacagaaaccgatattgatagagagtatttcaacgacttcaagtccttcctgcttacacagccgaactaagaccacctcactggtggaagaccaaagaggccatttgcacctcaggctgctttctgacgccacagacctccagcaagcacaaatatttcaacctgcacattaatagtagatattattcgaggtcagcagaaaataagacaggtcgaatgagtg

SEQ ID NO: 14583 - DNA, 468 bp, Homo Sapiens
atctagaggatgcccccggaatagatggatctcgtggactttagatgacattattctctgaggactattgtggataacaagatgtgggtgaaagccatcctgcattcctgaccacaatatctctgtactcgtgtaggcactttcatgttcgcctcacgctgatacgcaatcgcttgtcaaacaggctggtctcttctgtcgtcaataaaaatcctttggctggcagtcactcctgtaacagatgtctgtatgtaggttgtcccattggctgttaatgcatccatgaacggagatgtacctttcccgttaacagctaagcctgtggccatggctgcagtcacagggccgggcacctgaggcactagtgggtgtatcctgggcctgctccccatcctggccctctcggcaccggggcccaataaagctccgaccggcttttccgctgccacttcgggtgccactgtgtcc

SEQ ID NO: 14584 - DNA, 490 bp, Homo Sapiens
gagggggagaattgttccttctgctttcctaggggactcttgagcttagaaactcatcgtacacttgaccttgagccttctatttgcctcatctataacatgaagtgctagcatcagatatttgagagctcttagctctgtacccgggtgcctggtttttggggagtcatccgcagagtcactcacccactgtgtttctggtgccaaggctcttgagggccccactctcatccctcctttccctaccagggactcggaggaaggcataggagatatttccaggcttacgaccctgggctcacgggtacctatttatatgctcagtgcagagcactgtggatgtgccaggaggggtagccctgttcaagagcaatttctgccctttgtaaattatttaagaaacctgctttgtcattttattagaaagaaaccagcatgtgactttcctagataacactgctttctcataataaagactatttgcatttga

SEQ ID NO: 14585 - DNA, 752 bp, Homo Sapiens
taatgagaagattagagaacagattaagaaatacaggcgccatttcctacgattttgtcacaacaacaaaaaagcccaacggtaccttcttcatggtttggagtgtgtggtagcaatgcatcaagctcagcttatctccaagattccacatatcttgaaggagatgtacgatgcagaccttttagaagaagaggtcatcatcagctggtcggaaaaggcctctaagaaatatgtctccaaagaacttgccaaagagattcgtgtcaaagcagaaccatttataaaatggttgaaggaggcagaggaagaatcttctggtggcgaagaagaagatgaagatgagaacattgaggtggtgtattcgaaggctgccagtgtaccgaaagttgagactgtaaagtcagacaacaaggatgacgacatcgatattgatgccatttaaagggatggatgcaacctagcttaacagtataatgctgcaaattttcctccattatcagccagaagtgcaacatgtatgtgcaaaagctaaaatggcttaacatcatgctacactttacactaaaaatctattactgtgagtggtctgttattaagcccaatgagacatctagggagtccatacacatcagtgagcagatgtagtttgcttatttatagcatgtttctttttgaaaaactagtggtggacacatttggatcacatttatacagttataaaaataaaggtttgattttggtcgttaaaaaaa

SEQ ID NO: 14586 - DNA, 477 bp, Homo Sapiens
cagtaacactaagaagtatagttaatgcatacacatgaagtgtgacaaaacttggcaaaaacactgcagaggaaagtttgattttttttaaccagcgaaaaatttatctcacttctaaagatcttatagatacttaaaaacaaaaatctcaaatctaaaacaataaccgataaagctttaaatgttgaattttaactctgaggatggggaaaaaatggatcttttctacataaagactcaattgttccctaatcttagagatggctattagagccaagtctgctgaaaacatcctgtttactctgcagagaaaaacaggcttggcgtaagcattttgctcagcatgcagacattttcattctgttttagagaagagtcaaatatggcagaatataaaaaatgaaattaaaaagtacacagcatctgaggtcaaaatggaatctggctgttaaccttacaaaaatcaccccctcaccc

SEQ ID NO: 14587 - DNA, 478 bp, Homo Sapiens
gatgtggagcccaaagaggctgaagatgatgatacaggacccgagaacgctcaccgcccaaagaagagaaaagaaaagatgtccggttctgcctccagtgagaaccgtgaaggaacactttcggattccacgggtagcgagaaggatgacctttatccgaacggttctggaaatggcagcgcggagagcagccacttctttgcatatctggtgactgcagccattcttgtggctgtcctctatatcgctcatcacaacaagcggaagatcattgcttttgtcctggaaggaaaaagatctaaagtcacccgggcgccaaaggccagtgactaccaacgtttggaccagaagtcctaacagaatggtatattcctctggaaaaagatgaacgtcaccaatggattgtgctgctctcgtttcagctttgatttttttgtccttgagaaccttgtcctccctgctgatttgtttctaaatc

SEQ ID NO: 14588 - DNA, 423 bp, Homo Sapiens
catttcccctctgcagctgcggacagcgtcaggggcagaggggcacacaactttccccagagcaccccaaggacactgtgatcaacccgagaatgttctgggttcaactcaagcatctcccttgcacctccagggtcctgcgtggactctgggttccatcccacctgctacatgctcaccaggtctccattgaggaagaacaggaacgccggttcccccaccagcttttgctgctccccttcctgctggggttccctgttttcgagccatgggaggcaggctgctcacgcctcctcactctctgtctgtccctcaccaacaccaaggcctccatctcactgtaaataagtctctgttctgtaaatagatgtacagaaagccatgttatttctttcatataataaacttttatgactctttaaa

SEQ ID NO: 14589 - DNA, 620 bp, Homo Sapiens
  misc_feature (144)..(210): n is a, c, g, or t
cctggcttgccaggtctcagtcctccccatggtctccatggtaggagtgcagctttctcccccagttactttccagctccgggctggctcaggacccgtgttcctcagtggccaggaacgttatgaagcatcagacctaacctnnnnnnnnnnnnnnnnnnnnnnnnnnnnnnnnnnnnnnnnnnnnnnnnnnnnnnnnnnnnnnnnnnntgcagatatatctctggaggagcaaagccctgtcaaacaagtcaaaaggctggtgccccagaagcaggcgagcgtggctaagaaaaaaaagctggaaaaagaagaagaggaaataagagccagcgttagagacaagagccctgtgaaaaaggccaaagccacagccagagccaagaagccaggattcaagaaatgaggagccacgccttggggggcacggtgcaaagtgggccttccctgggctgtgctgcaggcacagggtgcccctgtccagcccctccacctgtgtctgaatgcaacaggggtgttgcgggggcaacatgagagcccctcacccccaactctccactttcaggaggcccccagtgaagagccccacctcggggtcacaataaagttgcctggtcagg

SEQ ID NO: 14590 - DNA, 1073 bp, Homo Sapiens
catgagcgtattttaatttttaaaatttgaacaattcaagtaaaagtcagctagataacgataaatacagagaataatgcacataatttacagccatgtacataaatgcaagataccaaacctcacatgaatagtcaaaagttaacacttttgaggttcactatttagctatgactgataggtcataattcttcacataaacggggtacacattccaaaagtttataaacacaaaaactgagtcaaaccagaattttgttttctacaaggagtagcataaaaatcagtgtgtaggttaatgggaaatactaagttacatgatggagaagagaatctgagtgggcagaaagtttgtacattgtattgtatgtattaaaattcctcagatattttaatatcattcagaaatacctatattccttaggaatgtctacaagctcattatactacttcgaggagaaaaggctgaactgtacttatcagcctccaaagggggctccctaggattactaacaggtctgggcagaagagcatgtaacacaacaaaaggcggcatggacagcttattgaagggccaagaacactgtgatcgattttcacacaccttaaatccttcaaatccgaaatcaaatattccgagtagattgtcaaaaaccagcttaaccatgctgaaatgtctgtcaaccaatagtagaccaaacatttacttttacacaacacaaacttctgtggtcctaaccatagtaagtgcctattcgcagatgaatcactactatgaataatccgcgtgcctgacgtcaatgttgacacaattgcacctgagggttgagacccaatttatacgatgaatgggtacaccatgagcgacctaatgagcagacagacggattattgcacgatagaatctcagctggaatatcaaccccgcgaggtccatgatctgaaacagcggtctacagacttgccctgtgcgttagcgtcacagccaaatagtgctctcacagagccatattataacatagaatagacaaaagaccatatcatgtgtataaaaccactcacgcacatcgcac

SEQ ID NO: 14591 - DNA, 514 bp, Homo Sapiens
aattggttggttggtcacttgacaagaaaaaccatacttacctgggccaaggctctgttcctgccttcgcaaattctcaaaagagtaaagtttatgaaaagaaagtggcaggcaaacacaactcttgactgccctcccaccctcctacctgttcagtactcatctgattcagaagcatcacttcttggataactagcactggaaaaatgaaatcatctgtgtaagtgaagggactcatttttctttgctttcagcccatgtaaataaataatacagtattaacattttcgtgctgcttcccattagcttgtagattgagccatactctggctgcctctttgccttcctaggggcattttctttaacttccagaatagtgattttaaaagtaaaaataaaaataaaccttacttacaagcataacagattgtatttaactttatcacatatgatagagatatatatgctgtaaaatgagggaaaggaactttctaataaaccaatgatttgtgga

SEQ ID NO: 14592 - DNA, 458 bp, Homo Sapiens
aagaccttaagaagaaccaaatggagattttagcactgaaaaatactgtaagaaaatttaaatctcactgcataaatcagtaatagaatggatttgactaaggagtcagtgaacttgaagataggtaatacaaattatcctatctgaacaacagagagaaaaaaagattttaaaataatgtctgagggacctgtggggcaattataaaaggtctaacattggggccactggaagagaaggagaagaggaggagaaagtgcagtacagaagtctttaaagaaagtaatggctgaaaacttctcagatttggcaacaggcataaacctacagattcaaaaagctcagcagaccctaaataggataaacctaaagaattccatgcccaaacctataatcaaactgctgaaaagattaaaaaagaagtctcgaaagcagttggaaaaaaacaactcattgct

SEQ ID NO: 14593 - DNA, 491 bp, Homo Sapiens
tttgggatctgccacatggccatcgctgccccttgttgacacctcctttctgtgtgagttgtccccggccaataacaaagctgttccttgaaccagaacaaccagagtgcacttttccttccttagacggaagtagatcctggctagggtttctgcccaggcccttgttcccggcagtgtgactgtttacatggtttggcaataggtttgattctgattgcttcagagtggctggtctattttgtttcctttggtttccttcctccccaaattgtgacaggaaaaacagaccaaaaccaccctaggaaattgctggttgcctgtccccacgtgatgataaatgttgccctcttctggatatcgtttctctaccttacgaccaaacgcccgtcctatagagtgtctgattggatcctctgtcgcgtattctgatggtgcctgctggtttgacgtggagctatcctgtgaaataaaacagcttaacttttctc

SEQ ID NO: 14594 - DNA, 548 bp, Homo Sapiens
agttgtccttcagaaagtggagcagcagtgtgattagtaaaaacgatgggctttcctgcagctctggcttatggtctttgtttttccagttaacagctgttacttcatgctgttatagggggtggggggagaaagagaaagaatatgtctagtggcttaattttggggctcaatttgtttattatgtttttcctgcaaaagagtcaccagtcttgtcatggctcaatgcatattttaaaatgagtcaaagccaatttggaagctgctatcttaggttatttgtagtcaggcttcaaatggagagtgaaactttgactttgaaaactggtgctctatgctcaatgatggtcttacacattcctctagggaaaggtcaagaaataaatttggcttgattgtattctctcatttaccatataggaaatactatggtagaactgaaaatatgtacaatagtaaagtggtggctgagactgggcacttggaaaatagacttggattctaagtgtgaaactaattaaatacttttatgtgactggtagtaaaaa

SEQ ID NO: 14595 - DNA, 466 bp, Homo Sapiens
aacagttggacaagtttgccctagatcatggggtctttgtgctctgagaatgggcgagtttgggatggactcagctttctgttggttggccctggatctggatctggtgctgccccctttttctggagcacacaaagggaacaagaaggcctggacttgggcaaggaagccatccacagggctccccagaagccagggccaccaggagctcactgctgtgcagaggcaactcggcttggttatttcttgcctgaggcagggaacagggaatgcagggaagccaggcagcagcaggaggctccaaacgctggtgtcagcaagccagaacccccacctgacttcactcctgtctgcccagctcacagtcgcctgtaactggaagttccttggggcttgagactgctgaactttgggcccaaaaggtgtaagcccagatccattgggatgagccctggaagtccaaggc

SEQ ID NO: 14596 - DNA, 192 bp, Homo Sapiens
ccggaagattggacctcttctggctggtgaagttttcctcgtaccaccctcagcacttcggcatagcagggctcaaagcccacctcccctgccaggcaaaggtgcacaggggtaaggtgagaacgacgctgggggaaggggacactctctgaggcaggctgctggagacaatgtgggaacacgacaggaaga

SEQ ID NO: 14597 - DNA, 393 bp, Homo Sapiens
tctcatttcttaatttattaacaatgtatacatttgaaaaaatatatacaatatttcaaaacaagcccttcaagactatatttaagcaatgacatccaaggaagcagaactcaggtaccatgtaatatttggaaaatatggtaacttgaagattaagatttctcttccttgctggttactctgaagtctccaatatacaaaggttgctcctaacgtggttttcttattgagccaagcatcttgatgggtcaatcccagtttcattttctccagtactacaaaaattaaaaagaaataaacagaaaataatttacttaattattcacaaagataaacaatagtctatagttttaaaaaagactactaataaaataaaaagtgcattaattagtt

SEQ ID NO: 14598 - DNA, 430 bp, Homo Sapiens
  misc_feature (54)..(161): n is a, c, g, or t
ctgcttgtctgcctcgcctcctgagtagctgggactacaggcacgcgccacatnnnnnnnnnnnnnnnnnnnnnnnnnnnnnnnnnnnnnnnnnnnnnnnnnnnnnnnnnnnnnnnnnnnnnnnnnnnnnnnnnnnnnnnnnnnnnnnnnnnnnnnnnnnntgagccactatgcccggcctgcaattattttaaaaagtagttcttcccaggttgcttttccctccacagtattaaacagtcattttaaatgttggtgctgtcacttagcaaacgatgaagtagagataaagtgaagctgtgaggctctaataggccttccacaggggagcccgagatacagcaggaagtcccagcggccttgcctccggagcacagcttcataaaaccagctcagactctttcaaacaagctgaggctcctttgatctc

SEQ ID NO: 14599 - DNA, 207 bp, Homo Sapiens
ggaggtactttgctagtctgttttgagtttcagtacataagaataatttttaaaatcttgctaattatatattacttcaaagtcacaaatccctttctaagaatgacttacttcacgagatatttagcactatcattttcccagatgttcatattatttctgcaataaattaaaagggagtgtgtcaaatgctgtcatgtctgaaaa

SEQ ID NO: 14600 - DNA, 435 bp, Homo Sapiens
ctgcttgtcctgcctctggggtatctgtacaatccctctgttatgtactcaagaaatggtacacacttctatccatctctctgaacacacacttcctcattgaggcagggagagacaccccagactggcggatggctgagcccgctgtgtatttacatattcccccaaggagacagacagagggcggtggaccgaaccacagacagattcgtagggatctggctccagaaaggagtcggtctctggcctgccctgcccgcctgctctttttcccaaacaaacggatcagacgaataaacgctcataaatacctctgggcttagataagagcgatgaggcgctattttctttcatgcccgactccaggcgcccaggcccgcctgtagtggctccatctccagacaagcaacctgcagaggccggtgctcggactat

SEQ ID NO: 14601 - DNA, 480 bp, Homo Sapiens
tgttttgttttatagtatttaagtgaaattttaaatgcacagtttctatttgctattctgaaactaattcatttaatttaagttatatttgtaaaagctaaggctcgagttaaaacaatgaagtgttttacaatgatttgtaaaggactatttataactaatatggttttgttttcaatgaattaagaaagattaaatatatctttgtaaattattttatgtcatagtttaattggtctaccaagtaagacatctcaaatacagtagtataatgtatgaattttgtaagtataagaaattttattagacattctcttactttttgtaaatgctgtaaatatttcataaattaacaaagtgtcactccataaaaagaaagctaatactaatagcctaaaagattttgtgaaatttcatgaaaactttttaatggcaataatgactaaagacctgctgtaataaatgtattaactgaaacct

SEQ ID NO: 14602 - DNA, 360 bp, Homo Sapiens
ggtagtggccctctccagcaccctaaggacagtgcgttgaaccccaggccagtcagcccagcgggaagagctgagaagggaccagaggccagtgagggaggaaagacccacagtcctgcagggctgcaggagacacccctaagggctggctcctccagacctgcaggagaacaggaaggagagaggcaggagacgtgagcctgcaacagagctgactcaggcaggggcaggatcctcccggtcaaggggaggagaggaagggctcctcagaagggggaagtagcgtcagtaaaggagaggcggggacgggatggaggctcttctgaagcaagcagcagatccatgctggaagggtagggt

SEQ ID NO: 14603 - DNA, 908 bp, Homo Sapiens
gcagacacacatgccctgtgtgatggctgtgtgaagtattttcagcagtgcccaatgtgcaggcagtttgttcaggaatcttttgcactttgcagtcaaaaagagcaagataaagacaaaccgaagactctttgaagacatcgtaacactgaaaagtacactttctactaaagatgcagaaattgatgatcttggaattcatcataacatggaatctacagtactgaccatcaatgaaaattatattttaacttcatatttgtatggtacttggatgataaaaattaattattcctttctgcttagtgaatgaatactggaatccatctgtgttgatacataaaaattcattcaactcttgaaaagaatctaagagtttggccttttattagctagatttcctctcatgttaattagaaaaatcattctgaaaggcaatccattgaaaatttgaggaggttaaattcttaagatcactaaatgttttacctttgatgtaatcggagtgcaattaagaaaaaacttaattctacttaaagtaattgtgtgttccctagtttatacaaaggagttggaatgagcttctttagatcttttcctgaaataacagcttttataaatatccatctgtttggtttctaatgtcccttattatagttacgtaaatacaggtcatagttttaaatataggttcttaaatcataaatacaagatataattcttgactgttctccgtgtattataaaatgatactcatctataggaggcagatatataaaattcggataataagatttttcggataattaaatttattaaattgatagtcaagtgtgattagattagcagaatgtgatctccagggaagatctgtgagacctttaatgccttaccttagatttctgcct

SEQ ID NO: 14604 - DNA, 682 bp, Homo Sapiens
  misc_feature (334)..(449): n is a, c, g, or t
ggatccccctggtaaaaagaacagcccacatgaggaaaactgatttggtggaaagacaacaaaaacaaaacatgggaaataggtaaggtgataatatgggggagaggttttgcttgtgtttcaccaggagaaaatcagcttcctgtttggatacccactagacatttgaagttctataatgaacccatcagagatgcaaatgaaagtgcctccgcagagacagaaaacccgcaatcgagcatcatcgactcgcagggtgaacaaaatggtgatatcagaagaacagatgaagttgccaaccaccaagaaaacgacacatgtggagagccagggnnnnnnnnnnnnnnnnnnnnnnnnnnnnnnnnnnnnnnnnnnnnnnnnnnnnnnnnnnnnnnnnnnnnnnnnnnnnnnnnnnnnnnnnnnnnnnnnnnnnnnnnnnnnnnnnnnnntaaaaggtgcgagtgagcaggtgaggagaaagactgaaaacgatgagaaacagcaactaagacacaaaggaagtgggagactgcccgggtgccgcagcacccacaccgtcctcttgcccccgtcacttgggttaaaaccaccggaaactccactattgcaaattttgtattaatccttgtatgtctgtcctttctattgttagtctacaggtgtatccagcagctccagagag

SEQ ID NO: 14605 - DNA, 375 bp, Homo Sapiens
tgaatttgtgacaaaagtgtactataccattcacttcttagtgtcatagttggggcatgtctaaattgtttaatttgaacagtgtgttcagacgcaagacaaattcgcgcttgcatttttgttgaaaccgtctctggctttggatcccaccacccgcaagaatcctaaacctaacgtttgataacaaaacgaaggagaacccttgggaaccccaaaaatggtcaatttaaaataacagatggtacataatcctaaaggaagactagtgacctataattaggcctagaaccctaatcaaacccgtattaccgatccaaattaaaacctggtagaatctaatacattgactgcaattaaaatgtttgcctggaaatt

SEQ ID NO: 14606 - DNA, 317 bp, Homo Sapiens
tgggccatactccatcctttgtttctgtatagtatgagtataaggtggatcagcacgccccaatccagattctggaggtctcacaatatccaaaatgttatttggcacaaatccagagtctccacttgcatttcgaactttccaccattgcttccgatcatcaagtatctctaaaatatcatcctttagaaccgagagctcactgttgttccttgctacaaagtcatacttgggatttggcatatttcttgggttgtgttttgagtggttcataatttctatcatatggcgattagaagttggcttaaaagcaacag

SEQ ID NO: 14607 - DNA, 611 bp, Homo Sapiens
gaggtcagacctggaccgggatagtttctctggtagcttccaaccaatggcgtgaatacagcccacctgttctctctacatcctcagaccagggtcttagtgggggtcccaagaagaacaccccacttccttgccctctcagtgcaggcacagattcaggtaatgcattcttgttggaccttaggatctccgtctctatgatatctcactgaacaggaaaatgaatcagaatccacattctagacagccagatgctgacagatctgggatacgagccactgttctggatcatcagccaggaacacaacactttgaatcaccaatcgagaaagtcaagattctggaatgcaaaataagaaccccctaactttctagcagatttcatcagtagctccacatcctagaatgactgtgttacaaaccaaccagaaatctgacgattctaggttgtcaactaagaacccagtattctggcagaccaaatgagaaccactcctaacaatctgaagggctaacaaggagttcatgcattctggaagaataaacagaatcacaagtattccagataatgggtgagacttaaagttctaaatgtcaaccccaacgactca

SEQ ID NO: 14608 - DNA, 464 bp, Homo Sapiens
  misc_feature (415)..(415): n is a, c, g, or t
tcagcatccatgacaagtgacagtggctcagctctattagcaaagaactgaccaacttgttgatctgtattcacctgtttgccttttgtgtctgtgcagttgacatggtttggtagtgatgtggaacaagcatcctgttagttttccactgtacccagtctgcctaaatgtaatagaaaataattaaaaaagccaagtagtgcctgcagcttttctgcgctcataaatgcagtcatgaggctcagggtgcaattagcagcctccaagtgtctctggaaacctgagtgtgtcagcgtcttcttgctgacggtaatcagacctcatggctgcagtcagaatgcagagggcccggagtaatgataccgacctacatgtagtgaacaaattactggaaaaggggctcaggctcctaggncctggtgtgtaatgcctgtgctccactggagactgcctgcaaaatggcc

SEQ ID NO: 14609 - DNA, 541 bp, Homo Sapiens
tgcagcaacgggcagctcagcgtcccccaccccaggagccccgcagaacagaaaggaggccaaccctacacccctgaagcctggcgcgtcctccctgagccaactgggtgcatacctggacagtgacgacagcaacggcagcaactgagccctcccagtgaccccctcacggggtcaaagtcacacgtccagcttcagccacattgaggccagcattgctggtggtcagggcaggaggccttggcgtgactggaggccggacagacaagcgccagcgtgctccaacacatagggccaccaggggcctcagccccaggaggtcccttctctgtgccctcaccagcctctcaacacctcggggacccctgctgctcctgcccccacctgtcactgtgcttagggctgcaacatccctggagcagcttccaacactacttcagggtggcagtgtttggggcactgggcgagcctgccggcctctagatggcctcatctcttccttccacaaactgtctagaaccaataaaaggaaacctgccat

SEQ ID NO: 14610 - DNA, 917 bp, Homo Sapiens
ccacgcgtccgatttgataatgtatttaaactctatcccatttcaggatctcaaaactttgtaacagttacatattgtacttctaagacttagatttgtttttcttcttgtgtcttacctttttgcagtaatatttttattttcctatcatcatgtcctcattttttccctctcttctctttccctgttaattttgaaagttttgctgcctacgtgtttgaaaacttctaatctgcctctcttccctcagtgccagcaggtttattttttgttttgcaagccagctctgcctccttacagtatgacatctgatgctggagggtcgcactttcaaaaatgagtcagctggtacatggggttatcatcaatttttagctcttctgtctgggagatacaagtttggaagcaatcttggggtacttacccacaaggctggtggagaccagatcaggagaacctcagtctgacgacattgaagctagccgaatgaagcgagcagctgcaaagcatctaatagaacgctactaccaccagttaactgagggctgtggaaatgaagcctgcacgaatgagttttgtgcttcctgtccaacttttcttcgtatggataataatgcagcagctattaaagccctcgagctttataagattaatgcaaaactctgtgatcctcatccctccaagaaaggagcaagctcagcttaccttgagaactcgaaaggtgcccccaacaactcctgctctgagataaaaatgaacaagaaaggcgctagaattgattttaaagatgtgacttacttaacagaagagaaggtatatgaaattcttgaattatgtagagaaagagaggattattcccctataatccgcgttattggaagagtttctttctagtgctgaggcattggtacagagct

SEQ ID NO: 14611 - DNA, 499 bp, Homo Sapiens
agatcatcccacatccttagcactacttaaccttcttttcctgaagattacatatcagtgtcctgcgtttttatctgatattagagctgaggttcctaggaaaattttgaagtggggaagattatggagaaaatgaaatggaaatttggggagggtggtttgtcagtataaggccctgtggggtaatcatattttagttattacttgttaaaagggtaacagaacctctgtttctttaccaagtcgctggttggccatttctccaattgatgaactaccattggttttagctctttctcatttgggattcccctcaattgcttacatgattctggtacttagagtctaatagagttgctgtgaatatgtagtgctgtacataatggcagttttgtaaatgtgagataaccttgaatatgttgtggtttgtatacagagccattagtattgttattttggccacttttttattcaaaataaataacataattatttgtaa

SEQ ID NO: 14612 - DNA, 1546 bp, Homo Sapiens
  misc_feature (179)..(188): n is a, c, g, or t
ctttgagaaaagacatttatccaacatctccaactgtggacaaataaatattcgttcttgttttttaaattactaccaaaatattttatctttctacaaacaacaaaaaacaagcaaacagtttctagaaattttttttcctttgacaagaatgtcaagtctttgaagttacactaaannnnnnnnnncctgaataaggtcactataatcttaggttaaagttacagtaagcagttcaagcaaaatgcatattgcttaggttttaagcaagcaattttgatactgtttaattaaaatgtaaatataaatgtgaaactattatagaaatatttataaacacttaggaatactcatgtatcagcaagtaatgaaataacttatttaaaaataataaaagggtgagagtaaatgtaatgtttggtaacaaatccaaaatatctataagagatgtaaaagaacatgaaaaggctttattattcaaattttgaaaacctagcagcaaaacaatttgcatataatatagtgcaatgagcatttgttcataaaagactcccaaagtcttgaaacgattatacataaaccagaatggaatccattaggataaataatttaaagatgtccagagtagcttaccaagaactgctagacactctcacctgcattactgaatcataaacaagcttatgcaaaactgtgttctggataactgactcttatggctccccaataacaagctcggataaggcagatcaatcctaggagataagcaattgcccaagaaacataggttgctcgaaatcgccttgcaaaatctggggtgccaacagttaacccaactccaatgaaaatacatatcattccaatggtaatatatgcaaagcagcgtcttccgtggaagttgcactaccccactgaggagattttttggcagtgtgggcattgtgccagagttgttgaacctcagttccatgccacaggaatgtgtttccacagtgcccacacacgacccgtgtaaccttctggttggattggcaatgcaggctgagctggttgttcttcagaaataagcattactgggccaaggttaattatccgtctacagttgggtcttgggcatcctattcgccgagatgtgtccttacaaatgagaagacaatttacaagggcatctaacatagttcttgcctgttggggggtttttgattggcgtagcttcattgcaaactgtgcacttaaccacatgctggtgaagcttgccatccaaattgattagtgattggcacacacggcagtttattactggaataccactggcgtctggactggcaatggctgtatatggaggtgggagctccgcatctggggctgctttcttgcaagtacggtgggcgcggtgggagtgacatttccggagtgggatgctgacagcagaggcgagcgttctgtccaccccatcagcagccatgactgcggcagcggcggggcctggggaggccgagccggggttgcggcctcggcggagtggtggctactgctgctgcctcgt

SEQ ID NO: 14613 - DNA, 374 bp, Homo Sapiens
gacgggctcttcggctgctcctgactttacccccacctggccctccagaacgaactgtccttcatgccaatctggctgcctgtcagttgttgctagggcagcctcagttggcagcccagagctgtgaccgggtgttggagcgggagcctggccatttaaaggccttataccgaatggggggttgcccaggctgcccttgggaacctggaaaaagcaactgctgacctcaagaaggtgctggcgatagatcccaaaaaccgggcagcccaggaggaactggggaaggtggtcattcaggggaagaaccaggatgcagggctggctcagggtctgcgcaagatgtttggctgattaaaagttaaaccttaaaagag

SEQ ID NO: 14614 - DNA, 1613 bp, Homo Sapiens
gtaaaggcgccatgagcaagatcagcgaggccgtgaagcgcgcccgcgccgcttcagctcgggcaggacccgtccgctgcagttccggatccagcagctggaggcgctgcagcgcctgatccaggagcaggagcaggagctggtgggcgcgctggccgcagacctgcacaagaatgaatggaacgcctactatgaggaggtggtgtacgtcctagaggagatcgagtacatgatccagaagctccctgagtgggccgcggatgagcccgtggagaagacgccccagactcagcaggacgagctctacatccactcggagccactgggcgtggtcctcgtcattggcacctggaactaccccttcaacctcaccatccagcccatggtgggcgccatcgctgcagggaacgcagtggtcctcaagccctcggagctgagtgagaacattggcgagcctgctggctaccatcatcccccagtacctggacaaggatctgtacccagtaatcaatgggggtgtccctgagaccacggagctgctcaaggagaggttcgaccatatcctgtacacgggcagcacgggggtggggaacgatcatcatgacggctgctgacaagcacctgacccctgtcacgctggagctgggagggaagagtccctgctacgtggacaagaactgtgacctggacgtggcttgccgacgcatcgcctgggggaaattcatgaacagtggccagacctgcgtggccccagactacatcctctgtgacccctcgatccagaaccaaattgtggagaagctcaagaagtcactgaaagagttctacggggaagatgctaagaaatcccgggactatggaagaatcattagtgcccggcacttccagagggtgatgggcctgattgagggccagaaggtggcttatgggggcaccggggatgccgccactcgctacatagccccctaccatcctcacggacgtggacccccagtccgcggcgatgcaagaggagatcttcgggcctgtgctgcccatcgtgtgcgtgcgcagcctggaggaggccatccagttcatcaaccagcgtgagaagcccctggccctctacatgttctccagcaacgacaaggtgacttaagaagatgattgcagagacatccagtggtggggtggcaggccaacgatgtcatcgtccacatcaccttgcactctctgcccttcgggggcgtggggaacagcggcatgggatcctaccatggcaagaagagcttcgagactttctctcaccgccgctcttgcctggtgaggcctctgatgaatgatgaaggcctgaaggtcagataccccccgagcccggccaagatgacccagcactgaggaggggttgctccgcctggcctggccatactgtgtcccatcggagtgcggaccaccctcactggctctcctggccctgggagaatcgctcctgcagccccagcccagccccactcctctgctgacctgctgacctgtgcacaccccactcccacatgggcccaggcctcaccattccaagtctccacccctttctagaccaataaagagacaaatacaattttctaactcagcaa

SEQ ID NO: 14615 - DNA, 485 bp, Homo Sapiens
actgattaacaaataaattggaatttaaaaatatcgatatcaccatgatttaatccagatctgggattatgtagctaaacattgtgatgattattatttaaaaccattatttaataagagtaaaaatatgtgaatctggatatatttaaaaaaagaaatttgatgcccagataatatattaggcactactgattttttagttaaattgatgcactacacttttgatgtttgaagttacaaacctgtaatttttttgtaaaggaaataattgccaaatacctaggcccattgctgacgattagttctaaaatcttattcctcctcttctcccctcacttttccctacttcctctgcaaaaagatttaacaaatacattcataaggaaatgtgtgttgtaacaaatatattgcaaaaacatagtttgtaaaggcattctataagctatttatgtaaaatcaataaaagttgatcataattaaactgt

SEQ ID NO: 14616 - DNA, 436 bp, Homo Sapiens
gtctcgtgcagaggcactaaggagctgagttacctcttaatctgggggaatggataataagtggagtacagttatgttaaaggatgttccccccgctcaaaaaaaagtttcaatgtttgttttgcccagtcaaaaatataggtcttttctacatataagaacagtcaccagaaattttcccttttgctaaatgcttaggtatttgctatagctgtttctgatgtcatggattctgaggaagtgtcatttacgtgatgatcttcctttattgatgtcttcatcatgttcagtgttttaaaaatataaattacaaacactctacaaccatacccagatttacttattttatcagaaaaaaaacttgagaaatttgtagatcaaattgagagacaataagtgtacattgttgaataaaaaattttaaagtttcaaaaaa

SEQ ID NO: 14617 - DNA, 537 bp, Homo Sapiens
taccttctagaatacagattgtccttggagaaaagcaaccacacaagaatcaccctcagtgactactgggccccactcaaaaggagggcagcttacactcacagcaagatcctgttgcaacccggagaatcccaggatttctaaagtaaaggacctaagaaagcatctggttgttgacataggattaaccaaagaacatagtctatacttttgggtctttgatttgtactaggcagagtctttgtacctgttcttttaagcaggtaattcacaagtaggcagaacctaaattgtcaagtgggaattttgaaaaaactttactcaagtgcctcggcttcagactaagaattaatttcatcatggagagcagtttagctgcacctttctctggggtttatctcacttaattcaccaaactttacttgttccaaaaaccgtaaagtctttgtttgaaaggcatttcatcaagatgtatgatatgctctttttattcctagtggcagcaatacaaataaattaaacgtttataacttgaaa

SEQ ID NO: 14618 - DNA, 558 bp, Homo Sapiens
ttgaaggagaaaggctttaataatattaaaaataggcaaggtaatgcttttcatagtatagtaagatttgcctaataccatcttatttctttgattaaaagttacttagcttcagcatgcgtgtacattcaaaatacaaaattaaagcatgagttgtcattaatttgcagaattctatgattgaagcctctaaatgaattgtgcaaaaaagggagtttgtaaacaactgactacagacattcacattgggtcatctttaaaaagctggactctgcttttggatgcttctcggaggcgagttggattttggactgaagtactgtcgttccattcctttttttgaggtgttaaaagtggggctataacatcgccatcctgcggcttggtgaaatttctgtctgcacaccactgaacaaaatattgtcttgcggcatacaaactctttctgtccaccttcttacaatatactcgaatccgctgctctgcaaatttctccgggagaagttgtgaaacctggtttttagtaatcctggattgctctgtagggggcagcctacc

SEQ ID NO: 14619 - DNA, 430 bp, Homo Sapiens
agaaggggccaggtggcctggcgagaaaactaacttgggaattcgtttttgggaggctccagaaacgaggagtcactgggttctgggatcccctgggatgattgactgggtgaagggtcagtggccctggggcccctgctactctgtacactccctcaggccctgaccaccatccctccattcccccctgcctaggcactagccctcatgttgtcaccaatggtgtccgtggtggctttgcccaagggtgcccaatgtctcctgggagcctggctttgatggtggttatctgcagagattcagtgtctggtacaccccactgtgagtgacctgctcctgccatttctctgtccaatcttgcctcctttcctctcctccttgaacctaactgcctgctgccctttctctctcctgcaaggatcctctagag

SEQ ID NO: 14620 - DNA, 537 bp, Homo Sapiens
ttttcctgatttgggtgaaagtggttctagaaactgcactgaatagtagtaaagcaataaggcccaattcatcccacagcactgatcatcttttaatatcccaccctaagcgaacggtaagaaggcctctcttaagaaggggagacagatggtccttaactactcaatgacagaggcagttactgtgagagacttctaggaatctttttcttctcatagcgaagtcaaagctctctctgaatgtactgtgtgatgatgcatcatgcatgaaccttcgggcagggatatcattggtgaagtgatttcaaaaagtattcaaaatttgagatgctgtttagtcactacagtgccctcaaagggcagaagttgcagccttttttatattgcctgccaaaatatgaagtattagaagaaagtgttgccatgagggaagaacttaagggagtttagaaaagtaatgcgatgacgcaactgtaacactatgtttaaaaggatagtgtcctgggtgaaattactgttgcttcttttacgccagaa

SEQ ID NO: 14621 - DNA, 330 bp, Homo Sapiens
  misc_feature (276)..(277): n is a, c, g, or t
ttgcaggagagagaactggattgagctggcacagacgcaaggagggaaaaggggtcctgagtaacatgttcacagagaatgaaggagaaggccctggggcccaccaagctgccagccacagccccgggcggcttgttcaagaagcatccgcagaactgtaggggaagaacttggcggccttgcttgggggtgaaggggtttgggcactccgcctcctcgctcagcttgaagaacatctcctgctcccgctttcttcgtggttcagatttcctcttnnccagagccttctttgcgcggcccgaagctttgtcccggccaattccttttcag

SEQ ID NO: 14622 - DNA, 437 bp, Homo Sapiens
cgaccgctgacgatggaagaactggagcaaggcctgttgatgcagccatgggcgtggctacagcttgcagagaactccctcgttgcccaaggtttgttatcgaccaagcagggctatgccttgtttggtttcagatctttcaacaggtgtggcatgaacaggtggacactagtgtggtcagccagcgagccaaggagctgaacaagcggctcactgctcctcctgcagctttcctctgtcatttggataatctccttcgcccattgttgaaggacgctgctcaccctagcgaagctaccttctcctgtgattgtgtggcagatgcactgattctacgggtgcgaagtgagctctctggcctccccttctattggaacttccactgcatgctagctagtccttccctggtctcccaacatttgattcgtcctctgatg

SEQ ID NO: 14623 - DNA, 371 bp, Homo Sapiens
atgttgctcagttactcaaatggtactgtattgtttatattgtaccccaaataacatcgtctgtactttctgttttctgtattgtatttgtgcaggattctttaggctttatcagtgtaatctctgccttttaagatatgtacagaaaatgtccatataaatttccattgaagtcgaatgatactgagaagcctgtaaagaggagaaaaaaacataagctgtgtttccccataagtttttttaaattgtatattgtatttgtagtaatattccaaaagaatgtaaataggaaatagaagagtgatgcttatgttaagtcctaacactacagtagaagaatggaagcagtgcaaataaattacatttttccc

SEQ ID NO: 14624 - DNA, 680 bp, Homo Sapiens
taattagatatatcaaggatctattttgggagacctttcatcgggtgttacgggaagtcctgaaagttaagacactgggggtactttttccctctaaactaaaaaagacatttgctgaattataactagttagttatcacctcgtcccttaaagtcagtgacctcctgtgtttgatgtatattacatagagtcttaagtcagtgtacagttccactggaatttgacagttgtctctacagtcatgcaactcgaagtagaaaagagtgctggacataggaagggggtgcttggtttgaggggttaatgtgaggcctttttgaaaaatgaatattttgataaaaagaattcttgttttagcacagttgatgcacataagtgattctcatatttgttgtataaactggtttaatacatttggaacatagttggattacattcatttcctgggaaagctagcttaccatacattcaagtttataaaacaactttccataggcaaagccatttaaaaagttcattctgaaattatttcatttacctacagtgaaataattgtgaactaagtagtctttctgaaaactgttgggttctaggcattcctgagaaattgaaagtggctacctttcatgtcaaaaatgttgatctattataaataaaatgtttttgcatatgtttttga

SEQ ID NO: 14625 - DNA, 336 bp, Homo Sapiens
  misc_feature (237)..(237): n is a, c, g, or t
gaggtatgcctgcaccagggtatgcctgcaccaggtcattcatgttgactgccaccgtggacttggtctcctgctgggcccgcttcatgcggtcgtgcagcaccttgaagaagcgctctgacttcttgtcactcatcatcaggttgtggaaggatttctctcagccactgctcagccctctcctctttcacaccctcctcggccttcagtgcccaactcaagcccacctcctccaanaagggagggaccaaaggagccatgtcctgccccagccccccacacctgatctctgtgtccaccatcagcagtgatgccagccatgcttctgagtctctc

SEQ ID NO: 14626 - DNA, 721 bp, Homo Sapiens
  misc_feature (42)..(42): n is a, c, g, or t
  misc_feature (93)..(93): n is a, c, g, or t
  misc_feature (336)..(336): n is a, c, g, or t
ccaagccagagaggcccgccgatgaagctgagcgccaaacanctcatgggtcatcgaagactgtctgtgaaccctgaagacagaagccactcnattgcaggatcctttcctctctgccattcctggctggagctgtgtccacttcaaaaaaaaggagcactctgaggacacgtttccccacctgatggctcccgtgtctgctgactgagggcattcaggagtaaatgcacaggtcggtccaggcccgtctgggtttgggatgcactgagttggaggttatgaaagctttgatcctcttcttcctctgctgggcctcgcagcattcccaagggtcancatgccctggcatgggcagaaactgggctaatgattctttgcccacttcacccctcgtgtctctctttgttgctaagttctttccctcttggaaggacagatctgccgggctgctatttatagcgtcctttggcctttcactgctctgcgatttggcaggaaataaggcgattaaccctatgtgtccacaagcctcaagccttgtttcaggtcaccctcaaatcacactctctttaggcaaaacaggaaacttcttaagtgacaaattttaatgccagacatttaaggagaggattattgttgattccatttactcatgcttgcaaaactagagacccctaaggcagaactgagaataaacatgtttactttgggccaaaaaaaa

SEQ ID NO: 14627 - DNA, 403 bp, Homo Sapiens
  misc_feature (362)..(362): n is a, c, g, or t
atgtgaccgcgcctctgggtctccagggtatgtagtcctgcatgggtcagctgggcagccagctggctggcaaggggtttcatctctgtgcctttagcatcccatgaagactacccaggacaccacagtcctcattctgtcagggagcaggagttcgggtgctaacctctaagtggaggaggagcagtttcttacagcagccatctgcacaggccattctcttgagtacctactgtgtgtgtggaactattgagctaggcctggggaagtggtgcactctgaagctgagaacctggattggctctaaacgaggattacgagaagctactgctgaaggagctgtatagcagggcagtgtctcnaggtcccaacctatcaagatgcaggagcaaacgggtgctcc

SEQ ID NO: 14628 - DNA, 678 bp, Homo Sapiens
tcacaaattgtaaatattattgaaattgattgcaaatttagatcacatacaaatgagagtctgacattcaactgttttcctatattccaaagtaaacaattcctttcaacactcaagacttaaacaggtattcttagagggttatatgaattgctatcagaagctgttggctaacaagccagtaatttggttctttcaccagaacacagttccagataagcatctttgcactatttctcaagtatgaatccccatgtggggggaaaacggatatactttcaatagacacaagtcactctttgccttccaagtaagcagactccagattcatcttcaaagtgttgggaaaggggatctgtgacctgtacattatcatataacttcaaaaaggaaagctccttagtccaaaaagcctagatgctgaggtatagcccttgaaatgttttcttccctgtgaattttctagcaatttgaggttttagctaagatgggcatttatccaattttggcaataatgagatttttacacatttatacctttttaggcagcttgggaattcagaactacttatgaaagctctcaggttgaggcagcaccatcagacccagaaagggttcccagtattacttctgctttcgggtcttacaggctgagtgggttttctcacgccgggtaca

SEQ ID NO: 14629 - DNA, 364 bp, Homo Sapiens
  misc_feature (110)..(110): n is a, c, g, or t
gggtgcgcctgaggaccctcaccaggacagatcgatcaccaggaccacatcaatgtcagtctcaccagtatcaaccgacttggaacacttgtttctcaagatcttttcanatagctttgtaggttttaaggtcttcttcaaaactttttattttgtctgtatccgctaacattatataattagagatgggtgcccttgcccttcctttaaattgaacataggatcgatatactgtggcgcaaatcaaaacgaaaccaccaagttgcattttggtatattcaacaccctcttctacaatacttgttgcaataagcaggttgggctccatgtgctcgaaatttcctaaatacctctttcctgggta

SEQ ID NO: 14630 - DNA, 533 bp, Homo Sapiens
cgttatagagaaaatcaatgagaaagaccctgacaacaagaacctctgtgtccagatttttgactggtttgactaccatggccacatgtgtatctcctttgagcttctgggccttagcaccttcgatttcctcaaagacaacaactacctgccctaccccatccaccaagtgcgccacatggccttccagctgtgccaggctgtcaagttcctccatgataacaagctgaaacatacagacctcaagcctgaaaatattctgtttgtgaattcagactatgagctcacctacaacctagagaagaagcgagatgagcgcagtgtgaagagcacagctgtgcgggtggtagactttggcagtgccacctttgaccatgagcaccatagcaccattgtctccactcgccattaccgagcaccagaagtcatccttgagttggagctggtcacagccttgtgatgtgtggagtataggcagcatcatctttgaatacaatatcggacttcaccctcttccagacccatgacaaaag

SEQ ID NO: 14631 - DNA, 176 bp, Homo Sapiens
gcggccgcccgcccgcctgccagtctgtgagcggccaactttcgccgagagccgcccagcctccagtgcgggtccccgcgggagcgggcgggactcacttagcccgccaggggcgcggcttgcggggcgcagcgggcggcgggaggaacgccaagcgcccagccgcccccaaacta

SEQ ID NO: 14632 - DNA, 263 bp, Homo Sapiens
tgatgcctattggccagaaggaaagcgtgtggcaatggaggaccgatatcgtgcagactttccccggccagaccaccgctttcacgacttcgatcatcgagaccggggccagtaccaggaccacgccatcgacaggcgggagggttcgaggccaatgatgggagaccaccgggatgggcaggtgagtagagccccgatgccaagtcctggggccactgtactgctgtgcaggcatagcggaccatttctagccaggcggccgc

SEQ ID NO: 14633 - DNA, 1006 bp, Homo Sapiens
gtgcacggccccgggatggtaggtgcacacgctgccctgctacatgtcacagccgtagtccgtgaagaagcgcacggagtcagcccgggcctgggtcagggtgcaggggcagtccggcaactcctccaggaagttgggcagctgatcctccagctcctcccaggcctggcactgagttcgtgcccaggccacagggtcctctcggaagtcatcgctcaggtgccaggccagtgcgtggtcgttggtccagagcgcctgcacgtccttctgccctgcgtaatttttgctgtcgatgatccgaagtgcacccactcgccatctctggtagctgggaggagcaggttttggggtgaaagtgaaagagccggagttggggatgtgtgtggccagggggtacaggtacgaccactttgcagtccactcctgtgagtagggcattcctgtctcctcgtagccccacagttcgatggtgatggtctgcgtgggcagcgacttgacatgccaggtcaggctgaggttgcctgaggtgttggcggtgccgtagtattgccaacgcgtctcgttcaccaactcgctcttctccatcattgacactttgttggggtgcacagccagccaggtgcccgcacgagggaaggagtggccgttgtccagtgacacagtgaaggggatgcggccgctctcatagagcagaggtgacacacagtgcacttgcccggaggagtccacatgtccgagggtctggatgctgtccttaaacctgcagatcacactggcgtctgtgggactggacatcttgaagtgccgcaccacaaagtccttgccgcccatcatggatcctgagtagggcaatatctccaggcagaagtcccggaaatccaagcagcaggtgccaaggccagagcacgtcgggtggcaggaacatggcccgtccagggcgccacagcgcatggagcagctctcttgggcatctgctgtgggtccggggcccgggcgcgtctgtgag

SEQ ID NO: 14634 - DNA, 1034 bp, Homo Sapiens
  misc_feature (122)..(185): n is a, c, g, or t
acggacgcgtgtatccgcaggccggtgtaaaagagtgtgctggtacatagatggtgatagtagacagaaggggaatgtacctcgaagaaccacgaagtaaaacgttcaatggacggtcacannnnnnnnnnnnnnnnnnnnnnnnnnnnnnnnnnnnnnnnnnnnnnnnnnnnnnnnnnnnnnnnactcaagcaatcctcccatctccgcctcccaagtagctggaactacagaaactggaagagaagttccggctgaacaggcgagaactgattgactttgaatccccggtgttagtggccttggaattcgccctccacttgcccgagcacgaagtcatgccccactacagacggctggtccagagtacctagcactggccccgaggacagccaagggccatttcttctcagcttggtggagcagcacttacttactactggaaatgaaaaaaagtagaactcagaataccagacttttcttcctctcgacatagtttggggagaagcagtactagaaactttccaaggagtcttgggtgtgtagccaagaggagccatgagctatggactcctcaagcacgggaagaggaggtgtgtgctgagaacagagaggccctgccctctgtccactagcgagaatccctagctgccccagcccagtctttctccccggcattcacaaactttgcaagcgtggtccagggccttctccagatctgttccaacttggagtgtgaagggcttgagcatacgggggaagagagtctgcagaagttgggggaaaacttttaaaagataccctcattgtgtcaaagagtgtgccaatctatttctgtatcagcatcggaagtgcactttcccctggggcgtgtgggtgtgtgaatgtgcaagtgtctgagagatactgcatcagccctagacccccagagccagtcccgcccttcacagagcagcccttagcctggggccatgggtcaggctgaccttcaacaatcatctctagatgacttctggctcagaatcgctctctac

SEQ ID NO: 14635 - DNA, 387 bp, Homo Sapiens
gtaaccacctcaagtttctgatgaacattctgcatccatatacaccctgtgacagtcagcagtctgctattaagtggcctacttcaaggctttgaatcaacttaagggaaaaccttttgtctttgtaaaaataaaagcctgtagctaaggtttacagtggacattagccagatcattttcttcttagattatgccataatctcctttgattcttatggaagttctaacaatatatggtggttccaacacctgcagtgagtttaatgactgacttagtagcaggtacaagaagcaaacttgttaatatagattatttttgtattcttactttaggtattttcttgagcattttccatgactgtaaataaagccattttttaagataat

SEQ ID NO: 14636 - DNA, 992 bp, Homo Sapiens
  misc_feature (32)..(32): n is a, c, g, or t
ccccgccgccaacatgaactaaggactacagnttgtcaaaaaagcaggcgtattttaaacgaacggcagtactatacggtctaaggtaacgaggctgggtggcgaaatcggcacgatggtgaggcgctgagacggtatggcggtgagttctgggcaggcgcagctgaaaggcccgcaaccgggaaacgtcaaaacaagcggaaggacttggtgattcctggagcagtcgcccctatctgctggtcctgcagttgctcgaccgccaccgaccccgcgcgtaggactgggcactgaatggcctctaggccttagctgcgggcccgcggagccaggacgtgttgctgccgtgagtaaaacgagcgccctctccgcactcgtttacaaattaaaatggaggaaatttcgttggccaacctggatactaacaagctagaggccatcgctcaggagatttacgtagacctgatagaggattcttgtttgggattctgctttgaggtgcaccgggcagtcaagtgtggctacttctacctggagttcgcagagactggtagcgtgaaggattttggcattcagccagtggaagacaaaggagcgtgccgcctcccgctttgctcccttcccggagaacctgggaatgggcctgatcagcagctgcagcgctcacctccggaattccagtagctgcaaaatgagagtctgaaagtggccaggacaataacatagactggtcctgtggcttcgaggagtaagctaagtagaaaaaagtagaaaaatcagacaaaacgttttaattcccccttgaagatcctagcatttaaaacaccccaagtggataatttaggaatccttttcttaaagtggtattaccctggagcaagctcctgaaggccctggggcagggaggaagctgcccgcctgcggggccatgcagtggcctgttgaatctctataacacccgggatgttgcgccagattcctggtatgccccg

SEQ ID NO: 14637 - DNA, 1140 bp, Homo Sapiens
tgcaggcttgtactggtccggaattcttttggattgcagctgccgaagtcagttccttgtggagccggagctgggcgcggattcgccgaggcaccgaggcactcagaggaggcgccatgtcagaaccggctggggatgtccgtcagaacccatgcggcagcaaggcctgccgccgcctcttcggcccagtggacagcgagcagctgagccgcgactgtgatgcgctaatggcgggctgcatccaggaggcccgtgagcgatggaacttcgactttgtcaccgagacaccactggagggtgacttcgcctgggagcgtgtgcggggccttggcctgcccaagctctaccttcccacggggccccggcgaggccgggatgagttgggaggaggcaggcggcctggcacctcacctgctctgctgcaggggacagcagaggaagaccatgtggacctgtcactgtcttgtacccttgtgcctcgctcaggggagcaggctgaagggtccccaggtggacctggagactctcagggtcgaaaacggcggcagaccagcatgacagatttctaccactccaaacgccggctgatcttctccaagaggaagccctaatccgcccacaggaagcctgcagtcctggaagcgcgagggcctcaaaggcccgctctacatcttctgccttagtctcagtttgtgtgtcttaattattatttgtgttttaatttaaacacctcctcatgtacataccctggccgccccctgcccccccagcctctggcattagaattatttaaacaaaaaactaggcgggttgaatgagaggttcctaagagtgctgggcattttaattttatgaaatactatttaaagcctcctcatcccgtgttctccttttcctctctcccgacgttggtggcccgcttctgccaggtattcctcgttccccaatggttccgctgggttggatccctccgtgagcgggtgtcggtccttcccttggcgtgccacgcgcgatctaaatcacccccctccgtgcccctccggaactgatcgctctgacatggagacgtacgagtcgctttgcaggcccccgcatggcaacaccagctggggtcccgacctcaatggtgggagcgacccg

SEQ ID NO: 14638 - DNA, 441 bp, Homo Sapiens
aggagtggggcagcccccatggaggcctgcaggaggtggaggcactgtcagggtctgtccacagtgggtctgtgccaggtctcccgccggtggaaactgttggcttccatggcagcaggaagcggagtcgagaccacttccggaacaagagccagcagccccgaggacccaggtgctgaggtctgagagggagatggcccagcctgaccccactggccactgccatcctgctgccttcccagtggggctggtcagggggcagcctggccactgcctagctggaatgggaggaagcctgcaggtggcaccggtggccctggctgcagttctgggcagcatcctcccaagcagagaccttgctgaagctcctggggtgtggggtgtgggctggaagcactggctccctggtagggacaataaaggttttgggtctttctgaga

SEQ ID NO: 14639 - DNA, 628 bp, Homo Sapiens
aggatagaactgtttccattcaccaactaatttttttgtagctgaatcagacatcttgaatgcctgtcctgtgagagtgccatctagtccaaatgggcataagataacgtgaaatgggctattagactgttgagcaagggtgatatgctcttcactgagaaggtatacaggttgatgttggttaatttccacactggtacaaacattgctgtctccatgcaagaaaaaggtgaaggagcaggacaagtgttcacttttatttataggttgttcatctgtttcataaggctttacaaaccacttgccaatacgtacaaaattcctgttcattaaacaccgttccaatagattgtgaactgctgtgaaaagcagagtacggcattcataggaaagtccattctcccacactccatcttcttcttctgataagtcatggtgaataaggtcagcaaaactggggtcttcaccccaccaaaatatccacaattctcttcttccaggtctttgatctcgccgccaaacaccaagtacatctgccttaaggcagcgactaaaactgctcaaaatggggtcttcttctgtcacaggaaacagaataggggcagaagttgggccttgccaaccatta

SEQ ID NO: 14640 - DNA, 266 bp, Homo Sapiens
gccacaggtcccgctccagcagccgtagccgcagccgtagccaccagagaagtcggcacagttctagagataggagcagagaacgatccaagaggagatcctcaaaagaaagattcagagaccaagacttagcatcatgtgacagagacaggagttcaagagacagatcacctcgtgacagagatcggaaagataagaagcggtcctatgagagtgcattctcattcaacaaacccaaataaaaacagtatatgtaaccaaaaaaa

SEQ ID NO: 14641 - DNA, 270 bp, Homo Sapiens
cctttttgtcactgtgtacattaaaattttggaagatgctttactatgtaaagtatagatggtcattttaatcattcagccacatacggttggctggtaaacagcttattctgacacaagaatgcttgggtgcatatggaaagattgtgaaagagtgtgtcttgcatcaacagctgtcttatttatgatatataagtagaaatagagcaaatgttggaatctgttatttttaggaccatgtctttaataaagctaagtattttagaggaa

SEQ ID NO: 14642 - DNA, 483 bp, Homo Sapiens
cgagggaaattcaacatgaaacaaccatcgttttagttgcactcagtctgtccatatgacatacacatgaagtgaaagtttccttatgttttcaggtctacaatgtttagtacatgtaaataaggaaaaaatttgataaatatggtaaattaagttatagcgtgtcatttgattcttattttgctgtctcttgttatttaattttcctaatgctccacatctaggttccttcctaggtggtgggaacaccttgcagacgtgtgtgcaccaggacacaccgcggcccaggcagccacaccgagaaagcacacatctccactgatggcagccacccgactctccagttaacctcttttactctttaattctgatttactgtgatgatttaataaagtggaaacacagcacttcagtgctatatgtttctctcattctcattatagtttataagaaaataaagttcaccctggcatctaaaaaaaa

SEQ ID NO: 14643 - DNA, 400 bp, Homo Sapiens
ttctagttcttgactttaatgcccttggagtgtactgaggctcaatacaccaaagcactcacagacaggtacatgaactcacacaggaagtgttatagtgtgtacataaacccaacaccatacagaaggaagacgacggacccaggtgacctcccacactcgaggtgactgcctgttcccatactcactgtttgttcccacctccctcaacccctgccaacccccatccttccccactcagtatgtatatacacagatatgattctttcagaattccaaaaagtgcctctccaaccccagttcccaacactacagctttggatgaaaaaagcctctctcttttaaggatcatgagacaggtaccaccttcacgcaagagccccagcaaaatagtacccaa

SEQ ID NO: 14644 - DNA, 456 bp, Homo Sapiens
  misc_feature (326)..(351): n is a, c, g, or t
agactgagctggggatctaaggtgtacttctctgactacaaagggacagtatcatttagattttttgcagttggaagaaatgggttgttgagtgtgttaaggctgggatgaagtaatttctttgcagtactcttctggaagggtgagtagcacgaacctgcttgtctcccttactagtggaggtatctgagtgtgaacagtgaaggtaaagagtggtatagaacaatgcagctgtatctgtcacaaactggtctttatctagaaacatctgctgagtctctaaccctttcagctttctcttcttttttgagacagagtcttgcttnnnnnnnnnnnnnnnnnnnnnnnnnnaagtcaccacttactgcagctttaagctcctgggctcaagcaatcgtcctgccccagcctcctgagtagttgggacaacagttgtgcactatgatgcttggctaa

SEQ ID NO: 14645 - DNA, 988 bp, Homo Sapiens
ttaacagcagaaaagctggagcactgacacagccggggccagctctttggcactgcagcctggcagattgacgatggccgaggcggcttcatacaccaccatctcgtgcttgttgcgcaagcagctctcgatgaagtcaaacagtgggctgtcacggctgccatcctcctcctccagctgcttgctggccacccggatcatcatgcagtaggcaaagggagacttaaggccatgccgtgtgaccttgctgatcatcttattgacggctaggcggtcattcttacgcacatggtacaggagccctagtgcgtggtactggaccatgatgttatcactggatgctgcctcctgagcctcattcacccagcgcttgaccacgtcaaagctgcacttcagcaggtgcaaggaagacacgagggcagagctggagacactgggcaccttgtccacaatggcttgtttcatgtagcgctcaatagcctgcagcatggtgctatcagtgatctggcagagggctcgcacggccgggccccggtagttgtcttctttcccagtcatgtcttttgttaggctgctggtgacaatgatgacatcctctgcaatgcaagacatctccttgatggtcaagtagcacatccgacggagtgtgggatcattggactgaaagagcttggtcatggcaaagaaggcctcggtcgcttccgtggtccccaggtgctccccctggtttatgagataaagaatcttggtgaggatgtgggcacatttccgagggttgatgggagtttcattaaatacacgggcctcctggagtaccgcactcttctcaaggtgctggaatgggttggagcctccacctgactcctcatccttcttgtcgaatttcttcaacatagtggagtcggtggggcgcaatgcagcaacgcaatgctcgacgggcgcggcacggagtagcggtgccacagtggttctacagggaccacttccg

SEQ ID NO: 14646 - DNA, 382 bp, Homo Sapiens
atgaaaacactaaatatgtgattagccatgtgctgacaagtgctttggagaaaaatattgcagggtgagggggcagggagtgcggaggaggcctggctgataaggtggcattccagccaagacctcgagtcgtgaggttgcaggccacggatctggagaaggaagcctctcgacagcagaaactggaggcggcacaggccccttttgttttatctgtgcctgctttgaagaagtggatgtgctcttggaaaattctgtgtgctaatcaaatatttgtaaatcaaatcatattttaaatgcatcaaagaaacttccatttaaagtgaccctggagtaaatgagtctgcaaagtaaataaaatgttctgatgtgaataatttaa

SEQ ID NO: 14647 - DNA, 282 bp, Homo Sapiens
actagtaatccttccccttggtgttgacctttgacctgggggttcccagagccctgtagccctcgacccgaagcagcctctcggaagccggagtgggcagttgctggcgattctgagaaaacttggccgcatccaccggggccctgcctccagtcggccgctgccgagtctctgcgttctggccgcttcccggcttaatgaatgccagccatttaatcattgctcctgccaccacaaatagatgagcagttaaataaaactcaacttggcataattcaaggc

SEQ ID NO: 14648 - DNA, 388 bp, Homo Sapiens
  misc_feature (243)..(244): n is a, c, g, or t
  misc_feature (337)..(337): n is a, c, g, or t
ccggatcgaaccattttattacctccccctcccagaaccagaagcgcaggctagccggctggaagggtcgtaccactgacgctgcgaggggagtgtggtcagagccactgagcagcgggtggggggaccaaaccaagtggaagctcttggggaggtgccaagtgacccagcggccacacgcgccggatccaggttgggcggtaactagtgagccccgcgctgtcagaggtaggctcagtgtcnntccgttccggctgccatctcctgagcgagtgcgctgccccccggacccctagggcccgcgagagccgttcctcgctgggcactagccagtggnccggggaacccgggatctggtcgttgggatcctcagcgcggcgctcaggag

SEQ ID NO: 14649 - DNA, 475 bp, Homo Sapiens
actagtaatcccgcgcccagcgaccccaccctggggctgtgcggtcccggtagggctagcaccgttcaccctgtacatttcgctgcctcagtgacccccgcctcacggcttgggccctaaggacgtgcattcccagcctgagggccccgatctgccccctcccccggtctgcctgtgtggcgcctctctcacgccctatcttccggtcaacttctcctgccttccccgggggcacgtgtgaagggaagtcggaggccgggcaggagcctctgtttccgaagcttctcgaaagcccagaaaacccctcccaagagcccagcctaacctgggtggaagagcccccaggtcaccccaaatatttgcgctggggcgcgtgtgagggtgggaaataggtccctctctcttctacagttcacagctctgggaactacatcccttcaaaaaacattaataaagaactaaagtcatgtgcaaa

SEQ ID NO: 14650 - DNA, 587 bp, Homo Sapiens
  misc_feature (236)..(245): n is a, c, g, or t
actagtaataaagtacttagtattgtatagatatttggattccaagagaaaatgcaacatttataataagaagtccatactctttttcttacagcagagcgtcacactgagttccattttaaaaaaggactcatttttcaggccaacaactgttgcatttgaatcagatataaataatagattttccacaaacactcagctgattgtagcagtgttatttaagctggtatgtttannnnnnnnnncttggaaggatagctttatattttggctttcattataaattgtgttctgcttgtgtttaaatggcttacttataagctagagcactatatgggagtgttcttctctgtatggtatccttttatttgcttggctgggttcataacagtgtgtgccatattctttcttttccctgattctaagccatgagacttattagcatctggtggcaagctgcagggaccattaacagtgtgtctctttgactacaacgtggatctgccactacgcgctatgtaccattatgtacaatctctatttggctcaacttccatgaaaaagaaataaatatttgctaaactctc

SEQ ID NO: 14651 - DNA, 552 bp, Homo Sapiens
cagtgggaaaaaggaaggagttgtctcattgcaccctatgagtactgcctgcctcatgtgccagttaaagacctcaaacaccagcaggagtctcccttggggtctgatggtaggaatgcatttacaaatcaagacccttcaggaagcccagacatgtttcgttccattcctttgctgcaccaaggacctgatcgtattgtctggcaagcacagtaaatgctgtagaaaaacaagtgggcattgtttcataatgggcccttctgccttctatgaggctagttgatacttctttgcctttgtctccctataaggcagaaaacacatctgtgcgtacatgaccccatcccagctgtattcgctgaaaaggaatccactgtcaggcattctccctgcagcagcccctctcctctcctgctcttgccatcctctgcttaagtagtggggcacccgggagtcctgtttacagctaattagattaggagtgtattcatctggaaagatatttgtagttcaataaagagagtatgaagactctctctcatggttccagag

SEQ ID NO: 14652 - DNA, 622 bp, Homo Sapiens
acccggatgaagtaacatttgtttcgagagtatggtacattgtacagcagcttttgagacttagaacgtgtggacatggaaaggagcttgttccctcatccctcctgaaccttttttccttccggttccaccaccacaaaacatatataccccgttttctcagtctaagccttcaaccaatttcggcctcttccttttaaattctcccagagggatggtaaatgcatcacaatttaacttgtctattcaggtattaatagtcaagggatgcatctgtttgcttatagtaccagttatattcctaggaccttagagagcagtagtgtgagaatagaatgcctttctatttgggttaaactatgtgggaggaaaaagtaacagagtaaaggcttgccttaatgaagtcaagtgttctgcctggtgggaagtggccacacgctgcactgcgctgctcttgtttactctgttctttcagagcctttgtactttgccatcactgctagtaatttcttggtccttttcaatactccattttaatcttgatttttttctataaataataaatctgtgaaaaatctgtaaaaagatttgtgactattaaatgtgcaactaaaaacactgg

SEQ ID NO: 14653 - DNA, 265 bp, Homo Sapiens
  misc_feature (208)..(208): n is a, c, g, or t
  misc_feature (219)..(219): n is a, c, g, or t
  misc_feature (231)..(232): n is a, c, g, or t
acatccgtatgcatctgtgctcgtagctggtgaggctgggagtatggatggtcctggtgcccttggaccttgattcagtgagacggaggaggcaggagaaggaggggaggaggaaaatgacaaaggagggggtgctcggccattttgggactctgcggtagagactagaacagatggtgaccttatacctagtatagagtgaggctcntgaaacttcanaagagccattanngagacagaagggatgacgggaggcagagtgagc

SEQ ID NO: 14654 - DNA, 499 bp, Homo Sapiens
ttggcgagttgctaaaagataagcaactcaattttgtcgcctgcggtctgcaaagtgcatatgtcagcgaaaatgcccccgaagcatttgtcgcactgatggcaaaacactaccatcgcctgaaacctgtaaaagattatcaggagattgacgacgtactgttcaagttttcgctcaacctgccggatgaacaaatcccgttagtgatcgacaaactgcacgtagcgctcgatggcattatgaaacccgttaccagtggttttggctttatcgacctgattattcccggtctacataaagcaaacggtatttcgcggttactgaaacgctgggatctgtcaccgcaaaatgtggtagcgattggcgacacgagtaacgatgcggagatgctgaaaatggcgcgttattcctttgcgatgggcaatgctgcggaaaacattaaacaaatcgcccgttacgctaccgatgataataatcatgaaggcgcgctgaatgtgat

SEQ ID NO: 14655 - DNA, 492 bp, Homo Sapiens
ttttttttctgcaaagatgtttaatgcacttagattacagagaggaagagggggcaagaaggaaacgacatctaagtgagtcacccaaaaattcttacaaaagtcccaggctggctgcagcccaggaaccgagtcgccactgacattaaaaactaatataaaattttacaaaaatctgcttgtcgcagcattcaggtacttgtacaaaaggaggggtctccctacagggctcctgacttgtaacagggacccaggcacctcacctggcatggatgtcctagaagccagaaagggaagaccagacacaaaaatacagtaaaggaaattctctactggtcagccccatagcgagccgagccttcaggttttctccctgcttgcaactcaatccgaaaccccagtcccaagaccctgtgtctatttttaaaaatgctctagcccttttagactctccccttggcttctcccctcgtgccgaattcttgggctgag

SEQ ID NO: 14656 - DNA, 794 bp, Homo Sapiens
  misc_feature (621)..(629): n is a, c, g, or t
ttatacaagaactgggtttaacaatgctaatatttcagatttgcagtatattatagaatatagtccagttaaatctttggtttcagtatgtctgaagagtacagtgagaggttaatttctgctcaagtggtaccacttaaaggcatgtattcttttagtatgtaaaatgaaatagtaccttgagtttaaatagaatgcatttaggcattgtagagatctgaaatagttttcttccactacattgttgaaatcaatgaagcaattagtttctcattcagaaatgtgcacactaatatttagttttgctttctcgtggataatattaagcacttactctgcagtttcctggaagttgtgtcaactgcagtgatactattcaggatggtgggaaatccccaaaaatatgtatgtgtgggcttgcttagattactatatttcatagttaatcttttgtctcttgcggtgctcatgatgtgtggggcacacggaaggcattgctgtagtcagtcattttggttttattctatagccattttattattttagtgtattagttatgaagataatattatctatttgtaaattgctactttgtattttatgcatgctctgtaatttgannnnnnnnnagttattgatttggattatattcacattctaataaacagttatagggggattatttcttatgctgtcagattacatttttcctttgagtgctttgggtgcagccgtggaatcctgatgtaaaagcataggttcttgcattactgagtaaacattgaattgggagc

SEQ ID NO: 14657 - DNA, 615 bp, Homo Sapiens
  misc_feature (376)..(376): n is a, c, g, or t
  misc_feature (601)..(601): n is a, c, g, or t
gcctaaggcacaatctcaagaggtcctgagaccacgtacccatgatttttttcttgctctgtgatacccaataactccttcacctaagccctgttgttgattttgaagtgcttcctaggccagtgattttagcttctgccagctgcttttgccagtagattaacgtgtttttatttttcaaactccgtgtttcctaacgtggagtgtatgggtctaagagagcctgctgtcctccctgccttccaccttggagaggaggctggacgcatcagcagtggccagggcaggtcgcaaaatctcccagcctagagaccacacctgaaacggctgaagccagcttgcacaagggctgctgtccctctgcggcaggagagcntggtgggggcaggggtcacagagcagtcatagacaccatggaccagggcaagagaagggcagatggcacatgggcacaacagggcctttgtcttaaagcactggggggtcatggctgggaggggcatggcaggggcttgcatccctgtaagagcagaaggggcacccagggcaatgacattcagattatgtgggctcactcatcctgctgtgaactgggttcatnggacatgagtcata

SEQ ID NO: 14658 - DNA, 784 bp, Homo Sapiens
tggtactcaaaggctcgctttccctcccagggtcttggggtgtttaaccgggcttcccatgcactattcaaggattccactccgaaattatcaacaacatctcattcgcattgttctgccatgccgtcattcgccaattccctggctgtacaaacatgtatgactctctggagcattaaccaaattacagatttctaccaaaagcaagaatataagccattggattataacttaacgactacagaagtagtgatggagaatgtaacagccttctgggaggagggatttggggaattatttgagaaagcaaaacaaaacaataacaatagaaaaacttctaatggtgatgacagcctcttcttcagtaatttctcacttcttggtactcctgtcctgaaagatattaatttcaagatagaaagaggacagttgttggcggttgctggatccactggagcaggcaagacttcacttctaatgatgattatgggagaactggagccttcagagggtaaaattaagcacagtggaagaatttcattctgttctcagttttcctggattatgcctggcaccattaaagaaaatatcatctttggtgtttcctatgacgaatatagatacagaagcgtcatcaaagcatgccaactagaagaggacatctccaagtttgcagagaaagacaatatagttcttggagaaggtggaatcacactgagtggaggtcaacgagcagaatttctttagcacgagcagtatactaagatgctgattgtatttatac

SEQ ID NO: 14659 - DNA, 498 bp, Homo Sapiens
  misc_feature (308)..(441): n is a, c, g, or t
gtaattcaactacaatgtctctaggcaataggaacttttggctctattataatcttatggggccacctttttatatgcagtcggttgttgactgaaactttatgtggcatgtgatcataatgcttggattctgaaagttttctctccaagggcgtgcaaccattttggtataaaagcaggtaagatgaagtgaaagaattgtgaggcagatggagtgatatatgcctgtggtcccatcctagctactcaggaatctggggcaggaggatggtttgagcccagaagttggaggttatagggtgctagcnnnnnnnnnnnnnnnnnnnnnnnnnnnnnnnnnnnnnnnnnnnnnnnnnnnnnnnnnnnnnnnnnnnnnnnnnnnnnnnnnnnnnnnnnnnnnnnnnnnnnnnnnnnnnnnnnnnnnnnnnnnnnnnnnnnnnnagtatagatgaggtcttgatatattgcccaggctggaaaaactttttaaagcaataa

SEQ ID NO: 14660 - DNA, 564 bp, Homo Sapiens
taaacaagtaagccaaagcacaaagaaatgtcatgctatgtatatatccggttattttagctttataaatgagtttagttctgcaattattggggattcattgcaatggtctctgaaactttgagtcctatgtccatttgtaaacatagagctagttgggtgcatttttggagagaatagatgttttcttctcaaacggctgcactcagatgttgtcaagcagagcaagattaccagctgctgaggacaagtccaagttgcaactgagtggagaatccatctaagagtacagaatactttcccatttagagggtgttcttcctgagtaatttagcctctatttcaggatccaggcacggcagatgatccccgcacatgaaatcataagtgcaaccagtgatggttacttttcctctctaaatgaggcagccacccctgccaaatggacgggtctccctgtgctctaaggctgctgctggtattgcccttccgtggctgtgtagaatcatccaggacgctctgtaaatagtccaacgttggtctcacttctgcctttctttccag

SEQ ID NO: 14661 - DNA, 275 bp, Homo Sapiens
caagctaaactacacacgacgctactttgggtttaagttggtgacagcctttcctgcccctttccttctagtaccagaggggaaatcagagctttgtcatcttttggacaagttcactgccaagctatgcatcgttacacttaatttactcttcctaagtgtgtgtggatgctctaaagaaaatccaggccgggcacagtggctcgcctgtaatcccagcactctgggaggatcacgaggtccaaagatagggaccatcctggccagcatgggct

SEQ ID NO: 14662 - DNA, 170 bp, Homo Sapiens
catctttaaaaatacccatcttgaagtctgtatttactgtaagcatttcaatttaattaaatactaactttggatttggaaccgaattctgatttttttctgacctacttgtgatgttaacgaactttttaaaaaattacttatttttttagggccgggtgtggtcgtca

SEQ ID NO: 14663 - DNA, 243 bp, Homo Sapiens
caaaatggtaataagaacatcaacagttcaaaaggttacacatgaaaataagtctctctgacatctgactacataatctacctaccccaacagcattgttatcagtctcttccacagctttctagagtcactctaagcacacacaacaagcatatataaatacacacatactcatacacactgtattgcatgtgtcctcctttccagtcttctaccccttaagttaaaatagcagccaaccgg

SEQ ID NO: 14664 - DNA, 123 bp, Homo Sapiens
cttccttcttttaaaaatggttgtttaagactttaacaatgggaaccccttgtgagcatgctcagtatcattgtggagaaccaagagggcctcttaactgtaacaatgttcatggttgtgatg

SEQ ID NO: 14665 - DNA, 251 bp, Homo Sapiens
tcgggtcaccccgctttggcggcccggccggagggcaggaccctcacctctcccccaaggccactgcgctcttgggaccccagagaaaacccggagcaagcaggagtgtgcggtcaatatttatatcatccagaaaagaaaaacacgagaaacgccatcgcgggatggtgcagacgcggcggggactcggagggtgccgtgcgggcgaggccgcccaaatttggcaatacccaaagcttgggaagcttgga

SEQ ID NO: 14666 - DNA, 428 bp, Homo Sapiens
agactccagatttccctgtcaaccacgaggagtccagagaggaaacgcggagcggagacaacagtacctgacgcctctttcagcccgggatcgccccagcagggatgggcgacaagatctggctgcccttccccgtgctccttctggccgctctgcctccggtgctgctgcctggggcggccggcttcacaccttccctcgatagcgactacacctttacccttcccgccggccagaaggagtgcttttaccagcccatgcccctgaaggcctcgctggagatcgagtaccaagttgtagatggagcaggattagatattgatttccatcttgcctctccagaaggcagaaccttagtttttgaacaaagataatcagatggagttcacactgtagagactgaagttggtgattacatgttctgcttt

SEQ ID NO: 14667 - DNA, 451 bp, Homo Sapiens
tgattctgaccaagtctaaatcgagcttttctactgacatgaaactgttggaaactgatctcattttataagaaatgattttcccctcaaggaggcgtctgtaattccagaacagtccagacatcagctggtacctcatgctcagtagtttttatttgagtttcttttgtgagttaactatgggagatttaacctcttttgccaaagagggaagtgtgtgtgtttttttaatagaaaatatggaccaaaaatttttttccctgaagaatgtattataaccctatttgtgtggttattacatcctgtgaaatgtatatatgttaaaataatgggggtgctggaaggtcatggcagactagctgctggttagtgtggaggggaagtggtttactttgtagagtttacatggttttatgcgcacactaattgtaataaactatgccaaaccaaa

SEQ ID NO: 14668 - DNA, 661 bp, Homo Sapiens
ccacgcgtccgcccacgcgtccggggggcggcacagctgaccgctgtatccgcttctggaacacgctgacaggacaaccactgcagtgtatcgacacgggctcccaagtgtgcaatctggcctggtccaagcacgccaacgagctggtgagcacgcacggctactcacagaaccagatccttgtctggaagtacccctccctgacccaggtggccaagctgaccgggcactcccaccgcgtgctgtacctggcaatgtcccctgatggggaggccatcgtcactggtgctggagacgagaccctgaggttctggaacgtctttagcaaaacccgttcgacaaaggagtctgtgtctgtgctcaacctcttcaccaggatccggtaaacctgccgggcaggaccgtgccacaccagctgtccagagtcggaggaccccagctcctcagcttgcatggactctgccttcccagcgcttgtcccccgaggaaggcggctgggcgggcggggagctgggcctggaggatcctggagtctcattaaatgcctgattgtgaaccatgtccaccagtatctggggtgggcacgtggtcggggaccctcagcagcaggggctctgtctcccttcccaagggcgagaaccacattggacggtcccggctc

SEQ ID NO: 14669 - DNA, 644 bp, Homo Sapiens
  misc_feature (132)..(302): n is a, c, g, or t
actagtaatcttctatacatccaatcaaccacagattgaaaatgttctggggaaagaaattccatcaagttccaaaacttgagttttccaggtgccaagtacttcgttgaatccacaggaatgaagtgatgnnnnnnnnnnnnnnnnnnnnnnnnnnnnnnnnnnnnnnnnnnnnnnnnnnnnnnnnnnnnnnnnnnnnnnnnnnnnnnnnnnnnnnnnnnnnnnnnnnnnnnnnnnnnnnnnnnnnnnnnnnnnnnnnnnnnnnnnnnnnnnnnnnnnnnnnnnnnnnnnnnnnnnnnnnntaatataagaggccacttagttctttttctgagtttcacttccttggtggtactgcatgtgattttctttaaaaagcaccctagacacttccttttctgttctgcctcttctgctttttgatttttctgctaatgaacttagtattaccctgaggtctttctccaacattctgacatacatatttaaactctagtacttatttttatttcttgtaggctcatttccttcatctgcaaaatgattaagttaaactagcaagtctgcaaaattcttttcagttcctagatcctatccaaaaggtttagctgttagcctgggcaacagagcgagactctgtcaaa

SEQ ID NO: 14670 - DNA, 499 bp, Homo Sapiens
agagcctgaccgcgccgttctccagaagagccccggccgcggctgagtcgcgctccgggtgtggacggagccggagcctccccggggctcggtgaggacacagggcccaagccccgggcctttcaagtcttgaccgagcgcatccccggcccttctgcgcccacacctgagtttttgtctgtaggagtttccgcagtttgctaagaatcgacatctagaggagtactcaccacttaattgatgatcaatacacgttccttgaaagaaccgatagcatgcgatcgatacagagcatctgcactgggattgtccgccccgcctggcagggaggcctcgggggctaatggagctgagggtatagtcggccttggaccctcgcttttttcctttcctgtactatgaagataactgccttatctccccctcaggactgttttggggattaaataggacgtttaaattaccaacgctctttgaaataaacatttcaaaattatta

SEQ ID NO: 14671 - DNA, 274 bp, Homo Sapiens
ctagtaatctcaaaataaatatcttttcctgctccgatcattctttccttttaagtattacctggctggtgaatgtttatattgaattctctttgtacaattcctttcaacaatattgcttggaattataaaaacttaataattgttttaaattgaaatgacaattgcaggttatccttgctttcaaaaagattttgtttctgaaatgtagcttgttaaaagtttggaaataaagcatcacatgaagaaataaagttatatcaagaaagatgcc

SEQ ID NO: 14672 - DNA, 705 bp, Homo Sapiens
gtaatcatggttaactgtacaaatgaatcggtatcaagaatgttccatgttggagtagtttatcaactggagttgggaatggcgcatgtaaataagaaatgctgatgtcatgagctgagtcctgaagaacagagagtattcaactttgacgtgcgccagttgaactggttggaatacattgaaaattatgttttgggagttaaaaaatacttattgaaagaggatatggctgggatcccaaaagcaaagcaacgcttaaaaaggctccgaaatattcactacctctttaatactgccctcttccttatcgcctggcgccttctcattgcaagatctcagatggctcggaatgtctggttcttcattgtaagcttctgttataaattcctctcctactttagagcatccagcacgctcaaagtttaagagcatttagccatcgctttttatctggaacctctcagatacctctaaaacagcaaactgtgattctcaagattagaaagtaacaaggaatatgcccaaactgtcaaatgtcacctgttatgtattcgtccctattccttaactatgtatttttatttcagtgagagaaggaaagttgtaaactagcccatagtcacctatattttagggaaaaaaatccaaattgtttcctaacattctattaaatgcccttgcgtattaaacgtgaaagtactccca

SEQ ID NO: 14673 - DNA, 225 bp, Homo Sapiens
actagtaatcttaattagaaaaataagtcataaagacaactttgtttcaaataaggggaaatacgatagcagtcatgaaaaactgaaggatacaaagagaatattttaattggtagccatacaaagtggagatattttagaatctatttcattctctaatatatttgagtcattttattttgggtaaaataaattataggcggagcatggtggctcacgctggtt

SEQ ID NO: 14674 - DNA, 713 bp, Homo Sapiens
gcggccgctccaacatcagaatgggctgggaggaagtgaattaataaatgttttgtgggtagaaagcaaaaaaatcatcacataattcagcaaaataatgaaggcccaactgtatgaccccttcactttataagcacgttttaaggccaactttagagaaaatggtaatataaattaattttagcaagtataaattacagtgaccatctagatattcaaacaccaaaacagaacaaaatttacataagtaaaaactcttctaaagtaaaccaatgtacaatatcaaaactcaaaattcattagaaggttcactgtatgttttaatcaggctcagactgaaataaaagtagtcaattgaaaccccaacctggaaagccatccctgctatggctgtgatttcatcatttcggcatcccgaaacattcacttagagcaacatccatgtaaacagttcgacatatggtcccctgctgtggatcttgtggctagtaacagcctgggagcagcagacagacaggggacacttaaacctcagaaagcaatagcagccctctgacgccctgctcccaaggccttctcactcctgcgtgcgctcagctgagaccttcgcggacggctccgacagtggctgacaagctgccgaacagccactgacagacactagcctgctccttcgccacctggcaaacaacacgcctccctcccaaccgtgc

SEQ ID NO: 14675 - DNA, 174 bp, Homo Sapiens
atccaacttctgtctcagcagctagaccaggagctccctgcaggtcaagaccatgtgttctctgatgctttctcatggcaaggggagacatagggttgcagtagtgagtgggcatctgttctcagaaggcagtgcctggagcactataagtacttaataaactcttgtgaaatt

SEQ ID NO: 14676 - DNA, 485 bp, Homo Sapiens
taaaaatgcttttattcctgggctaatcctgtccctccctaagtcgcagcgaggtgtctgtcccagggctggagatgcttcccaaggcggagtctgttttgttgagagtgggcgtgggcttcttcacataagccctggggaaggaagaaaaaacggctttcattaccaaataatgtaaaacctcaaaagcaagggcttcaacagccttaaccaaatattattccccatagccagtggaaaatggatgtgacaaccccagtgcgcaggccagagtgagtgagcccagcacggcgctccgactggcttcctctctcaggtgctggattgtggggttagtggcatttccagctggattcctcctgttgtagttgccataaggaaatgagatgcagaatcagaaggatctatttctacagaatcatttcaccagttaagcacatgagtagagaaagagataaaaataaaagtatctcatgaaggaaaga

SEQ ID NO: 14677 - DNA, 257 bp, Homo Sapiens
actagtaatctctgggaaggagagaaggtttcttgtttgaaagaagaagcacctaactcaaagtttaacaccgcagcatccctcagccatttcctaatcttagttccctgggccagctgtatatctggcccttgctcttccctccacgtgttgagacatggactaatttccatttatatagaaaactcccctgttccttctccctttcacccacatttttcttctattcttccatttgaataaagccccctgatatg

SEQ ID NO: 14678 - DNA, 481 bp, Homo Sapiens
actagtaatagctgctgcttggggggctgtattcaattaacacttttaatgttaacaggtgtggaccatcaagagattgtctctccctggctgccgaattctcattcttagagaggcaatttgttaattgctgaaccatcacctgacatttctagtgggtcgggagagagccctctgctgccctgttgatgcctaactacctgtaacaatctgattattgtaagttttcctgtatccagtatcacctccaatatttatcaaggagttgtgtgaaataccacctcacaaccagatgaagaattttatcaccacctcctccaattcctcatgagggagaagtaggaattgctctgagcctaaggtagaaaccgttcctgaaatgttgaaaaccgtcattgtgagtaggtgagtggagtggtggagtagtgaatcacctgtacaatggcactgtcaaaagacaaaatttcaacacatttagttt

SEQ ID NO: 14679 - DNA, 436 bp, Homo Sapiens
actagtaatgttaaaggttgcaaaataataaaatgacctctgtggatttgaaatttggaataatatttcttgtccatattgatattacaactcagaggaatttcaccctgttattttatgtgtctttttagtgagtgaaggtcagtgtacagtttatattcttagtcacctgtcgtcaacttcttggtcattttctctggaaaaattctggagatgatggcaacttttagattattttgtgttactttttatgcaaacttgttcattgtgttcccagagtggccagtcataagtctgtaagcaacacctgcccttttagtgtcttccatgtcatcaccatctgtaataaataagtaaatgtgtatttattttgtaaaacataatacttggaagtatatatacattgtcaaatgcttaattctaggtagttacctca

SEQ ID NO: 14680 - DNA, 410 bp, Homo Sapiens
gtccctacagtgttcaaggtcacagggtcaaaatatatcagccagagggggaagaagggtggctctatggtgttgtgagccatcaggactccatcactcgtcttatggaggtgtctgtaactgagagtggtgaaatcaagtcggtagatcccagactaatccatgtgatgctgatggataattcaacgcctcaaagcgaggtacagtaatggactgcattcctgagcagactcatgagcttgcattatcttgctgtgtgtagatccctgatatatgtgttttccatggatgccttttgagttgttcagctttagccactgtacatttttttgctctctccacagtctgtctaattaaggggggatattctcaagaaagagacctagtttgagcaaaccctttaagcatga

SEQ ID NO: 14681 - DNA, 522 bp, Homo Sapiens
actagtaatattactagtgaattcactagtaatcctaaaccatcttgccttaacggaggctcagtcagggggacaatgggactgatctgtaaatgatctaacttgtcattgcagaaaatatacttactccgtggccacaaaatttcagcccttcagccaagcttcatccatcacatcataaagaataacttgccaaagaggggtttgaaaatccaaaccagatccctctccactcctagagaggccagttccatgacactgcaccggagccaagtgtttccagcaagccctgatcagttgcatgttagtccttgtttgtatgataaacgggacctagtagattaacatcatctcctcagcccaagggctgaccccagtggtgctgctcaagaggaaggaggaggctgggagcggtggctcccgcttgtcatcccagcactttgaggggctgaggagggcaaatctcttgagcccagcattcaagagcagcctggaaaatgtagagattctgtctctaccaaa

SEQ ID NO: 14682 - DNA, 936 bp, Homo Sapiens
ccataaagcagatgcagcagcggatgctggagctccggaagactctgcagaaggagctgaagaatcagacccgataatgagctcttcgaagtccgggagaaacctggacctgagatggcaaacatggcgccttccgtcacgaataacactgacctgacagatgcccgcgagatcaactttgagtaccttaaacatgtggttttaaaattcatgtcttgtcgcgaatccgaggcttttcatcttataaaagctgtgtcagtgttgctgaacttttcccaagaggaggagaacatgctcaaggaaactctggagtataagatgtcatggtttgggtccaaaccagctcccaagggcagcatccggccgtctatctcaaaccctcggataccatggtcctagaggggactacccaaggatggagctccgtgggttgacactttttctgtgaaaagaacactgacacaccagtctgggtgggtaataatcactgtaactgcagtatttagtacaagtgtctaaacattgtttacaagactaaggcccacttccctgcaggctgaactgaacctcagggggtagctgatcctgtcattctggtcaccaaacaggagggtcctggcactacccagatttaccacagtgctgctaatatcccagatccaaacagcaccccatctgcacctgaatcctctaacttcacggtagcacttacagctgaagccatcagcatctggcaggcacacctgagtcaccatgtagcgctgctactggaggtagagacggccctttgagatggtgcccagcaggccaaacccaccctgccaggaacagccaactccatgggaactctatgggagtggcttttaaaaattcagatgagttagaagctttttatcccttcctctcaagaaaatattctttcaccctgtctctacc

SEQ ID NO: 14683 - DNA, 283 bp, Homo Sapiens
ctagtaatattactagtgaattcactagtaattttttaatgttcatattataagacgttttaggaatattggatctggtagcctattgcctcaggtagggtcaaataccccatttaatattatataatgtttattaattattagtgtgaagtatagaaagctctcactttcttctgttgacaagtgtgacatggaattttacttggaattcagagttgggagaattctgagaacttagggcctgcccttgagtaataataaaactccagtatcacgtttaaaa

SEQ ID NO: 14684 - DNA, 229 bp, Homo Sapiens
actagtaatattactagtgaattcactagtaatagacgggctcggtcacacacactgtgacagacaacagcccacgttgccacagacgcctcacaccatcacacgtggccacacgcacgcgttaccgccctgcaacccggcgtcccccgggccccgaggccccagcgtgctggcagacccacacagataaaatgcgcgcacgtggttaataaaattacctacaaatttg

SEQ ID NO: 14685 - DNA, 457 bp, Homo Sapiens
  misc_feature (122)..(130): n is a, c, g, or t
  misc_feature (143)..(232): n is a, c, g, or t
  misc_feature (264)..(326): n is a, c, g, or t
aacatatcttgtatgtttgtaacaggagaacttaggaagatttatacccagactggtagtagtggttgtctttgtatgattgtgggtaaatttaaattcccttccacctttatgattttcannnnnnnnnctgagacagagtnnnnnnnnnnnnnnnnnnnnnnnnnnnnnnnnnnnnnnnnnnnnnnnnnnnnnnnnnnnnnnnnnnnnnnnnnnnnnnnnnnnnnnnnnngtagctggaactataggcatgtgccaccgcannnnnnnnnnnnnnnnnnnnnnnnnnnnnnnnnnnnnnnnnnnnnnnnnnnnnnnnnnnnnnngaaccttctggactcaagctattgttcacctcagcctcccttttgtgatttctaatttatttttagtaattaacaatgtattgcttgtataaattttttcaagctaaaataaattccaaattggctttcat

SEQ ID NO: 14686 - DNA, 799 bp, Homo Sapiens
cttttcctttagatttatggagagaattcttcttgtgcaggaagagcattgaggaatattattatcgttcaagcagctgacctgataaaggacagagtgaacctcaaggggttttacaggtaacacagttttctaacaccttgtcagaaattctctttgaggaaaaaaaaccaccctgtgttaaaattgtaaccttgatcaaagagaggtggacaatatcagtagtaggagggtttgtttgttctattggggaaactgatggtgacttttcattaaacttagtcatgcatttgtttacagtttgactcctgttctgaagttagggtatggaatttccagccccaagtgtggatgggctcctgagagagtctctgctctgcttcctctgagatgtgatattttgcagcgggtgagggggtggtgctacattagggtctttaataaatatagatcccctctttagcggccttattgaggccctgaaaggatgtcttgggcagagacatgctctaactctccaggtgagagtgggcctcctccttgagtgcataaggagcagggagagacaggttggcatagggatggcaggtgtctaccttgacagagatatgagagtaaacaggtaggtaaatggccagttttaaagtacagctggaccaagggcatggtcacttagaaaacttgatgtgcatgttttcattttatggaacaatttaaagaaaaaaccaaaagtaaattattagccttttgttttgccagataaagatattaagccacaccaaatgataccaaaactatg

SEQ ID NO: 14687 - DNA, 739 bp, Homo Sapiens
ggcatgtgggaccccggacagtacgaccccagcagcagtgactgggcaggtttggagagccccgagtgcccaggagtccccccacacacagatgcataggcctgcattccggagaccctgtccacattgccgagaccaccatggtggggccactggtgcgtgccagggacaggttagggccactctggggaaggcattttggttttttattccacgctgtgctgtttggatgggagccccacagaggcaggtcctggaaccaccccacccccacacctggacgctcgctctggtgtgggcacacgcaggtggagatggttatgggtgcaggtgtgtgcaggggtgtggggggcgcaggggtgtggcttagctggccccgcacccaggccggggaggctcaagttcgccactttactcagaccgatgcacagtcttcccattttacacttttttaataaacataattgcaatattttaggtgggctgcgagctgcagtcagccttcacgtctggcctcagtccccgtgtcagtgccgctctgcgtgtgcgtgtgcgcgtgtgtgagcctctacacatatatatatgtacagagccttaaaccacatcgtggcggtgccgtctgagctgtagcgggtggctttgtttccagtttttgtacccgtgtccttgtctcccctcctcaattaatctggggatgtgttcttgttccacaccttgaaataaacagcaacatacgtgt

SEQ ID NO: 14688 - DNA, 344 bp, Homo Sapiens
tcccccactaaaggccttggagggagcatggctttagcagcacctcaatttgggatgtctattctcctgctgcccagtgtgcccttctctcatccctccagctggtctctcactgccttcgagccccatcacctgctcgggctccccctctgtgtgtccccagttctggacacttattcagcagacctgtaagttttgctggccagcctatctccctggctagactgaaggctccttcagggcaggcctaacctgtgctagggcagcatgatgcctggtacagaataggggctccttagatgtggggtaaataaaggaatgctcgaagggtgatgggcccctgt

SEQ ID NO: 14689 - DNA, 485 bp, Homo Sapiens
gagttcgggacagtaagccaggggttaaggttctttccttactttgaaagccaatagacccagtttgcattgtgctgctgcattcatggttagaagctttccatgcctaggttctagggaatttatttttctagttgtgtatatattttcaaactttgtttcctggtgtactggagcatgtgccatgtctagagccccagtgttctgtctacacccctaccattcattctagtctgtctgttccctggacactgcctaaaagggtctcaagacagtgccctgtgggttcctaggactagggcccatcactgttctcttctgctgggaaatgcagctttaaaatggctaaccacagcagagggcagatgcttgatagattatcttttccttgctttcttgtttctgttttgaaagtgaaatggggttttaaattgttatttaaactctttttccaaataaaggtttaccttttttccccccaaaaa

SEQ ID NO: 14690 - DNA, 675 bp, Homo Sapiens
  misc_feature (15)..(15): n is a, c, g, or t
attcttgagaaaagnattagaaataagacttacatttttagagatcattacaaaaatgctgtacatatgcactagagagtaaccttgagaatttttaatacaagtaaataggccaagaaatctgacagaaatcacatatactcattgcaatggtacctttgtctagaatgtgtgactttaaaggggggtttcattcaaaagaatcagattttattagaagaggagggaccattagtgggcctacatttatttgcatgaagttggcagcagcatagtagaaaacagttgggtgtacagctgaaaagaaaggaagttctgtgacagagtgaattgagtgatataatctggctacttggccaatgtgaggacaagggtgatgatgtcttcataaattaggatattgggagaaaggtgagacagtaatgatgagggacatcagtaatcctcctatctgtgaaaacatctttctgacaattttgattcctttataataagaaaatgaaaatgaaatggggaactgccactgtagataaattccagctggaataattggttgttgatacagaagtgaccaaaatttttagatttgataaacacattccttttgagcttataatgacaaaaagaataagacccattaagtcagtgaattttagagaaattaagaaaaaggga

SEQ ID NO: 14691 - DNA, 151 bp, Homo Sapiens
atctatatcttggtagatgtatttcatccctagagcaggtcagcctccttcccctaatgcgaatgcttgttttgttagggaagggcttcctccaacttcgtgtgaaattgtgatgttgaagtgaataaatgtctattgtgtaactctaaaa

SEQ ID NO: 14692 - DNA, 966 bp, Homo Sapiens
  misc_feature (102)..(161): n is a, c, g, or t
tgattacaatcctatgagatttgtggggacacagatccaaaccatatcacctggctaaccttttttcttatcttttgtagagatggggtctccgtatgttgnnnnnnnnnnnnnnnnnnnnnnnnnnnnnnnnnnnnnnnnnnnnnnnnnnnnnnnnnnnnagcatgaaacaccacttctggccaagagttctgattgctccacatcctcaccaacatttgctattgtcagtcatttttattttagttactcttgtgagtgtgaagtagccaccattgtcttttagtgcaccagacacgaaggctcacataccatgacatcagcacactgaagaacttcctgacaatggtctgtctctggctaccccttgttctcccacagtgagcacttcaaagtcccactcccaaattcagtgacaaagaggcaaaaaactaggaattctgtatcttagactctccaaggctccaggactctggacttcagcttcaaatagtggatgaagtagcacaagcatacaaagggcatgagggatgggggcagagaaggaacatctatttcatctatttggaagtctcaagatagtcactcaatcatctactgtagacatctcttggcccaaagcaaactctgaattcagtctcaaataagactgggatatttcaccctacatttaaaaagtaatctcaagtagatcagcaggccccacccagcccggatacctggtatgaacagcttaaaggacagcaaatggtccagtaaatttactgagagtacagagtactcacactgtatgcaaccttgaattaggggattttgaaatcaatggcacataaaaatcaatcaactctcactttatgagtggattacaaaatagtgtaaatccctgtaaataaaaaaaattaatcaaaacttgcttaattgtaaagctggcaaactaagtgactaataaatagtgtttacacaaaa

SEQ ID NO: 14693 - DNA, 653 bp, Homo Sapiens
tgccccaagaaaacgttcacccagtgatcttgggctggggttgtctttaggaaaagttgagactataagagtcataaataagtccttgtgtttccttaatttattttgttaacacccctaattacaaccaaagtgatgatgtggagtcctctgtcttcattttggccccagcattcctaatttcaaagccttaatctgtctgcctaagagaatcaaccaaaggtgattctcctaaagagcagtgaaggaaatgtcaggttagcaagacccaagttttgggtgtgaaatgttgccagcttcctataatgtaaacggacttgttaacctaacctaattaagctcagtggacctccatagatggttttgaaaaaatgaactgagctgccttcccccaacgcataaccagttccaacatcctggtggaacttgaacatttagaggttatctagagagcctggttaaccttccaaaataattggaggattgggacaaatggcgttccccttaagccgcaattggggaaccaagtggcataagaagcccgaaagggtacaaagtatgctgcctggttccaatacaggaattcctcagaatcaatggaatgccggctgctgaaggcatttactatggggagctccttggttggagcggaa

SEQ ID NO: 14694 - DNA, 891 bp, Homo Sapiens
  misc_feature (774)..(827): n is a, c, g, or t
agcagtcccactggggctccacagttagtgcctatctggaagctcctggatctgagttctctactccaattctcctgagagcagaagcaaacttatatatgaatcatataccttaatcctctacactaaactttctggaatttcctgatgtcgcacctgcaaagccacaagaggacggtcattgattcacaactaacttttcaggaaagggaagaaatcattaaatcctgcaattccaggagtcattttattctccatggagctccagcattgctgtcagagcagttcctcctcatggccgactggggagttcggagcctgtgcattaagctgtcaggttgggagagcattgagaagtcatcttcatgccaaatcatcttatttagccaaataccattgaaacatttgagttctttcctggacctggacctggccaaatacctaaagccattaacagatcttctccctcaaagaaggcatgtaaatgtttacattactgtcaaactgtaaacaataatgaaccagctctttaggtaaaagaagttaaacaatactactactaataataatttgcctctataaagggactttttccaaactctcgaggaaccagctgtagctgggtagcatccttccctcaggagtctgagaacacattctgaggggcccctgttctgtgcttctaggttctgataattcaaccactacttgtttccccaatctagggaggtagatgcctcctacagttactattagtagtaacctcatcagggnnnnnnnnnnnnnnnnnnnnnnnnnnnnnnnnnnnnnnnnnnnnnnnnnnnnnncaaatgtattttaaactaattttctaaattaacttctttctgttgaaataaaaattttccattc

SEQ ID NO: 14695 - DNA, 341 bp, Homo Sapiens
gctgggaggagggaggcaggggagagccggtcacggtggctggtctttactgcagggcagcactgtggccagctgtctgtctttacactgcatgcagaagtttaaacactgaagtgccgaagtggccctgccgccgcacagagaccccgactttagtttgggctgttgcacgcttggctcaccattgccacctgggacttaacctgtctcaggcggccttcgcccagctgcaaatagggatgcgttagagactgttcccaaagcttgttgggctccttaaatggcatgtacaatttaagtgcaaagacagggagtgtcaataaagatggaaagccatttcc

SEQ ID NO: 14696 - DNA, 381 bp, Homo Sapiens
gcggccgctgctacgacctggtcaatgacttctactgtgcgtgcgacgacggctggaagggcaagacctgccactcacgcgagttccagtgcgatgcctacacctgcagcaacggtggcacctgctacgacagcggcgacaccttccgctgcgcctgcccccccggctggaagggcagcacctgcgccgtcgccaagaacagcagctgcctgcccaacccctgtgtgaatggtggcacctgcgtgggcagcggggcctccttctcctgcatctgccgggacgtgcggagggtcgtacttgcactcacaataccaacgactgcaaccctctgccttgctacaatggtggcatctgtgttgacggcgtcaactggttccgctg

SEQ ID NO: 14697 - DNA, 337 bp, Homo Sapiens
ttttctttattctgtctatcaaatagtacttctaccactgtttggagaaaattgaagaaaagaataagatgattaaatgaattctctaaaagaacatattttaagagacagaacttagacataaccaagtagttgtatacctgattgtaacaatcatcttttataaaagcaaaattatgcataaatgtaaaacacccctaaacaaagggaacaaatgaatttttggttatattgttttcttggctcaaagtatcaatttattattataatagaaatttataagttgctagaaagtctatatttttaaagtacggaataaaaatatgttttctattaa

SEQ ID NO: 14698 - DNA, 523 bp, Homo Sapiens
ttgatggaccaggatactggccatcttgaagaggaagagcgaaaagcaagtcccaaaatcaaagaaataaatgtccacaaagggaaactgtttccgaattaacaaacctaataaagacttgtacttctttgcatatacaaaaagtagatttaattctccaaaatactacagtgatctctgagaagaacaaattagaatcagattatatggccgcatcttcacaactccgtcttacagagcaacatttcattgaattggatgaaaatagacagagattattgcagaaatgcaaggaacttatgaaaagagctaggcaagtatgtaacctgggtgcagagcagactcttcctcaagaataccagacacaagtacccaccattccaaatggacacaactcctcactccccatggttttccaagaccttccaaacacattggatgaaattgatgctttattaactgaagaaagatcaagagcttcctgcttcacgggactgaatcctacaattgttcaggaatatac

SEQ ID NO: 14699 - DNA, 496 bp, Homo Sapiens
ttgcggccgcccgtagtgcgcgccctgcagcgggaagtgtgcccctgctgcctctacgctggcaccgtagcccttgggtgggtgctggtgctggtggccgggcccgtgggggccgactccggggaaaaggtagtccacgtacggccgcggcatctcctccagcgccgtggggccgtcagcgccgaagcttgggccctcgtagggggtaccgctcagctggtggtaggacgcaaacgaatcgccggttccttcgaagctgggcctccgcgtcactggggttggcatgctcccctttcctggggaggtctgcttaatgacccgcacaatctgctcattcctcgggtccaggtagcccatcttgctgatgtactccagggcggcctcgatgctcctgctgccagtctgcttgagagctcggccagccatctcctgcagagccccaggggggcagtgtcgctcgagccggggactcctttccaaagatcgctcccggcat

SEQ ID NO: 14700 - DNA, 576 bp, Homo Sapiens
ttgttaaccagtcagtacaaagcccacagcgtggtccggcgagccttgcagaagcacaatgtgccccagccgtgggcctgtgactatcagctctttcaagtccttcctggggaccgggtgctcctgattcctgacaatgccaacgtcttctatgccatgagtccagtcgcccccagagacttcatgctgcggcggaaagaggggacccggaacactctgtctgtctccccaagctgaggcagccctgtcctctccacaagacacaagtcccacaggcaagcttgcgactcttctcctggaaagctgccatcccccagtagaggccactgtgctgtgtatcccaggaccaccacccaactgtagcccattggaccccatctctttttctgactctgttggtactagatccatattccaaagacatcagcccatgggtggctggtggagagctcaatcccataaatgtagaaagaggtggggcatggatacgtcaaatccctccccagagaaatcttataaatgttagagacgcatcagaagtgacagatgcggatgaaaatagtgaccagagttatg

SEQ ID NO: 14701 - DNA, 455 bp, Homo Sapiens
tcttcctctggagtcaaaagaactgccaaagatgttattggcaaagcaaagagtctccaaaaacttgacccctcatcaaaaagatgacataaataaaaaggcatttgataagttcaaaaaagaacatggagtggtacctcaagcagacaacgcaacgccttcagaacgatttgaaggtccatatacagacttcaccccttggacaacagaagaacagaagcttttggaacaagctttgaaaacatacccagtaaatacacctgaaagatgggaaaaaatagcagaagcggtgcctggcaggacaaagaaggactgcatgaaacgatacaaggaacttgtcgagatggtaaaagcaaagaaagctgctcaagaacaagtgctgaatgcaagtagagccaagaaatgacaatctttgttgtgtgtgcatttttataataaaactgaaaatactgtaa

SEQ ID NO: 14702 - DNA, 684 bp, Homo Sapiens
actagtaatcgtgaatgagccaagggagggatagatctagcttactgcctccccctcccttaagccaagcagaatggggtgtgtgtgcacacctgtggtgaacgaatctgtccgttcaccctgtgccagggccgtccttacagcaaggaccccggggatgtgtccgtccccatcagtgtcatgttagcaagcagtgacaacatccctttgcaggaggcatcctgaaccactctgtcctcagacagtggcagagcccaagagaacaatgtgccccacccctccaccagcctcaggaatcattgtcttgtccccatcacagcagccctaagactcagggcacatgcgccaagcctggggggctagtttctgtgtgggaagcgatggggaagcggtgaggagctcctggagaaggtggcagctttcataccgggtgatgttctgactctggtgttctctcccatctcagcacccattctgctccccagtcaggttggttctttgtggctcagatctgtcaccccttaatgaagtggctttctggctgccaaggattgagagctgctactgaggagtataagtcactaatagcatggaaaacactgtgaaatactccaaggtgccaagctgggcccagcccagtgtggttctaaaaggctaataaaaatcccccaattaattgtgaaa

SEQ ID NO: 14703 - DNA, 488 bp, Homo Sapiens
aagctgttaatcacctccagccggggcaggtgcaccacctggaagttacccacatatacggcccagtgcgggtactgagcctgcgacacgaactccaccagatcgcccggcttgcacttgttgagcaggttctcgggcgtgtaggtactcagcgccgccgagcccggcgcgaagctcttctggtagatgcattcgtcccggtagaacacgggaacattccacctcgtgcagccgcggatcgtagggctgcggctggggcggcggcggcccgtccccaccgtcgggcaagccgccgccatctggcccctgaggcggcggctgcggctccacgtcctcatcgtcattggagaaaatgtaggagaccccaatgcggggcccgtcgtcccggtccacgccagtcgggtcggccgtgggaacttccttgtaacttaggtgggtcaatttctccacctggttgcccatcacgctgcggacacacgttcacaccg

SEQ ID NO: 14704 - DNA, 556 bp, Homo Sapiens
actagtaatggagagcactgagttacatccctaacctgcacacttctcacctccatcacccctccctgtcccggccagcatcatctcttccgggaacacttctgtagcctctgttggctttcatttttcagctacagtgatttttggaaaagtcaaattgtatcactcctctgcttcttccccaacacagctgcatggctcccttcatccctccttcaagcctctgctcaatgtcactttattaaaggcacctttggcaaaccaccctgtacataatatcaattctcctgtctaccctggcattctaatttctcttatcttgattaatttttatttagcatttattaccataagcattataacgaatacaggcagccctcgcttttcacagcagtgcaagattgcaagaatgactgtgcagccggaaacccaggaaagcaatctccacatccaatcagaaaaacaatgatcatattgtgacctttacaattttttgtcaaaatataggaaactctcatagtgtcagttacaaatgtagaaggcaataaaaaataat

SEQ ID NO: 14705 - DNA, 424 bp, Homo Sapiens
ccgcaccccactctagtccagcgcaaggaacgaagagtggagaagaaagctaacaaattagcatttaaactggagaaaagaaggcaagaaaaagagctgctgaacttgaagaagaatgttgagggtctaaagctatagacagtggagcatacagggcaaggcactttattaggggctcctcatctttggttattgactagaaaccttcagaaagacaaaactgtttgccatttttactggcagataagaggaaaatacaatatttgtattatttttatactagtaagtgtcccctgccaaccatcttgtaaatattgtaatactttaatttttaatattataagcttacatttgctctgaagtaaatgacttcatgaatgtgaaatgtttgataaattaaaggagaaatataaaacataacgtg

SEQ ID NO: 14706 - DNA, 537 bp, Homo Sapiens
actagtaatcagggtcgttccttgggagctgttaaggggagaagttgattaagttccgggcttgaatgttgcctctgtcggttccaggttgggctggtgtacatgtttaacctcatcgtgggcacgggcgcactcaccatgcccaaggcattcgccactgccgggtggcttgtcagcctcgtcctgctggtgttcctgggcttcatgaggtgagaggcagcggggacttccccacaggggccaggagtggagcaggagggagtcagcccaggaagcccaaacatgagggcactgagggggtgggaagacacctgtctaccccgtatcgagctcagtgagtccttgccagggtattcagagaggggaaagtggtcacagaggcctcctggtggcttgtctttgtggagcggttgcacagccctgatcagataaaaacctggacatccactaggctttggaatgtttcacgtgatgctggcctatttcttccctggcaggtttacctccctgctattaaatgtatgctttattaacatt

SEQ ID NO: 14707 - DNA, 681 bp, Homo Sapiens
  misc_feature (102)..(102): n is a, c, g, or t
  misc_feature (146)..(146): n is a, c, g, or t
  misc_feature (159)..(159): n is a, c, g, or t
catactgtagattggtggtgcttggggctgttctgtatgaaatgctgtatggatggctccctttttattgcggagatgttgctgaaatgtatgacaatatcnttcacaaacccctaagtttgaggccaggagtgagtcttacagcntggtccattctgnaagactccctagaaaaagacaggcaaaatcgacttggtgccaaggaagactttcttgaaattcagaatcatcctttttttgaatcactcagctgggctgaccttgtacaaaagaagattccaccaccatttaatcctaatgtggctggaccagatgatatcagaaacttcgacacagcatctacagaagaaacagtgccatattctgtgtgtgtatcttctgactattctatagtgaatgccagagtattggaggcagatgatgcattcgttggtttctcttatgcacctccttcagaagacttatttttgtgagcagtttgccattcagaaaccattgagcaaaataagtctatagatgggactgaaacttctatttgtgtgaatatattcaaatatgtataactagtgcctcatttttatatgtaatgatgaaaactatgaaaaaatgtattttcttctatgtgcaagaaaaatagggcatttcaaagagctgttttgattaaaatttatattcttgttt

SEQ ID NO: 14708 - DNA, 478 bp, Homo Sapiens
  misc_feature (18)..(18): n is a, c, g, or t
actagtaatctcagtagnaaatggaaattgtaaaataaaaatggaaaatcagtaactgaaatgtacaagatgtgaaatgaaaaattcattgtgtggactactgaatgttggaaaagataggattagtgaacttgaacataaatctatagatgtgtccaatctgaaaaatggagggaaaagatttaaaacatagagcagccactaaagagataatgcaagtatgacttatgaggaaaggaattagatacgtttaacccagaagaagacaggaaaggaagaacattgggggttggggagggacaattagaaaaccaacatatgaaaaagccttccatgtgaaaaattacctgaaagaaaatggactaaaaataaataacaattgaaaggcagagatgatcagactagtttaaaaatccaaaccacacatacatagtcttttcaacgagtgctggaacaaacaaatcatccatatgccaaa

SEQ ID NO: 14709 - DNA, 809 bp, Homo Sapiens
  misc_feature (314)..(314): n is a, c, g, or t
aagcagaaacacgacgggcgggtgaagatcggccactacattctgggtgacacgctgggggtcggcaccttcggcaaagtgaaggttggcaaacatgaattgactgggcataaagtagctgtgaagatactcaatcgacagaagattcggagccttgatgtggtaggaaaaatccgcagagaaattcagaacctcaagcttttcaggcatcctcatataattaaactgtaccaggtcatcagtacaccatctgatattttcatggtgatggaatatgtctcaggaggagagctatttgattatatctgtaagantggaaggctggatgaaaaagaaagtcggcgtctgttccaacagatcctttctggtgtggattattgtcacaggcatatggtggtccatagagatttgaaacctgaaaatgtcctgcttgatgcacacatgaatgcaaagatagctgattttggtctttcaaacatgatgtcagatggtgaatttttaagaacaagttgtggctcacccaactatgctgcaccagaagtaatttcaggaagattgtatgcaggcccagaggtagatatatggagcagtggggttattctctatgctttattatgtggaacccttccatttgatgatgaccatgtgccaactctttttaagaagatatgtgatgggatcttctatacccctcaatatttaaatccttctgtgattagccttttgaaacatatgctgcaggtggatgacagaacgagactggatctcaaaatatagataaatttaaaaccccgccccccaaaaaaaca

SEQ ID NO: 14710 - DNA, 190 bp, Homo Sapiens
aatatacattttggtggaggagcggaataagtgcttcctaaaaagtctttctctaaggctcactgattccacacattaccttgtgaaaaaggacaccatggcctcgatctccatggccaaataaataaaggaaatggaatttcacaatgcatattagcacattagacaggccgagaggtcctgcagggga

SEQ ID NO: 14711 - DNA, 520 bp, Homo Sapiens
ggcacgagcaggacccccagttcctgtgttgaacgaccacatcatgccacggttcttgaccaggggaagccatgctcctctgtagggcctgctgggcctgggagccccccactgagcccacaatgccacggaaatcctagttggctgcccccgagaggggccttcccagctgggaagagctcagagctgacagctgcctcctgccatgtcaaggccccccaaagagcctcaggggctctggggccctggagggtggggttggggggtgggactctcctcccccactcctgctccctctcccttttcactgttgctttctatgtatagctccctagacctttcacttttttaaaaacgcgttttgtgtagagaataaggaacgtggatctttttattttgcaatcctgggccagctagaagccaggagctgattgaccttttaacttttttcagtggccacattttggttatcgatgtacctagaagtatgtaaattagattaaatttctcttctggaaac

SEQ ID NO: 14712 - DNA, 340 bp, Homo Sapiens
  misc_feature (19)..(19): n is a, c, g, or t
actagtaatccttcacatnatgctagaagactgtgtctaacttgcagaacttattgtgtcaatctcctggttacggcccctccatggctccccacctgacataggagacccttcacaatctggcttctgtcactcataacttgtctccagccttcattcttcagtctgattttatggttttctagttccccaatacaccacaccagtgtttatgaaaccctagtcattggcctacgaactttatgattattgacatattcatgtaccacctgtattattttttgcatagtgtttatttttaattgactacatttttaactacaataaagtaatttcaact

SEQ ID NO: 14713 - DNA, 351 bp, Homo Sapiens
atttgtccactttttattgtgtcattttattcagttgtaagagttctttacatattctggaaacaagtcctctgtcacatatataggtactttgaaaatctgtgctttgcctttacatttttttaatggtaactttttaagagtagatagttttggttttgatgaaattcaacttatcagtttttcagttatagtatgtatttttatgacccatctaagaagcatctgtctacccagagttgcaaagatatcccttttcttactagaaatattatagttttatttaccattgcttctatgatacattttaagttaatttttgtgtattaaatgaataaaaagttgaagttc

SEQ ID NO: 14714 - DNA, 317 bp, Homo Sapiens
actagtaatccaagtctcctctgactgaacctactgtgggaggagaagcagctgatgacagagagaggctctacaaagaagcgcccccaaagagtgcagctgctaattttagtcccaggaccagacatccccagactccacagatgtaatgaagtccccgaatgtatctgtttctaaggagcctcttggcagtccttaagcagtcttgagggtccatcctttttctctaattggtcgcctcccaccagactcacctgcttttcaactttttaggagtgcttcctcacagttaccaagaataaagaaagctggccacc

SEQ ID NO: 14715 - DNA, 991 bp, Homo Sapiens
ctaaacaggaaaagggttaaatgaaggttgataaaatggatgttcaattgtctttctgaaagtgagtggcttgaagggatgaataaatattctcttaatatattcaaaaaagtgcattgctttctgtgatggaagttaagacctaaatgtctggaagttgtaaccctcaacacagcttttcctgatttgctgcaaaggcacatagctgattatagaagtgaagacggcaaggacggggactccaacaaaggaaaccctgttgcaggatttgggaactttcatgcttcagatgaaattcaggcatgtgagcatcactgcagaatgtggtgcatcattgccatcatgagtaatcacttgctgctcctacttctgagaccaagactcttttgtcatattctttagcaataggacgggtaaagactggatttaattgctgatcagagtataaaaactcaattgattccaacatatctgaatgtgcagtaaagtcttaaaagtcaaccgttaatcattaagtcttttgcctctaaagtcttttgcctctgaagaggtttattacatgagttgattttcatattttcattttggtggggttttcctgttgttgggcaaggtggggtcacaggacatgggactagtaagcattttactgtttactatatttgtctttttataaacagtatctcccaaaatgtgattagaaggctaccaagcctgtatttggacatttaattgtgtgctttatataatgtaactactaacagtatttggactgcctgttcattcctggagacaaaaatgaaaatctgtcagttcaagttcttgggtaacatcaagtcattagaatttatctaaagcttatcatgatttgataagacatccattgcatgcagctgttttagctcagtgcaaaacactgaaattgtgattcttagactgtttctgagacatttggatggaaataaatgtataaatgttaattcatgtatat

SEQ ID NO: 14716 - DNA, 332 bp, Homo Sapiens
actagtaatattactagtgaattcactagtaatctccctgagcctggccgccccagggcagcaagacccagtgctatgtagttctccaaagtcctatttactttagtgattctgattctgtatttttaactgggaaaaggattctctttcaggaaagcaaccacttctgatgctatttaggtattattctccttatacttataggagaaaaaattgatgttaatgaacaggaaatatttgccaaattatcacacaaataatttttgtatcattttaaaatactccttattgtactgagcttgttggtattttaataaaaattattggcacat

SEQ ID NO: 14717 - DNA, 593 bp, Homo Sapiens
  misc_feature (410)..(418): n is a, c, g, or t
gaggtgttagaatagtgtcctctaactttaccaatttaacttatgagcaatcaatcaatactctatatatcaatgtttaaatataaatgtgtaaatcctaagagctttgttaaaaatttaaaaattgttgaatgaaactgacaaggtatggaaaacgtgtcaacattatttactaagaatattttagatgaagttctgcctaatctatttgccatcaaactctataaatgctgctctagtaggtcctattcaacctgtatttgtaaattaactaggtcagaccacagctagtgaacaatttcagcaccaataagttattgaaaatggaattttataccattaagaaacaaaatggctggatattcaaatgtcaaggtgaaggtataatttgaagacaccaaatttctggnnnnnnnnncctttttaataatatcttcacattagctttacaatagtagttgtactccgcttaaaatcgtatgcagtctgggcatatcaaatatatgatgattttttttaagaagtgaaattgaggccctagtcccaactcgggggagcactatgaagaaatgattcaacactgcacatttaaa

SEQ ID NO: 14718 - DNA, 724 bp, Homo Sapiens
actagtaatgcccaggtgctagacataaaacaggaatgccatatcccttggcaggaagggtaaaaagaatgaaccagactcttaaaaaaccacctcaccaaattaatcctagaaacccagctaccctggactaaatgtctccccattgccttattaagaatcagaaccatcccttggaaagatatcagcttatccccttataaaacgctatatgggctaccttatgtacattccactactgacattcctacatttaaaacaaaatgtcagttcctcaaaaatgatatacttggtctatcttccactttctcttctcttaaaaccaaaggtctcttagcacaggtgctgcccctggaattcccagaacatcaacatcagctcccgtcctcatcaaagggtggaaaaaaggaaagcttgaaccagcttgggaaggaccttatctagtgctcctggccactgaaactgcatccgaacagcaaaaaaaggatgaactcatcatactcgagtgaaaaaacatcaccacctccggagtcacgggctactgttccaggggaaagtgctacctaactaaagctaagaaaaacccaaccctcctcatgaagaggagaccctgaaggatctccaaaaccaaagaaagttagcctctatcaataagtacctttgcccctccaaaataaacaaaactgcccataataataaaacttgtaccagatgagcccaaaaa

SEQ ID NO: 14719 - DNA, 491 bp, Homo Sapiens
gggttgcgcgctactccgttaaaatactttcctgtaacaaatgacaataatgcttgggttagaaatccatttacagttactgttaaaccagcttcattagtagcacgggactatgagagcctgattgatttaacatctgattctcaagtgaagcaaaattttagtgaactttcactaaatgatttttggagtagcctaattcaggaatacccaagcattgcaaggcgtgcagtgcgtgtacttcttccttttgctacaatgcacctgtgtgaaacggggttttcatattacgctgcaacaaaaacaaaatataggaaaagacttgatgctgcacctcatatgcgaatccgacttagcaatattacacctaatattaagcggatatgtgataaaaagacacaaaaacactgttctcattaaaattggaggagtttgcatgtctcatgataaccaaatgtaagatgaaaataaaagatgatttacttcaaaaa

SEQ ID NO: 14720 - DNA, 921 bp, Homo Sapiens
agaggtctgcgtagaagcccttttctgagcatcctctcctctcctcacacctgccactgtcctctgcgttgctgtcgaattaaatcttgcatcaccatggtgcacttctgtggcctactcaccctccaccgggagccagtgccgctgaagagtatctctgtgagcgtgaacatttacgagtttgtggctggtgtgtctgcaactttgaactacgagaatgaggagaaagttcctttggaggccttctttgtgttccccatggatgaagactctgctgtttacagctttgaggccttggtggatgggaagaaaattgtagcagaattacaagacaagatgaaggcccgcaccaactatgagaaagccatctcccagggccaccaggccttcttattggagggggacagcagctccagggatgtcttctcttgcaatgtgggtaacctccaacctgggtcgaaggcggcagtcaccctgaagtatgtgcaggagctgcctctggaagcagatggggctctgcgctttgtgctcccagctgtcctgaatcctagataccagttctctgggtcgtctaaggacagttgccttaatgtgaagactcctatagtccctgtggaggacctgccctacacactcagcatgctcgccaccatagattcccagcatggcattgagaaggtccaatccaactgccccttgagtcctaccgagtacctaggagaggacaagacttctgctcagggtatccctggactgttggacacaagttagatcgggacgtggaacatcctggatttcacttacaaatgacggtgcattacccccaagggatggtatggacgattggggaattgctaacctgaagccaggtcattgatggcgagatccatctgcgatggtgagtatctaatcaattatcca

SEQ ID NO: 14721 - DNA, 390 bp, Homo Sapiens
ctgagtgggttgggggtgtatgtttgcaaggatagaatttctcatgggggagtggccctgcttcctcccttagaatggcttggggcttagggctggggacttgccctccatggaggtcagtgggagttgcagctgcagcgagggggtagcgcagtgcccagctcgctgggtgacctcgggcacggctcgtcccctcctcggcttcagtttgcctatcggtatgttggagcttctactccacatttcttctcccctaactccagcccctgaaaccgtcttccccagtccctccccgggctgcgactaggttggacctagaagcacacgggaccaggctgggcgaagaacactgacgcccagagccgaataaacaagagttccgtgtttcaa

SEQ ID NO: 14722 - DNA, 364 bp, Homo Sapiens
tgaaacacaatcctgaattggcatggtcgtctagctttaatattcaaacctagttttgcatttgttactcagaaacacttcaagtaacaaaaggggggcaggggagaggggtggggagtggacacttgcttcttcagttctttgctcagctagggtatagctggcctgagaaggcagtgcaagccccagagactgttgtaggttgctttttcttcctcctgggcaactatttgtggaaaggttttaccttagtcattatgtaaatataattgtgtagaaaaacctagtcaacacattttaaattttagctttcttaatatttaagtattatcttaaaacaacattaaatttctattagttcctg

SEQ ID NO: 14723 - DNA, 436 bp, Homo Sapiens
taacataatctgagaatttctctgtagagcagagactttcaaaccttttggctgtaacccacagtaaaaaacgcatttatatcaaaccttagaatatgtttaatgaacaatacttaccattctgatgctttttattgtttcagtttttaaaatatgccagtagcaacccactaaattgatatctaccaatgggttgcaacccttagcttgaaaaaaacaccctcacagaggaactggtatttcttgaataccttctgtttgccaggcacttcaccaggcattttacaagtaaggaaactgggcttcagagaaaataatttgcagaggtttactcaactacaaaggggtgaagccaggaatgttaactaggtctgttgagctacaaaaacttttatgtctctcagactatacagcctctatacaaaattgcgatggg

SEQ ID NO: 14724 - DNA, 567 bp, Homo Sapiens
agagaataccggggagtggaatttctgagtcataggtagatatatgtcagcttctctaagaaactgttagtggtccacaggggttgaaccattttacactcaacaccagccatgtataaatgccccaattgctgtacttcctcgctaacacttggtcttggctgcccttttaactattccggtgttatcttattgtgattttaattagcacatgcctcatgaaatgtcatctcctggtgtttttcttttaaatcagctttatttacttacatacaatactactcacccattttaagtgcacaatttgacaagttcccacaactgtatatagtcatgtatccaccaccacagtcaagatacagaatcttcccaccatgccctctacagtctacccctccctcatctatagtccctggcaagcactgttctgctttctgtgactatagtttgcattttctagaccacttatggaataacaaagcatgcagtcttttgtttctggcttgttctcgcttagcttcatccatggtgttgcatgaaccaatttattccttttttatttctatt

SEQ ID NO: 14725 - DNA, 494 bp, Homo Sapiens
actgtagtctgcggctcttgtcagtgcttctcagactgtctggggtgatggaccagtttccctctagttcatcactagtaatacttttgtaagatacactaaattattagaaaaatgaaataatctttgaaagaaaagacatacagaatataagcacgatgatcatgtcatgacaatgtcaacttgccatacatattttgaaatgtctaatttctatgttgtcacataccagcagtagtttgacagcaccagtcattgagcacactttgaagtagcactggtctacatgttatttttctaagatgccagtgatcttttcaggaaacaaaaaaaatccgacctttttttcaaatgtaagtttacaatttaaaagaatagcatcctacactgactattggagagagtatggtatataatttgttaaatgattataaaattgtttacttttgttgacacctttaagaagaaaaagaaaaatgaaaattatgaaactt

SEQ ID NO: 14726 - DNA, 804 bp, Homo Sapiens
tttttttgtgatttataattgcttttaatgcacacacaaacacacttttacaaatacatgcacatacgtgaatcagaaggaacacttactgtcatttcattcatgctcaggagcatgagactaggtggcaaagtgccaaggcgaaatttaaaaccatcttctaaagtcattccccaaaattggctgtaattctgtgctgtccatccatagtctccttttattgacctgttcaagttaattctgaacgaacaaggcatacatgctgggaacatttccattgctgtcctgagcatgtgcaggagttgcagttttctgtaattactgatccctcttcataatgttgaccatctttgaagcaaccttctggataccaaggctgtgtgtgaggaggccattctttctcttcacggcaaaaggacttgtagtcaggacagcaatcagaattctctctgtcacagaatttatcacagtagcacaacgcattcgccgcatagaactcagtgacacagccatcatctctgtcttcacaacagccaaaatttctacagtattgcccttggaaaatggctcttttgaatcgagtaccttgcaaaacggtgtgattcctagtgaaataagcctctaggtccacttctctttgagataaatactgcttctccatccagatttctgcctgcattgaaacgaacatccaggctctcatgaggttgcctgctaggatctgtcatatcaataacagtctcctctaaatcatgcccagtcacacactggtttgatttcccatctgtactccatttacctacc

SEQ ID NO: 14727 - DNA, 1108 bp, Homo Sapiens
  misc_feature (1079)..(1079): n is a, c, g, or t
caaccctcagagtctttatcgtgtctaatactcagctggcctgagaaataaggccccccgggatgggggcagaactaggtccgggggcagcctgggatgggtatcccgcgaggaggcgccctcccccagccttgcccaccctcaggaaacatcataagcccatactcggtccaggccctcgccaaccgcggtcacaggctgccaggtggggagtgggaagcgcccagacaccacgcgggccccagcaggcagctctgtccgcagcttgtcctccagcagcgggagcacgctaggggccaggaacacagacacgttgcggcagtccctcaggctcaccttccggacatactcgcggcgacagtcgccaccgccggcacagacggccctccaggtgggcagccgcgccagcgccaccagccagaggctcagcccgcagccctcggccaggcggcggccgcacctatgggccggaacacagacacgtggccaggcagtccctcaggctcaccttccagagatccttgcggcgatagcagacgctgccggcacagccggccctccaggcgtgcagccgcgccagcgccaccagccaggggttcagctcgtagcccacggccgggcggaggccgcacctgtgggccgccagcacgatcctgccgtcgccagagcccagatccaccgtttttccggggcgtcctcgcagcagcgacaacacgtgctccacctgccgcgcgctcgcgccgacgtagggcacctgcagccgcagcggcacgcgccggaagccgggctggagcagcagcgcccacaccgcgtaggctgccaagcccgagccggccgccgcctgcagcagctccagcgcgcccagccgccgctcgcgcagctccgtcagcgcctcgaccgggtcgtcctgctccatggctgcgggacgcgcggctcgtccgcccaaggtccttcccggctcgggtccgcggccctcgcagcctggcctggggctggcggtgtgccctctgcctcctgccgggagccgccgcgcgatcccgaaaattccggaccggggccaggggggggagggcgggcgnctccctcctcccacacagcaagtccctga

SEQ ID NO: 14728 - DNA, 390 bp, Homo Sapiens
agtgtgaaatagacatttgtaaatgtaaaacttttaaggtatatcattataactgaaggagaaggtgccccaaaatgcaagattttccacaagattcccagagacaggaaaatcctctggctggctaactggaagcatgtaggagaatccaagcgaggtcaacaaagaaggcaggaaatgtgtggcagatttagtgaaagctagagatatggcagcgaaaggatgtaaacagtgcctgctgaatgatttccaaagagaaaaaaagtttgccagaagtttgtcaagtcaaccaatgtagaaagctttgcttatggtaataaaaatggctcatacttatatagcacttactttgttgcaagtactgctgtaaataaatgctttatgcaaacc

SEQ ID NO: 14729 - DNA, 631 bp, Homo Sapiens
cctctctgtggcagttgacactattgactgttcctgaaattcttctggcttttatgacagagttctattgatccccctgcccctatctctgatattttctttccagcttttttcaccagcttgttcttccatcagctacttatctgttggtggtgttgggtcgtgatttcattcattatccatggcttttagaacgtctgagttgcctgttacttgtgaatcaatttttctagtcccggtaagtgaactgaggaaccatcttttcagttgcttattggacaactccctctgaatatcccagtgctaattactttccctctcagagctggttttcttcctatgttaccaattgacccagtcacttgagccaggggctgggagctatcctagatttctgtctcaccctccacatggagtgtcatgtggctgccttttttacacctgccctctcatctccattcacactgctgctgcttttgctacagttaatctgtagtttatctttcactaagactgtaagctccatgagatctggggccatgtgtgtttttttcatcactgtctgtaatgcttggtacattgcatgttatgtaagtaatacttgttgattgaataaatgaattcccaaatg

SEQ ID NO: 14730 - DNA, 436 bp, Homo Sapiens
taaactgacaaaggaacagacagctgcagaactggaagaggtcagaagagagagtcccatagaaggtcagaggagtgagacggggccagccccgccaggcctggccatccagggggagctccctaaatctcacctggactccttcgaggccagccggccagcagccaaagcttccacaccggaagacggcaaagggatcccagagggcggaggcataaggagcaccgtgaaaacctgaaggggagagggatctgacacaatgacacattgaaagccccagagagggtcaagaatgaagcatcggaatggtgcgctcacgtcgccttctcctgaaatacctccgagtctgcaagtgagaaaacgcactgatcctgttgcaaactgtgaatattctgatgatgccagtacagtttgatttattaaatgtaggtcctca

SEQ ID NO: 14731 - DNA, 507 bp, Homo Sapiens
actagtaatagcagcctcaccaacacagcaccaacagcttccaagatagtaacaggtaagtaggacatcaatgcccgtatttcctcgtctgctctacattgcttttgtactactacattttatttaagctttgatttatgccaggtgtcagcaaactacacccgcaagccaaaccaaacctgtcctgcagccagtttttgtcattaaagttttattggaacacagctacacccatttgttaacatattgtctgtggctgcattggtgctgaaacagcagagctgggtagtcgtgaccaaagatcctgtggcccacaaagttggaaacatttactgcctggtcctttaagtttgccgacccctgacttatagttgcttgtgtgtttaagacctatgtacgtttacatttttctcaacataatggcttttattccaggtggaaggtattttacaacacgagcatgaactttatttcttagtgaattcctcattaaaatgcttaaacagt

SEQ ID NO: 14732 - DNA, 902 bp, Homo Sapiens
  misc_feature (86)..(159): n is a, c, g, or t
aaggcagtatcacccaaataaaaataactttatatttttttccagatataactaataaatgttcatgttacaaggttcagggctcnnnnnnnnnnnnnnnnnnnnnnnnnnnnnnnnnnnnnnnnnnnnnnnnnnnnnnnnnnnnnnnnnnnnnnnnnnaacttttctttttaaaataagtttagttttaaaaaagtgagttgacaggagcaaaactgctaagtaaataatgcaaaaggcagtggtgctcaaatatgggaaaataatatgcaggtgataccagagtcttgcctttgggaaatgcagacccaggtccttttgtctttagagctcaccggcaatgcgaggtgtttcaggtagaaggaacagcatcaagggggtgtgggctagtgtttaacagcgggctctctgaaaaagcaaaataaaacacacacacaccaaatctgatggtctgtttccatgatgtgaatacctccagctgggccgaactgacatcactgaacacagtggaaagtgatgactgcagttgtctctcctgggagcttcaacacagtacaggctgacaaaagtgggcagggggtaagggcaggtggtgggagtggcctctacgccagagaagggaatggagaggtcaggctggctagagagtggggttgagtcgtccatgcccttgaatgccaggatgagggctaaagagtcaaatggaatgggtgacttcatatgcagaagtttttacaagagaagagaactcagttgggccaagagaagtggggtcgtcatgtgggtaatcacgtaacagtgatcgttcagtcatgcggaatgctttcaaggtgttggacactgttcattttttattttcagtttttgaggcagggtctcactcggtcgcccaggctggagtg

SEQ ID NO: 14733 - DNA, 627 bp, Homo Sapiens
  misc_feature (45)..(45): n is a, c, g, or t
ctagtaataccacagtgcccagtgggtttgtcacattcttaaatnagatattcctaatgctattaatacttcctctaagcacgttggttttggggaggtgttatcccagttttacacataagtctgatgccagggaatggtgttaaagaaagtgagtaactgattaagtagaatatctgtgaagagagagcactgccattgaatattactggcttttccactctctgtcagctttagccttcaactcgttaggcttcttcaaacttaccttatataggtacatagaagtctcataaaaggtatggtctaaagcttttgtagcaaaagtttgatttttaatacttgcattgaatatggctgtgtctaattggggaaccaaatagtaagatcaatttcagagattactcaaaaagctaccatgcccctgcgctccttttttctcccctctgaacaatagtataaagtgagttgtgttgctctgtttttatgaaagtggggtgggatgtcaaattaagtggttcctaatgttagaatcagaattgtgggaagagagaagaggcagttgttcaaatatgaaacataaaagtgctgcagaggtacatgcagagtgtgtcagtaaatggtaaa

SEQ ID NO: 14734 - DNA, 500 bp, Homo Sapiens
tttcctttataaaagccacatgaattgaacaagacttcagaattcagaagaactacatcaagttcttgggtcatttttttaacccattctccaagaattgaaaaaatgaccttgcaaatatgtgcaagactctggaatcttcctttggcagatgatgaatgagatgaatatttccaggtgcttgccttcagcaccagcacatgtacattctagtactcttggccttgatcctacactgaatctgagggtgcaaggactttagatagaggctcaggacaagactggacctgtatgaacctctgaattgtagctagcctgggcagccagttacttggatccctctggggcttctggacaaacaactcttttatagcccaaggtagatggtcaggggcgaccagagagagcaatagattcgttgacttcaagcttaacatgagttagcagtatggtgaggcttccagcaaaatgtaagcactcaataaatgttagctattaaa

SEQ ID NO: 14735 - DNA, 276 bp, Homo Sapiens
ctagtaataagaacatggacacaaaccatcatcgcactgtattgcaggagcatgtgctgctctgagcacgcctctgatctgtgaaactgaaaccatgaataaggaagcttttctttgcttcaacagatttcatttttaggaaaacatcagtatctagtgtatttgcctttgtcttctttgtgtcatatattttgcttgatctcccataagtttatggcagtatccaaaccaatcttaaagtatcttttaagtgaaagcaaaataaaattcagcctt

SEQ ID NO: 14736 - DNA, 279 bp, Homo Sapiens
actagtaatgtaggatgtgatttaaggaatttgcttattctaattgagacacaatggtggggagtgggggtcggggactacacaggtgcattttctgaacatttataaaatgaaaaagatggaggcttggctagaatggttaatccccttttcattcctctaattctatgacaatttttcttaaaaaaccaaacacaaccaaaataagagtggacagttgagaattacctttaggttcccatgaccctgaagactgtatttggccttggatccattaaa

SEQ ID NO: 14737 - DNA, 525 bp, Homo Sapiens
actagtaatccttaattgctgcaactttactcccactgctgtcatatttactttattttcattcccttggtactgaattttcctctcaattttataaatcttttgtaacattaaacaaatgatcaggaacaagaagactaagcaataagtgagaaaagaaatgatggaatagatgtgaggcttccacagcaaactcctgtaaaacctgcagttaaacctgagcaagaggaatgtgacatatgtgtctttgctctttatttggatctgtgtgtatgctcttggagcagtggcgaaaaagctccaggtaaggtatagagttctttatttttcatcaagctaagatttttaatgaaacaatatccaaaatgcttgctatgaaagattcaagtgatttttgtagttctacattcttgggtaggagaagataaaaaatgcagttattacaactatattatgagcctcttctaaccttttctttaaagaggtaggtatttatatttctaataaataaaaacgtttgtttcc

SEQ ID NO: 14738 - DNA, 547 bp, Homo Sapiens
ggattttagtattggcattggagttgaggtttactctaatgatggtggcccagctgtgcccagaggacagccagccaggccctgggagggagtttagaaagacagtcctggtaaaggggcttcaagtggtcacaaagagggtggctgtgaggtgaccccagacactgcagaacgaggtgcaccctctgcgttttgggatgtccctgggaatgtgggagccctagaaataaccctgtggatggaattggggcagcggctgctggagatctgtgcgccttgccttccttcagcaggaccgtctaggtgcgcagccacctatggatgcgtcccagccagccccgtcgctctcgtccatcctcagagacaaagaagagggcagggagtttgggcttggttttgaactttcctttcaatgtagcaaagcattcctagttaaccagagccttggaatctaactcctgctggccaggctttaaaatgaaaagtgttttaatgctgccataaaagggaggcgggggggaggaagggaaaataaaggcatctttcc

SEQ ID NO: 14739 - DNA, 287 bp, Homo Sapiens
ctagtaatgccttatcagtgattatgttcctctgtgtactttggagtaatctaccaccaataaaaacgtcctggagctactttctgagtcgtgggaatgagcttgttcacgtattcctaattgactggcacacatagcaaagcaggtgactcagattagtttcaaatactgagacaaatctctggggtagtcattttaagtcttcatttttcatagatccagattttgtgcctttcagggtatcttgactaatgaatttttataaaataaaaatatgccgggatttg

SEQ ID NO: 14740 - DNA, 336 bp, Homo Sapiens
gacttggagacagctgccatctccaggaagagttttatattattaccacatagcacacttgagaaagcctcagggatgcgaaacaccttgcctgaagtgacatactttgtaaacgggagggcaggactccaagggaggccctctggctcagctctcctgccccttgctatgctgaactctgttggattacctctgcgagtctcacacgtatggtttcacagcccccttttcataaaaatacttggcaaacctcttgactttcttgaaatgaaattaataaattatacaatttatctaaacacctaatttccaataaaatacatatattaaaaaaaa

SEQ ID NO: 14741 - DNA, 522 bp, Homo Sapiens
  misc_feature (50)..(78): n is a, c, g, or t
aaatatatgtaccaaactttaatgttcatttcacactcaaaactcctgtnnnnnnnnnnnnnnnnnnnnnnnnnnnnnttacaatgacttcagcaaacaacatatgaaaactgcaaaacagccttgggtctgtaatggcctttatagacgtagggagaaaactgggttccaaggttttgaactctttaagacaaaattccaatgtttattactaacatttaaaaaatatttgtagctgcataggatacaagattgaatgaaaaggcctctgaattctactgcacaattggatcctaagattgggaggcttaatttttctttggggaaaacatgaaattatttttacttaaatgtgatgatgcatcagtaacctcagtttaccattaaggtcttaatttaatggtgataactaggagcaaatgttgatcaagcatgatgttaactagtagttaaaaggtaatatccaaactttctttctggttgttaatactccacccctaatgtgaagacatcattactagt

SEQ ID NO: 14742 - DNA, 568 bp, Homo Sapiens
  misc_feature (245)..(290): n is a, c, g, or t
attttcttccccttactccttaggataagggtaagttgaccggaacaactttcatttgcactgggaaaataagcaaatgtttaaatgcttcacaaaaattttcaatttaaactcaaatattaaatatctataacttataaacaccaactttcaatgtaataaatgtatcctaatcttatgtatgtttaactggattacatagatttatatcttttgttaaaatgtgtataccccgtggaccaacnnnnnnnnnnnnnnnnnnnnnnnnnnnnnnnnnnnnnnnnnnnnnngctcgcttgtgtaggatgaatgtcttagagtcgttggtggtatttcatgtgtgtcgactctatgctcccagggcctgtgctatgaaaaggacagataagtatagcccagagctaagtggcactacttacaaagttttaaatgtcttctacatactgattcatgtttatttgagctctctttatagaattttctcttaaagtttcaaaacctctaagttgtagcctgtaattatgagaacagtaaactttaagtaataataaagaatcccatccaatat

SEQ ID NO: 14743 - DNA, 259 bp, Homo Sapiens
ctagtaatattactagtgaattcactagtaatggtctagtagcctcatgagtgttctacttggctcacaaccagaagccttaagtcttgtgtgtttctgtgtcaggactagacccagatcctggctttgtctgtacagtgtcctgagacttcaggcagaacgagtgggttgtacataatctccgtgccccttcaaattcttttcctgtctgtgacatagtctttgtatggcaactttaataaattatgctaacatcaaa

SEQ ID NO: 14744 - DNA, 440 bp, Homo Sapiens
ggagcagggagtggcgtttggcttgcacgttcccatgtggccagatgctggggccactttccttctgtctgctggtgactgcagtgttccccctcctcctcacacacggggctcctgtgagtctggggggcacctctttctggcctgtgcacctctctctggcttataaaggtgcctggcctgtgccagcccctccgtgttgcgcctcaccgtggggaccaggtgagccggctctcccacgtggctgtcccgggaaagctgccccacagcctcagcatcttcagcacttaccgatcccagcacgtcccggccttctccggtgtcctgtaccaactcttctatttaagagaacctcagatgatgtacctgagcctcagggttttgtttcagagggatataaattatttaaaaattaaatgaaaacgttgcacactgaaaaa

SEQ ID NO: 14745 - DNA, 480 bp, Homo Sapiens
gcgaccgccgctctatcccagggcttccatctggcgcgcatcggcgatccacgcccccgatcggcccttcgtgtgtcccgactgcggcaaggcttccgccacaaaccctacctggcggcgcaccggcgattccacaccggcgagaagcactacgtctgccccgactgcggcaaagcttcagccagaagtccaacctggtgtcgcaccggcgcatccacacgggcgagccggcctacgcctgtcccgactgcgaccgcagcttcagccagaagtccaacctcatcaaccaccgcaagagccacatccgggacgcagccttctgctgtgccatctgtggccagacattcgacgacgaggagagactcctggcccaccagaagaagcacgatgtctgagacggtgggcggggcgtgttggctgagagagggctggggtccttcgtggtgggagtcgcagtgggctgggggtgctgcctagtgc

SEQ ID NO: 14746 - DNA, 523 bp, Homo Sapiens
aagctttgcttgagatagcgtcacgtgctctcccagcacgccggcaaatggtgctagagtctgagctcagctctcccgccctggcctcccattggtgctatctgttactgcccgtgctcacggacatggatacagaccctgctgtgctccaacaccctgcaggcgcctcgggaagcgcccaaaggattccccttcacgttggtgcacctgctccatagctccgggcgctgcgtcccgaggggccacagtctccatttcagcgtcttgcatggcctggcaccgggtggggtggtatgccccaggacccttgtttgtgtcaaaaatgactttccctgcccttgccgtgggtccggcgttcctcccagccgggatcacagtgggcaagcggcacccggcaccactttggcgagcgtcctgttccgccctcgccctcatctacgctcgtccgctttcctcagacccctttttgccgtgcaaagggaattcttgacattaaataaaaggtatccagattgcaaaaaaa

SEQ ID NO: 14747 - DNA, 536 bp, Homo Sapiens
aaaggaaattgcccctgaggcccaaaatttcgccacgaggggaagaaaccctttggaatctgggttaggaccactccagaaagtggtccagaggttggagttcttactcccatcacgtgttcatatctgtctgcctgaagtcttaagctgcatagagaaattatgtgttagccaattggagtgttagtaccttgctaactctcctccccatgacgcagccaattccagttgctgggtactcctcccccggactcagtccctgtacagcttctgctctccaacttttctcgctcctagcagcctctggaaccagaatggacggtcctctagtaacgctggattctatgggttggaagtactgcagcggctggatcaggttccagtaaagttttgtaccttcaaatgtctctgttgttaaacagtgttgtagttatctttcccatgggcctagaaattaaggagacaaatgtctactgaacatgctgagtgcttgagaaagacactccagataaatacataaagacttgcttgtttga

SEQ ID NO: 14748 - DNA, 389 bp, Homo Sapiens
tttggagagctctttactcaggccaaatacctttgcctctcggggtaagctcccttgctgagagggtcgaccgactacaggttaaagtcactcagctggatcccaaggaagaagaagtgtcactgcaaggaatcaacacccgaaaagccttcagaagttccaccattcaagaccagaagctttttgacagaaactctctcccagtgcctgtcttagaaacatacaatacctgtgatactcctccccctctctacaatcttaacccatacagggacgatggaaaagaggcactcaaattctacacagacccttcatacttctttgatctttggaaggagaagatgctgcaggacaccaaggatatcatgaaagagaagagaaagcatagg

SEQ ID NO: 14749 - DNA, 644 bp, Homo Sapiens
  misc_feature (173)..(222): n is a, c, g, or t
tttaccagatccatgtggctgtttgaagatatattattaactttgctattcatctcatagaatgaagtgttctggttaaatacagagcctaataattactgttggccctccatatcagttggttctgcaccctatgtggattcaaccaattgtggattgaaaatatttggatnnnnnnnnnnnnnnnnnnnnnnnnnnnnnnnnnnnnnnnnnnnnnnnnnnccacaccctcatttataccaattacctgcccagtaactgtggacttttgcttcctcacccctgctctgatctggaaggagagggattatgttatagcttgtcagcacagtcccaagttcaatatttctgcggcaaaaacttccttcaaaaaataaatgtacttcattgtattcaatgaattcaccttggaaatgcaccgcctcaacttgttcacatggcataaatgaaaggaattttatagtctcctaaatggcgtgtactgcaagacctcttgaacactttccagaggataggatatttaagtcatgcccttggcgttgcctatggcacctttccctcactgaagagcccttatttgaattcactgtgtggagccctagccctccattctcgacattccccaacctcccagccccggcccg

SEQ ID NO: 14750 - DNA, 161 bp, Homo Sapiens
gtactttactggatgactgtgaagcgatgagtattgggttggggtaggtgtgttgattttgagagtgcatgttaagaactgaaggggaactacttgagatgacttaagaagcatcccatgcaaatatcttgttttgccctaataaaatattcagaaagata

SEQ ID NO: 14751 - DNA, 526 bp, Homo Sapiens
  misc_feature (266)..(292): n is a, c, g, or t
ctaacatttgtatttatttaaatagttattgacctatgatgactttctagtcttaacattttatctttttattgttgttgttcttcctttcaaagatgtggttcttaataggttcactgaatgcacagttgaggcacttcttgtgacaccagttcccaagtagcgttaataattgggcctgtgtcataaaatgcacggatcattaataactaaatgtccctgacacttttcactacagggctggacttagtaactgaccaacttcnnnnnnnnnnnnnnnnnnnnnnnnnnngcgcgttagaacatgatcaaaaaatgtctccgctcagggatttatggtggattattgcagacagtgctaaaaatatagagcacaagacaagtttactaaattaaaattttattttttgagaaactgttatttgtataaattatcaagatttgtaggctttccttttgtagaaataattgttttatgtgccagagaatttcaattttgttttcaacaataaagcattgataagaa

SEQ ID NO: 14752 - DNA, 387 bp, Homo Sapiens
ccttaaactcacgttcttaccttgataagcatcagtgtgctcacatttacctttatcactgcttcagtgtcacaaacctcggaaggtcttctaggaagaaccatctcatctaggtacaaaaggaaaaggagaagttggaggtggaaaaaaaacccttgatccgtgatcatttcagagcaccaacttcatcaccttcaggcttcagtgtactgggtaacactgaccatgtcgttctgcttgagacagatattagattttttttggaatttggatctttcatctgagttctttttcatgggcgggtcggggtcagtatcctgtttgttattgttaaatttgtatgaaccttagaaaagttattaaagtgccaaagaatgtttcccttta

SEQ ID NO: 14753 - DNA, 700 bp, Homo Sapiens
aaactgaagataagctatcctaatcctctgcacgtcatattcaaggaaacaatccttgtaatgctgcagcaatttcacgcactagcccaactcagtcgtattgatcagttgacaattgatcctcaaggaaatccagttgtcaattttacactctggaaatactatgtactgtttaggctaagccatttcagtatgcagaaaataaatggaacagaggtgacacagaatgatatgataatggctgaaaggctctttggaatcctagcacatgtagcatcttctgagttaccccagtatcgtctgatttccattctgggtgatgccaggaaaaagcaatttcggtatctactagaatccaaaggaaaaaaacctggtattatcaacgaagaaaataatgacagcaaaagacttgtaggagaaaacacaaatcgtgctacattaaattatactacaagagacttttataatgaaaagctagaggaaataaaggaaaagaagaaattctgtaaaacatatatagaagaccttgtgaaggaagccacagaaatcaacatgaaaaatgaggctttgcagaagctttggccacagatgttcattgagcttgttagggatgcagtcatagaaattcgcaataaaaattcctatatgaagctctgcctacagcagataacagaccaaaaataaaaatggcctttagtta

SEQ ID NO: 14754 - DNA, 560 bp, Homo Sapiens
  misc_feature (29)..(29): n is a, c, g, or t
  misc_feature (45)..(45): n is a, c, g, or t
tttccttccaacatgcatctgtgcagggntgacctcaagtggctnagtagtcttcttgtggagggttcaactggaggcaaagtggcccagctcaagatcactcagcgtctccgtttggaccagcccaagttggatgaagtaactcgacgcatcaaagtagcagggcccaatggttatgccattcttttggctgtgcctggaagttctgacagccggtcctcctcttcctcagctgcatcagacactgccacttctactcagaggccacttaggaaccttgtgtcctatttaaagcaaaagcaggcagccggggtgatcagcctccctgtggggggcaacaaagacaaggaaaacaccggggtccttcatgccttcccaccttgtgagttctcccagcagttcctggattcccctgccaaggcactggccaaatctgaagaagattacctggtcatgatcattgtccgtggtgcgtcctaaagtccatgtgtaacttgtatttactactttgacatggttcctgttttgtgatgtgtaatgggatacagcatcagatgcaa

SEQ ID NO: 14755 - DNA, 461 bp, Homo Sapiens
ccatcaccagcctaggatccaggcgctgcctctggcctcttagggagcagagagcagaactccgcagcccagcccagaggagtgtcacctcccacctttggagaggaatccttccctcccctggacaaagttgctgacaagctgctgaagtggcctctccatattccagctgagcctgaatctgactcttgagggttggggctgcacttatttattgcggggagacagctctctctcccacctcctccccagatgggaggagagcctgaggcccaagcaggacccgggggttccagcccctagctgctctggagtgggggaggttggtggaccatggagtccctggtgctgcccctcaggtgggacccaggcgttctcagctgtaccctctgccgatggcatttgtgtttttgatatttgtgtctgttactacttttttaatacaaaaagataaaaacgcc

SEQ ID NO: 14756 - DNA, 502 bp, Homo Sapiens
agtatgattatgagctgggagcagggataagaaagagacacaaggggtctgaggaggaacatgatgccctcatcggaatggggaaagccaggggaggaaccagacttgggatgaacatgaggcctcgtcggacttcatcagtcagctaaagattaagaagaagaagatggccagcgaccaggagcagttggcaagcaagctcgacaaggccctctccctcaccaagcaggacaagttgaagtcgcccttcaagttttcggacagtgctggggggaaatcgaaaactagcgggggctgcggcaggtacttgactccttacgacagcctgctggggaagaacaggaaggcgctggccaagggcctcggcctgtctctgaaatcctccagagaaggtaaacacaaaagggcagccaaaaccaggaagatggaggtggggttcaaggccagaggccagcccaagtcggcccattccccgtttgcctcggaagtgagcagctactct

SEQ ID NO: 14757 - DNA, 426 bp, Homo Sapiens
caaaatcagtttatcattttaaccctttgggaagacagagttttatatgatataacctattgaaatattgtctgtaataatcttggggacaaatacctagtagtgaacataaacttgaaatttttttgggatatctgtgatccaaaaatgtatgagtctaagagaacctctttagagctgatattgtccttccagacattggagagttaaccatagactaatatagtcttggaaaactcaggttcactgataagaaatgcataattctttctacagtattttgcttgaattctcagagttaggttgtgttttttttgctttcagcacagtggtagagcctggtcccttcactggctagaattaattcccactcttggggatctagctcgtggccttggctaagagaagagcgtcccctggcgccgc

SEQ ID NO: 14758 - DNA, 472 bp, Homo Sapiens
  misc_feature (71)..(213): n is a, c, g, or t
acctgggctcccaggccaggcgattctccggtctagcctccccagtagctgggacacaggcatgtgccacnnnnnnnnnnnnnnnnnnnnnnnnnnnnnnnnnnnnnnnnnnnnnnnnnnnnnnnnnnnnnnnnnnnnnnnnnnnnnnnnnnnnnnnnnnnnnnnnnnnnnnnnnnnnnnnnnnnnnnnnnnnnnnnnnnnnnnnnnnnnnnnccgctccctcccttttatccatgttggccatcatatgatgccttaaacactaaaaacaccatcccatcttacggtcttagcatccattcctctgcctggaatgttctttctctagacagacaaattccttcaacccttctttatccttcctcatcacatgagagacagcccctctatctactctagctaacatcacattctctccatctctgccctttgcctgcttggcttttgcttcttagaattttttcacaactgg

SEQ ID NO: 14759 - DNA, 914 bp, Homo Sapiens
gacctagacgtacacaggagaaaaaccctaccagtgtaataaatgtgaaaggacctttatcctgagctcccatcttactcagcatcaacgaattcacactggggagaagccctataagtgcaatgaatgtgacaaagcctttagcccggagcactcatctgactgaacatcagaatactcatactggagagaaaccttataactgtaatgaatgcagaaagacttttagcctgagcacatatctcattcagcaccagagaattcattcaggacagaagccttttggatgtaatgattgtggaaaatccttcagatatcgctctgctctcaacaaacatcagagactgcatcctggcatatgacaattctaggaacatcataaatttaggggagatatttactttagtttgtccttttgttaagtactgaagaatcagagtggatttagaaactgccttgaaatcttttaaattttcactatcatgttatggaatggaaagtacattgggctgaactaatccaattgttattaagccactctgtgacattagaaaactctactgttttaagctttagtttcctttatggaatgaaggatttggagtagattatttcaaaggtagtttggagttttataatcagttttgtatatttacaatattttcttgaatgggtttactatacatcagcattttgctgtgttgcatctagaatgtgtatgtttatgcatgttttgccaatagaatttgtgcttcagtaactagatcggggatctagtatgctcctggtctaatgcatttacattgtttaggtaactggttcctaataaaaagaattataaaataccctcaaattaacaattcaattgcatataatagcctaactcagtaagaatattaaaacttactattatt

SEQ ID NO: 14760 - DNA, 313 bp, Homo Sapiens
ttcaaatcccgtgccagataccagatctttatccattctctctttatccaaggctagagagtctcgggaagtgctttctagatccctttcatgttcaccttccagtttggcttcacagcgtatcacagactctatatgagaactctcaaaagtactgtctctgtctctgtccctctccctttcaacagaaccagaaattagtctctctctttccacctccagaatgtaagttacatgcaacaaggaactgaatctgacacgttcatcactgtacacttcccttggatctatctactaggaactcaataaaata

SEQ ID NO: 14761 - DNA, 510 bp, Homo Sapiens
gagcacgcagaggcctgtgttcactctttggaacaagctgatggactgcgcatctctgagaatgccaaccagaggcggcagcccacccttcatgcctcatgccccactcagggttggcgtgtgatgagccattcatgtgttccaaactccatctgcctgttacccaaacacgcctctcctggcagggtagacccaggcctctaaccatctgacaaagactcggcctggacaccatgcgatgcactctggcaccaaggctttatgtgcccatcactctcagagaccacgtttccctgactgtcatagagaatcatcatcgccactgaaaaccaggccctgttgccttttaagcatgtaccgctccctcagtcctgtgctgcagccccccaaatatatttttctgatatagaccttgtatatggctttaatgccgcaaaatatttatttttccttaaaaaaggtgtcaacttggaaataatggtttaaaaacaggataagcattaaggaaaa

SEQ ID NO: 14762 - DNA, 514 bp, Homo Sapiens
  misc_feature (191)..(238): n is a, c, g, or t
aatatacatagtaaacattcatgcatccttcccaccttacctttactgcccattccccagagaagccttccctgatggccccatgctggtctggtctgctttacacacacccctgaagcacctctccccgactgcactttttcatagttgtactcttacattcaattgtatgattagcaccagagggcagnnnnnnnnnnnnnnnnnnnnnnnnnnnnnnnnnnnnnnnnnnnnnnnncctgagtgaatggcttctgtgagagcaggaaggtgagtgaatggaaattttttccttaaggcttacaggagcagctccgacctagagacatccgttgcaacccttcattctcacacccttcccaaggccgtcacggtccatatctgcaccccagtctgtgcttatcacacaataccaggccctgaatacagctctttagaccagccgtactgtgaagctgacagccctttctgcacctgcagatgtaaccatacctgggcttctccagggatggtc

SEQ ID NO: 14763 - DNA, 424 bp, Homo Sapiens
gaatcatgctctctcagatcgttcctctctcacggccccatcctgcggggtcgcactaactccggggagtgtcaggatggaatagtgggatacccagtaggtatccagatgtccgaaaatcggtgtagaaactccacatgcacatatggttagaggtgtttgaccataactactattcaagaaaaagatctactcattagaaataaaaatcataaaattatacattctacaaaaacaaatcaaccttatctacctcccaatcctaccaaactacagaatgttagaacagaaggtctgaccatggactcaagagctgacgttaggaatgtcagcaccatcctgctctccaaggactcctcatcttcaacagactcctcatcttcaaaggaaagggtggaaactgcaacttgtgccatgatccctg

SEQ ID NO: 14764 - DNA, 925 bp, Homo Sapiens
tagcttgtaccacacgatccaatcacattttattgtggggaggtcgggacctgaaggggcggcaggcacgatgggccccaggcttggacggcagcagattgaggcaatgactccacgcaggacttccctaggacaagcggtgctggacggtggctgcagaggccgggagaggtgggctggccagtctcgagggaggggcggccgtgagccctggcgccaggctgtgggggccgtgggggctgagcgtccgggggcctggaggagggcagccgtcagtcatggttgcagaggctggtctggcagcaagcgatggatacgtaagggccccaggcccaggctggcggatatcggggcagcctatgtggcacatcttggtgaccagaggcaaatcctcggtgttgctgaggacccgggtggcagtggtgacacagtgggtggagtccctcaggcatctggatccatgggagcaccctccgaagcccgtgcactggtgacaccatatggcttcggctgcagaggtgcgcgtggtcatgcagtaggcaaccatagccgggcagcgcatggggttgaagcaggttgtctccgttgtaggcacacacgtggcagtccaaggcctgggccagaggtaagcccatgaggaccaccaggatcagggtgagcaggggcgtcatggctgcaggcaggagggcagcgtgggagtggggaggtcaacagcagctagccctggatccaactcaggggtggcgcacagaggatccaactcagggtggtgcgcagaggacgtggggccggccctgcctcccggagctcctggtctactgggagtgctgcaaccgtgttcagcccggacactccgcaggctatcttcaccgcgtcccgcggcagcccagccttccccgcagccgcctccgcccactcgcccgcg

SEQ ID NO: 14765 - DNA, 306 bp, Homo Sapiens
cgcttctcctggtggaggttctcgatctggccagtatcgtgtcaccatgtgctgcaggtaaatggcagctgagttagagaaaaaaatgctaatgtagcagtaccaaaaaggatggctataattcagccttacagagcatgaaagtacaaacccttcaatgtaaaacatgaaacccagcaaaaatggatactcttacaggtataaacagccaaatcaggaagggaaagtggataagaatataaaggtcacacttcagctagtctaagcagaaaacatttcattaagtcaagacccagagcttacagg

SEQ ID NO: 14766 - DNA, 410 bp, Homo Sapiens
tttaccataattgactttttatttaaaaaattacacggagcaatttccagcttatctttttttataaaagtactgcctatatcaaacattttatatcacgttaattccattgaagagctgcctttttctgttaaggtactgattccaattgatgggatacatgcccttaatacagaaagtttccattatttattcaaatatcaaaattaagattattgagaagtttattgctttatggctgggcaagatgctactagcacattttaggtaaataatattctttataaaaaactatgaggtcattctgtttaaaactttcaagataattcacggaaaacagatatatctattcaaattaaacattaaagggccaggctactagctatagacatttatatgtgaagcagctc

SEQ ID NO: 14767 - DNA, 599 bp, Homo Sapiens
cgggggagtgatcacgttcagcaaaagatcacttcacaaaaagaggactcctgcctatcggccagaaacagtccctttatgattctcaggtgcaatcagttgtccacttcctcaaggtcggtctttccatattctaaacgggacatcaccatttccatggtataattacatctaggttaaaattcattgtcttatactgcatcttgaagaagagtcgttagtgttgggagttctcattttaactcctcagtgctggcacattcagtgcatccattgccagcaatggatttggggctaggaaaatatacatcccagtacagaggaactcaggaagaatgggcattctccaacagtggtggtccatctctgtgcatggatgggtgtgtgtgctcccttttgtaagtttttggagggagtttagggatatgttgagaagtgctttgtcgtggaggaacaggcggcccagcaatggaatgaaggtccacttcttgtgtcaatggtggtgatggcagatgccttcttgtgccgtgaggagaaggtgtttgaggaggaggtggtgtacagggggaagggctgtttgggaagaaggcattgccatg

SEQ ID NO: 14768 - DNA, 275 bp, Homo Sapiens
gtaatccttgataggcatggattatctcaagccacaattacaataaaaatatgctaagaatttaagttaactggtattccaaagttttttccactgacaggaaaatttcagccgggaaggctctatagcaaaaagacagaaaagtgaaggcacactccagtttcatacttagaatgttgcaatcactgctaatcctctagattttaataataactcttggttgataaacttaaacatgacagttttgagcaggcaccttaagttctgtatactac

SEQ ID NO: 14769 - DNA, 519 bp, Homo Sapiens
ccctctcccgcttggagctttaaaatgacaagcttgcatgtggaattcgcacattctgacccgtgattccaggggtgaagtttacttccgtgtagggactcagcctctcaatcccagtctcatgcttccagcctggataaggattgagccacctgtccaggtaagcagaagttagctggtggaactcactcttcagtaagacagaaactgtgaggatgctggtactgggaaaaaggatctgcacagcctctagaggcctcccagcaaatgcggggagccatgcccccagggtctacacactctcgttcatcaacatcacaactggaattcgggatttgtgaagtttagagctgaacagactgttacagattatgagtcaacacgtatattttctctttcaaaataataatatttcgtttttgactttttactaagtgaatattattttttaaatctgcctatatattggaacctctattttataataataatgataataaatcagtacccagaagtaga

SEQ ID NO: 14770 - DNA, 468 bp, Homo Sapiens
cgcaagggcatcacagtaggggatatcccacactgtgacctctataatcagtctgaaagagtgaaggctggaacaccatacccacatggacctggaaaggagtgagaagtgatagaaaacgagcttaaggacagcttagatacccagtgagtagaatgccagaccaaggatacccagagctacctgccatcaagttgttgggttcccaggatgtgggtgtgagagaaagaaagagagcatgtgtgtattgtagatgaactgtggccccaagatatatagtgttacagtaaggggagaagctgaagaacaaagactcttcccaagctcagcttgtctcctctcctgtcaccctatgagcccctgagatccatagggatgaagagtattgaaggctccattgcaaacctggtctttctacagtgctacaaggcctatgccaaagcgcccggcacggtcgtctctgggtgt

SEQ ID NO: 14771 - DNA, 343 bp, Homo Sapiens
gggagtgagcgcgtgcagggaggggcttgatctccacattttctcaggagtagttcgggcatccccatatcttctcctctccccttgtgaagaggacccagatctggcttctttcccaaggagggggtggggtgttcctcgcgtccctgtccttgaaggacctccttcccccagcctcatcaccgtgctcttctcagcgccaccctcagcagccagattgcaacaccagggagaggcggatgcagagccccaccggtgggaaagttgcctgtggaagggagccttttgctacaatttgtaacttattttctaaagtctattttgtaacaatttatttaagttt

SEQ ID NO: 14772 - DNA, 313 bp, Homo Sapiens
  misc_feature (155)..(164): n is a, c, g, or t
ctgccctctctcacgcagggcatgagttctgctcccaggaaagagattcttgcaggattttgtctgtggttctaaggagacaagtaggtggcacacaaaaacagaaaagtgaaagaacccatccctccaaaaccacacacacaaagcccaaaggnnnnnnnnnngcacataattatcatgtaggcactgttgcagctaatcactgattttggcctcaattctgaacaagttagctggtttagacaaacccctgattaggtaatggattgttattcattcctccccttctcctagtcattagtccgtgagagag

SEQ ID NO: 14773 - DNA, 547 bp, Homo Sapiens
gccagccgccagactgctgtcatcaccaacaatgttttcaacccatggtggaacacggagtttgcgtttgaggtagttgtgcctgacctggccctcatccgcttcttggtggaagattatgatgcctcctccaagaatgacttcattggccagagtaccatccccttgaacagcctcaagcaaggataccgccatgtccacctcatgtctaagaacggggaccagcatccatcagccaccctctttgtgaagatctccctccaggactaggctggaggaagccagtggggtccccccggagagggctgggccctctgtccacatgtggggacagggctggtgtggctgctcccagcctcttgctcagagctaggcccccaaattgccttcagccctaacatagtgtctgctgctgcctccctggggaccaggagctagcccagtccctggagctgtccttcattccgttaggaataacactgcagccctctcacacctaccggccagcgagtggtcaaggatttttataaaaatcacgataagatta

SEQ ID NO: 14774 - DNA, 505 bp, Homo Sapiens
aggggaaaacctcttcatggaaagcgtacttgcggctctggcctgccatctccgtgatcgccccaaaccttgcttatttatccaggcatccggagggccctgagccctccaaaagttgaagccacattcctcgaatgcgcggaccagaaaaaagccccttgggctttgcgtcacgtggaacaccaatcggggatctgccacgaggccaggcccttgctgggttgctccttgagcgcgaaggcccccgagaagctgctggcctacgaaggcgtgcgggcagcgcttgaggccctgctgccctacactgagcggcactttcagcggctcagcaggaccctccaggccgccgctttcttggacttcctgtggcacaacatgaagctccctgtgccgccgccgcccccaccccctgggaaacccataaaggcgcactgccctagccggtccggcctctctccagtccatcctgaacccctggaaaacccataaaggccgctctcctggc

SEQ ID NO: 14775 - DNA, 969 bp, Homo Sapiens
gtgaccacgaaggctgtgctgcttgccctgttgatggcaggcttggccctgcagccagggctgccctgctgtgctactcctgcaaagcccaggtgagcaacgaggactgcctgcaggtggagaactgcacccagctgggggagcagtgctggaccgcgcgcatccgcgcagttggcctcctgaccgtcatcagcaaaggctgcagcttgaactgcgtggatgactcacaggactactacgtgggcaagaagaacatcacgtgctgtgacaccgacttgtgcaaacgccagcggggcccatgccctgcagccggctgctgccatccttgcgctgctccctgcactcggcctgctgctctggggacccggccagctctaggctctgggggggcccgctgcagcccacactgggtgtggtgccccaggcctctgtgccactcctcacacacccggcccagtgggagcctgtcctggttcctgaggcacatcctaacgcaagtctgaccatgtatgtctgcgcccctgtcccccaccctgaccctcccatggcctctccaggactcccacccggcagatcggctctattgacacagatccgcctgcagatggcccctccaaccctctctgctgctgtttccatggcccagcattctccacccttaaccctgtgctcaggcacctcttcccccaggaagccttccctgcccaccccatctatgacttgagccaggtctggtccgtggtgtcccccgcacccagcaggggacaggcactcaggagggcccagtaaaggctgagatgaagtggactgagtagaactggaggacaagagtcgacgtgagttcctgggagtctccagagatggggcctggaggcctggaggaaggggccaggcctcacattcgtggggctccctgaatggcagcctgagcacagcgtaggcccttaataaacacctgttggataagcc

SEQ ID NO: 14776 - DNA, 415 bp, Homo Sapiens
tgtagagacgaggtctcgttcatgttgtgtaggctagtctcgcactccccggctccatgaccctcccatctcggcctcccaaaatactaggaccacaggcataagcaactgtactcggccagccttgcagatactgacacttggggccaggtaagtctttgctgtgagggccgtcctctgtactgaagagtgtttagcagcaaccgtggcctctacccaccctatgccagaagcatcttccccattcagttgtgataaccaaaaatatctccagatgtctcctgggggacaaaatcaccccccactgggagccattgagttaaagtaaactaaccaggcacagtgccagctccgtaaatgacagtgatcagcactgaaatgattgtgctgttaaagatctgagatcatcaggtgc

SEQ ID NO: 14777 - DNA, 670 bp, Homo Sapiens
  misc_feature (38)..(38): n is a, c, g, or t
tcagcaaacactgctcataatggaaagttaatggctantgttttacaagtgatggacttcacctcctcactgttggtacagataatcgaatgaggctctggaatagttccaatggagaaaacacacttgtggaactatggaaaagtttgtaataacagtaaaaaaggattgaaattcactgtctcctgtggctgcagttcagaatttgtttttgtaccatatggtagcaccattgctgtttatacagtttactcaggagaacagataactatgcttaagggacattataaaactgttgactgctgtgtatttcagtcaaatttccaggtaagagtgatacaggaatttaaaatgttcagctagctagcttgccagaccagttatatgtaaaagaataaattatgattttattctgaggagttatacttttaatccacatttgtagtaggatttatttaatagagaatagcacagcctagattgttagacagcatacaatgtatgaatgaatcaatataatactgtgcaacttgattggtataaattctgtttcttttgcatatgaccttcatttatttaacaactgaaaatctgtggtgaattaaaataatttcttgaaacaatcttttgggtaagaaataaaatataggcatttaatcataaaataaaa

SEQ ID NO: 14778 - DNA, 450 bp, Homo Sapiens
  misc_feature (155)..(168): n is a, c, g, or t
gggttgtagatttttggataaaggtgtttctgattctagtgagtctgagaactggaaaagaccaagaaggggttgatgatttacaaggtccatagaaaaactttttgtgtggtcggaagttggccaagcagagccccacagcctgatgctactgnnnnnnnnnnnnnnaaagatctgaattccctaaagatcaagagggttcagctggccttgggagatgtttgctggagaatgacttcagttttctcctaaggcaatcagattgcaaccattagcattgtatcttatctgcaaatcagtttactccgaggttccccaaggatagttttattaggaccacaggactttactaaccactgaggtaacacgctgcttgtgcagcaattattttgaggtggaggtatttatgggacaagtttataattccatttattaaagggactaacctaa

SEQ ID NO: 14779 - DNA, 531 bp, Homo Sapiens
tcttttcctcgtcagaagccctcggaccccaatcggaagcctaactacagcgagctgcaggactctaatccagagtttaccttccagcagccctacgaccaggtccacctgctggcagccatcccacgaggtgtgactaactatgcaataatccacccccaggtgcagccccagggcctgcggaggcggtggcagactagagtctgagatgccccgagcccaggcagctatttcagcctcctgtttggtggggtggcacctgtttcccgggcaatttaacaatgtctgaaaagggactgtgagtaatggctgtcacttgtcgggggcccaagtggggtgctctggtctgaccgatgtgtctcccagaactattctgggggcccgacaggtgggcctgggaggaagatgtttacatttttaaaggtacactggtatttatatttcaatacattttgtatcaaggaaacgttttgtatagttatatgtacagtttattcatattcaataaagcagttaatttaaatattaaaa

SEQ ID NO: 14780 - DNA, 605 bp, Homo Sapiens
gcggccgcactggccgcactcgtagggcttctcgcccgtgtggatgcggtggtgctggatgaagcccgaccagccgcggaagcgcttgccgcactcgtggcaggcgtagggcttctcgcccgtgtggatgcgctggtgcttcaggagcagcgagttatacttgaaactcttgccgcaggcctcgcacctgtgcggcttggccccccgcgcgctgccctgccggctccgaccgaagttgactcccagctcggcagcccgctcgggcgcaccctcgggcccagccgctgcttgctgcacgagcgtcacgcgccaggcgccccgcggctgggcgcaagggacggccccaggcggctggcccgccggccgctccgcgctggattcaggcccgaagccggcgctgcaccgggccctgcggggaaggctcctcaggaggctgcgcagcgccccgcccgccccctcgtcaggggcctgagagccaggagagcgtggagcctgctccggcttgggctcggagtcgggccagaaggtgtctctgccgatctccacttcctctacgtcttggagatccaggtcggacggctgggagagcaccttagggctggagc

SEQ ID NO: 14781 - DNA, 563 bp, Homo Sapiens
aaggagatgaagttatgagggtactgtggctggtactttctgtactaaacatttcctttttctattttaccactaattttgttttaaactgtgagccgtccaagtcagaagaagacagcaaaaaaagcaacttttccaacatacaatttacttttaataaagtatgaatatttcattttgagaacattccctggaattgccacataattcattaaaaacatttttttaagcaacacttggaacagtgtttactttaaatccttaatggccttaattaattctcagattcctgccccatcacttacagaaccaattcactttagagtgactaaaaggaaacgatagcctagctttctaaagccacgctgtgtccctcaattacagagggtaggaatgggtatacctctaactgtgcaaagcagagtgaaattcaattcatagaataacaactgctgggaatatccgtgccaggaaaagaaaaatttctggcaaatattttgtcactgctgtaaagcaaaatatttgtgaaagtgccaaaataaagtctgtcatgccaaaagtaa

SEQ ID NO: 14782 - DNA, 583 bp, Homo Sapiens
aaagagacagtcttacctcattctgtcacccagaatggaatgactttctaaaattgcagaaagcagaacatattccttgctgtttataatattatagtcgtatcaaagggaaagagtatttctccttaaataaaattacaaataagaaatgtatgttttactcttactcataaaaggtattgtagaatacaaaaggtttttcaaactggttttgtctttgattggcttttataatccacacttcaaagaagaaatgcatttaacttttaataacttagtcaaaaagtataatgttgccttgccttgcataacctttaactattgcaaatgatgttttgtccttcccctttgtccagtattttccaaatggtcaacagtttaaacatttaagcttgcactgagaaaccttgccacatttcagcagttttgttttgcttttggtggagagcacctgatctcgactttacagccaatgtatttactctaaattacacttttatagatacaaggtaaagtgtagctgggtgaaggcactcaggagccataaaatgtggtcaaccacaataaattaaaatgtaagcta

SEQ ID NO: 14783 - DNA, 293 bp, Homo Sapiens
ctggatgggttgaaactgaaaggaaatacatgtgggtgagagtgttacgttgtttctgacaatttttataagaaatgcttccccaggtagtgctttaaaaacaaagttacaatctacacaggacacacatgtggggtgtagcttctgctagtatggaaagctagattgcttgaattagcactggaagacctgaactacagaacctgatgactctcttctaattgacagatttgctttaagagtcacaacttgaattgaaaaacatctgtgttattgagattaccgtggtccgt

SEQ ID NO: 14784 - DNA, 373 bp, Homo Sapiens
cattaaattatcaccagaaaagtgctgtgatggaaaatataaattgaaataccttttctggttaggagagtaattctgtttttctgatagagaatagaagagtccttcaggcccctccaaactgtcatattccgggcatcgggtgtccccatcctcacttcagtccacaggcagggtcctcagtcttcagcgctccttctctttcccctttgtcttgtgtctccttgggtctcttttctccaagacctaaactccctgaggacaggactattttttacatcttgatgtcactcctgagcacttgctttaatgtgttggacactgggtccattaaagattgtatgtgaaattataaaagaaacgttttcacctt

SEQ ID NO: 14785 - DNA, 458 bp, Homo Sapiens
tgaaatgctgggtggtcactgctgtagggaggggaccccctgatatatgtccttcccacccactcttccactgtggaacctcctgtcatttaccactttcaacaagatgacagagcgacctgctcagatgctagaggggaggggactgcaaggaaagatggctaggaaacccagtcctctccacaccctagagtaacttgatgccttgctgagggacacaggccaagttcaattccttggaagtcaagggagactgagaagagtacagctgcagcactgacgggagtgactgaacttcttaactggggatggtgggaggcttcgcagctggtgaggtggcatttgcagctaggcctctgcacagaggagcaggtcttagcaacttgcattttaggtagtacagcattgcgcgtgcaagggtgacactgtgagcggggatggcattcaggaaaatccaa

SEQ ID NO: 14786 - DNA, 420 bp, Homo Sapiens
tttcgtttgtccaaacatttattgaaatgccaggcattgtgctaagcactagagatataacagtgaacaaggcttatatggtccctgcccttacaaagcttacagtctagcagtgatcaataagcagtaacaataaagtgtgccaagtgtatgtctgggaaagaacagggtgtatagggaatggatagtaagggcacctaatctagagggcatcaatgaaggtttcctagatgaagtggcatactgagaccttaaagatgaagataaatttgtattgtaccctaagagcaatggtgaaagcaatgcagtgacatgatcagtaagtcttttggagcaatttggttgtagtgtagaaaggaataaaaataaaaaacagggagactaataaggagctgttgctataatttaggtaggttgatg

SEQ ID NO: 14787 - DNA, 561 bp, Homo Sapiens
agtacacctctctcacggtacattatagtccttcctacctagcatctggctgctatctacgataggaatgtatagctgctggtacgatcactcctccactgaaatatgggcttcatgtctggacccctgtgggactgacagagcctggtcctcagtcatgtttagttgggctagatgaatcaactcttggtcaaagggacaaaagacagatgaggagatgtggcttcaatcaggatcagtgtggaacagtgagacctgcgcatggcactgataggagggatgggttccacctgccagccttgggggtcctgcagccgacaggactttgcccactgggacttgtctgccaaactttgggtacagagccttagcttcacaggccccaagccaggagcccctccccaggtaggccagcagggatggagggaggcctgtcgagggtttcttgcacactcagatccaagtctcagagtggtggtccctctgctggactctcacctacccgctcctgttatcagaagtgtcgcaggtgacagtgtggtcactggggtgggaggacat

SEQ ID NO: 14788 - DNA, 485 bp, Homo Sapiens
ccttccggggctgattgtctgtcgttgcagtagctgtaggaaggggaggccattttccgtttctgggaggagtgaggggcaacgggtcggagaaaaaggaaaaaaagaagggcttcagcgcctccccgccgggccgtggacagaggggcacagtttcggcaggcgggtgaggtcgctgagggcccgccggagatgttttccttgtcgagcacggtgcaaccccaggttacagttcctctgagtcatctcatcaatgccttccatacaccaaaaaacacttctgtttctctcagtggagtgtcagtttctcaaaaccagcatcgagatgtagttcctgagcatgaggctcccagcagtgaggtaacttagatatatttagtacattacgttcctcttgcttgtatcgacatcattcaagagctcttcaaagcatttgttcagatctacagtaccggccaggtatgaagcaacaaccataaattgtg

SEQ ID NO: 14789 - DNA, 551 bp, Homo Sapiens
tcggccctgctgttctcctcctcgaacaggggatgaacctccaaaccccaaagccagacccactcaagataaccaaggggaagctagggggccccaaggagaccccacccacatggaaatctttcccctgccccaaggcttcggagggactattcgtatgaaagagtgggtcctacctcttgccggggtcggggccgaggcgagtattttgccagagggaggggtttttgggggacctatgggggacgagggcggggagcccgaagccgggaattccgcagttaccgagagtttcgaggagatgatgggcgtggaggtgggacagggggaccaaaccaccctcctgctccccgaggccgcactgccagcgagacacggagcgagggttcagagtatgaggaaatccccaagcggcgccggcagcggggctcagaaacaggcagcgagacccatgagagtgatctggctccttcatacaaggaggctcccacacccaaggagggaacactcacccagggtccctctctgctccctcactcaccaggagcacc

SEQ ID NO: 14790 - DNA, 290 bp, Homo Sapiens
cgagctcgctacccttcttctcctcccgagtagctgggactataggcatgtccaccacacctggctaaattttaaaaattgtttatagatagtctccctatgtttctcaggctagtcttcaaccggccttgtgcgatctgcctcggcctcctgaaagtgctgggattataagtgtgagccaccacacctagccacgtgtgctgtttctgatcggttttacatgaactggttaaactgttcctaaaaagcttacttgtaatattgcctttttccgaggaggagaagcagca

SEQ ID NO: 14791 - DNA, 835 bp, Homo Sapiens
cagtcgtagcctggtcaccatgcagtactccagcaggaagagcaggtgccgcagcgccatgccccacctccagcgggtgtgcccatggaatggtgagaggcggagcacgctcagcttccctgtggctgtcaatccccaccaggccagtgacgtccacgatagctgcatagcctttaagtggacggctggggccctgcggtgcggggtggcgcttcatggccggctcatccacaggcctcggggcctgcagagctgtagaagacggccatggtctgcagtgagagccggtgcacgatgtggacgctgccgtcgtggaaggccaggccagcccgaggccagggtagaactgtgtgtcgctggccaccttgaggtcggtgttggtgagcgagatgggcagcttggggcagcgccacggccgacacacggtccagatcgttggtggccgataggatccgccatttgagaacttgtgggctgtttgtcggccaaccacgggggagatctgctggaaggatgtagatcacggggagtccctcctttgcgcagggaccagcactccacgatgctgctggtctggctggacgcgcacaaaaggcacctgcttccgacatgtccccggggccaggaaactttgagcgtggggttgatgcgccggcggaaactttgtcccttgccgagttgcaggggtcgggggggctgccacgcggccacttgcaaacaagtcggtatgggccaagggcaatcctcccgatgctctcgattaccgtgtcaccatttcatccgcgtttcaacccaacgtgcttccaacgtcaacaaacccgtttgtgatgtaaac

SEQ ID NO: 14792 - DNA, 509 bp, Homo Sapiens
tccctcccctactgagaggacttagtactcccagacatgggaaggaaggttcagggtctgggcatccaaaagagtaataaaatcccaatacatgctccctttttcctggcccatgtgttgttttcacgtgacactgtctcactgaggacaccaaattgtagtgacaactgtccagtctattgacttgttctaggtcaggccctgagcctgactgtaagcatacagaaatgaacatgagtttcgctgtctggtggcaggagaaaataatttgaatatgctgtggtttgtagtaccacactggagaaaagctggggaatgccttcccagcaatgatgatgatgatggttgacctggtgtctgaagagaagtacggggtcatgcagaggacaagatgggagaagcagcacccataaaggcatcgcgaagcgaggctggggcaggccagtttggattcatcctgtaggcagaggagaccagggaatcttataaatagacatgggcaggaccca

SEQ ID NO: 14793 - DNA, 410 bp, Homo Sapiens
aggtgcttttcaaaagagtaactgaaattgttgcaggccaaaacagcaatatgatatctcagatttagttcaataagaacagtgaaacttttggttcactaataaattttgagtaaattagtggtgaagacaaaatataacttgttttagtgagccactgaggaaagaatatgcttattacaaagacaaaatgtggtgcagaaactatcttgcacctgtgtgcataaactgttagtcgtgactgacttggtgtgttgctattgtgtttctatatactccgtccaatatagataatgttttaataacaactgtgggataaaagttatcttccccttggaaagactaatgagcacaatgatattaatcacttttatggtgaataataaatgcaataattgcctcatgggtga

SEQ ID NO: 14794 - DNA, 365 bp, Homo Sapiens
atctgtcccacacactggtgaaggtgcaccaccagctgtccctctgcaaaatccagagcccctccaggaatccccaccccaaactccaggcagctcacatctcagtagatctccctctcgggcaccttccccctcttcctctcaaagcaccaccccagtcctgcccgtcagcacaccaggcttctgctcaagagaagctcaagggagattagcatgtgctcatccataccacaagaattaaacaccacttgcagctgcaaggtttactagcttgaaaaatccaacactcatgaactccacactcctgtctatggggaacaggggagaaaaagaaaagcacgttagtgacagatccaggccactgt

SEQ ID NO: 14795 - DNA, 836 bp, Homo Sapiens
  misc_feature (104)..(116): n is a, c, g, or t
atggggtaatagtcgttcaatttagacctttgaaacaagctttctgggaaaatagaaaggactaggggtgtgtattcataaaaagttttaggcttcaatgtatnnnnnnnnnnnnntgtttgacaatgaaaggttcgttatttcctaaaaagttctgaaatggccttagggaccaaacgtaacaatggttttataggaatatggtccttctttgtaccaagtaccttttgccttaaaagcttccttttggggccactacgatatttttggttttcctagaaaaagggttagttcgtttatgaagaagttgatggaaaactgcaaacatatgcagaaaaggtagaataataatacaaggtctgaatgaactccattcagctttgaacctatccactcataaccattgactggcctttaaaaaaaagtattggcagaagttaatttccacctaggtgatgggaagaaagtgttcgcctgttgccagcctgtggctcctgcctggaggttacccagtggtccgccagcgccaagccgatcactccccgagggcctcacctgccaatggtgctggtatcccatgcagctcaccactggactgcgtggaaactcccttttttccaactgtattattggccttctaaggagctgttttagatgttttttctaactgcctccgcccatgccattttaatactacagatgtactacatatctgtttatatactgtacctacatctgtgctttgtacataaaagaaccagttttctcccccttgaggacagagactcatttgaacatgcataggttaataaataataaattcttatttaaaaaaa

SEQ ID NO: 14796 - DNA, 226 bp, Homo Sapiens
cctttctgggtacagaatgtcttgatggtgcagggtaagatcgtgggaaggcccggtcctccctcatctccattgccttcaactacataacaggaggagtaaatcctgctcctctgcgctccaccgccaggctgcgggagaccctgtgaggggaccgtgtggtgtgctgagagcagcaccgtcactggcgtccatctgcattcaggccacgtggagcatcgtcaca

SEQ ID NO: 14797 - DNA, 291 bp, Homo Sapiens
ggccaatcagattttctatgttctaaggacatggctgctgtagaatagcacagacgtggatgataaattatccccagaagcagcatgacagaatgcctcggggagcacttggaagggaaattgcagttctgttgaaatagaggaaaatcccttggtaaagacacagcctgttaggctcgtgtgggcctccagtatgttcaccaggggaatggctgggatttctcggcactctgcatcatccatcttttcttataggtgggaaaataaacaactttgtgatcctcctgaaaa

SEQ ID NO: 14798 - DNA, 428 bp, Homo Sapiens
agcccgtggttctggctaggctctcatgtccagacagcggggaccaggggaaaacccagccccttctgtaatcccccttcatttcctaccttccttcctcctctgtttagcaaaggagggcagctcacttggatgtccgggctgtgatggcaccaaggcaggtggagcaccaggtaccacacagctgggcttcccaccaggctttcccgcgggggtctcagggagcttctccccagcgctgctcggagtctgcaggaactggccttgttctccttagcccgtcactccatacagtattaggtgaggatggatgcgggcgctgtccttgccgggaagtcactgttgaagttgcagtggcttgttcacacctgtgggaagagaagtgaagactttctccttgcattaaaaagtctgaactgtgaaaaaaa

SEQ ID NO: 14799 - DNA, 999 bp, Homo Sapiens
gggacagcctgcggcgcagcggagggcggaccgcagtcgagtctgcagagtgttgggtctgtagccagcaaattacttcatcatctagattatccattcagttgatcctaattagcaaggataacaagaatcgtccgcactaaagtcccctgcagcgtgaccatgtcgagaccccggaagaggctggctgggacttctggttcagacaagggactatcaggaaaacgcaccaaaaactgagaactcaggtgaggcattagctaaagtggaggactccaaccctcagaagacttcagccactaaaaactgtttgaagaatctaagcagccactggctgatgaagtcagagccagagagccgcctagagaaaggtgtagatgtgaagttcagcattgaggatctcaaagcacagcccaaacagacaacatgctgggatggtgttcgtaactaccaggctcggaacttccttagagccatgaagctgggagaagaagccttcttctaccatagcaactgcaaagagccaggcatcgcaggactcatgaagatcgtgaaagaggcttacccagaccacacacagtttgagaaaaacaatccccattatgacccatctagcaaagaggacaaccctaagtggtccatggtggatgtacagtttgttcggatgatgaaacgtttcattcccctggctgagctcaaatcctatcatcaagctcacaaagctactggtggccccttaaaaaatatggttctcttcactcgccagagattatcaatccagcccctgacccaggaagagttagattttgttttgagcctggaggaaaaggaaccaagttaactgagatactgctgctggaatggacgagacattgctgcaaagaagtcaagcttttttcagacaaaaaggtgtgagggggcttgcttggtatgcttacctgggcttgtgtacctcagtggtttttgtgtacttttttcaataaaatatcaaagttgaag

SEQ ID NO: 14800 - DNA, 802 bp, Homo Sapiens
ggggggctggcgtgcggcgccgttgcgggcgggagcggctgcaacgccggtgcctgaggagcgatgccgagggaaatcatcaccctacagttgggccagtgcggcaatcagattgggttcgagttctggaaacagctgtgcgccgagcatggtatcagccccgagggcatcgtggaggagttcgccaccgagggcactgaccgcaaggacgtctttttctaccaggcagacgatgagcactacatcccccgggccgtgctgctggacttggaaccccgggtgatccactccatcctcaactccccctatgccaagctctacaacccagagaacatctacctgtcggaacatggaggaggagctggcaacaactgggccagcggattctcccagggagaaaagatccatgaggacatttttgacatcatagaccgggaggcagatggtagtgacagtctagagggctttgtgctgtgtcactccattgctggggggacaggctctggactgggttcctacctcttagaacggctgaatgacaggtatcctaagaagctggtgcagacatactcagtgtttcccaaccaggacgagatgagcgatgtggtggtccagccttacaattcactcctcacactcaagaggctgacgcagaatgcagactgtgtggtggtgctggacaacacagccctgaaccggactgccacagaccgcctgcaacatccaagaacccatcctttctcccacagtcaaacagctggtgtctaccatcatgtcagccagcacaccaccctgcgctacc

SEQ ID NO: 14801 - DNA, 1020 bp, Homo Sapiens
  misc_feature (511)..(511): n is a, c, g, or t
gggaactcaaactaaccaacccactgggagaagatgcctgggggtccaggagtcctccaagctctgcctgccaccatcttcctcctcttcctgctgtctgctgtctacctgggccctgggtgccaggccctgtggatgcacaaggtcccagcatcattgatggtgagcctgggggaagacgcccacttccaatgcccgcacaatagcagcaacaacgccaacgtcacctggtggcgcgtcctccatggcaactacacgtggccccctgagttcttgggcccgggcgaggaccccaatgagccgccccccaggcccttcctggacatgggggagggcaccaagaaccgaatcatcacagccggggggatcatcctcctgttctgcgcggtagtgcctggaacgctgctgctgttcaggaaacatatggcagaacgaaaaactcgggttggatgccgggaatgaatataaagatgaaaacccttataaagggcctgaacctggacgactgctnccatgtatgaggacatctcccggggcctccagggcacctaccaggatgtgggcagcctcaacataggagatgtccagctggagaagccgtgacacccctactcctgccaggctgcccccgcctgctgtgcacccagctccagtgtctcagctcacttccctgggacattctcctttcagcccttctgggggcttccttagtcatattcccccagtggggggtgggagggtaacctcactcttctccaggccaggcctccttggactcccctgggggtgtcccactcttcttccctctaaactgccccacctcctaacctaatccccccgccccgctgcctttcccaggctcccctcaccccagcgggtaatgagcccttaatcgctgcctctaggggagctgattgtagcagcctcgttagtgtcaccccctcctccctgatctgtcagggccacttagtgataataaattcttcccaacgtgcgaacaacaagaagagaaagaagacg

SEQ ID NO: 14802 - DNA, 429 bp, Homo Sapiens
agtccggggtctggcatccgagaaccaggagctgcgggccgagaatcgggagctgggcaaacgcgtacaggcactgcaggaggagagtcgctacctacgggcagtcttagccaacgagactggactggctcgcttgctgagccggctgagcggcgtgggactgcggctgaccacctcgctcttcagagactcgcccgccggtgaccacgactacgctctgccggtgggaaagcagaagcaggacctgctggaagaggacgactcggcgggaggagtctgtctccatgtggacaaggataaggtgtcggtggagttctgctcggcgtgcgcccggaaggcgtcgtcttctcttaaaatgtagggtcaagtaatctgctctttatccgcgtttgcgcactgggggatcctctagatctcctcaaaccaagg

SEQ ID NO: 14803 - DNA, 1666 bp, Homo Sapiens
  misc_feature (621)..(671): n is a, c, g, or t
  misc_feature (1462)..(1462): n is a, c, g, or t
ccacgggtgccacacactcggtcccgacatgatggcgagcatgcgagtggtgaaggaggtggaggatcttcagaagaagcctcccccatacctgcggaacctgtccagcgatgatgccaatgtcctggtgtggcacgctctcctcctacccgaccaacctccctaccacctgaaagccttcaacctgcgcatcagcttcccgccggagtatccgttcaagcctcccatgatcaaattcacaaccaagatctaccaccccaacgtggacgagaacggacagatttgcctgcccatcatcagcagtgagaactggaagccttgcaccaagacttgccaagtcctggaggccctcaatgtgctggtgaatagaccgaatatcagggagcccctgcggatggacctcgctgacctgctgacacagaatccggagctgttcagaaagaatgccgaagagttcaccctccgattcggagtggaccggccctcctaactcatgttctgaccctctgtgcactggatcctcggcatagcggacggacacacctcatggactgaggccagagccccctgtggcccattccccattcatttttcccttcttaggttgttagtcattagttnnnnnnnnnnnnnnnnnnnnnnnnnnnnnnnnnnnnnnnnnnnnnnnnnnnatggactcactcccaggttcacctggccacaggtgcacccttcccacaccctttacattccccagagccaagggagtttaagtttgcagttacaggccagttctccagctctccatcttagagagacaggtcaccttgcaggcctgcttgcaggaaatgaatccagcagccaactcgaatccccctagggctcaggcactgagggcctggggacagtggagcatatgggtgggagacagatggagggtaccctatttacaactgagtcagccaagccactgatgggaatatacagatttaggtgctaaaccgtttattttccacggatgagtcacaatctgaagaatcaaacttccatcctgaaaatctatatgtttcaaaaccacttgccatcctgttagattgccagttcctgggaccaggcctcagactgtgaagtatatatcctccagcattcagtccagggggagccacggaaaccatgttcttgcttaagccattacagctgcacatgaattctctagagacgcaaaacgctcaccccaaacaattcttgccgagcggctttggccccccgtggaaagctttttttagacctttcggaccttgccagccccggcgcgccgctcagtcccaacgccgtacccttgtccctttccgccgcccctccccttatgacgcaccgctggaatccctgcccttaacccgatttggccattcccctctctcccccgtactatacacccccgccccgccttccttcccgcctttgtgcgcctgtccgatcatantttccgcccatggtccacgttctccgccgcgtaacctatatcctggattctcttcccgccccgcgtgtgctacccccttattgccattttcccgttacgcggagttcgcccgaggcccggggctttgtcgccgcgtactttaggccccgccccgcctaagttccgccttcattataccgcgctgtgccccgcgccgtattaccc

SEQ ID NO: 14804 - DNA, 2281 bp, Homo Sapiens
  misc_feature (1930)..(1930): n is a, c, g, or t
cctccagctcctgctcgccggacggctcccagagagagcagacgcgccagacgcgccacccgcggggcgccgacggtcacggttcccgggcctggtgctgttcccgcccccagctgccttctgggcccagcctccactttcagcagacccagcactcagaggcttcctggggcagctgcagcccctccacagtggcccaggtgccccctatcccagcggaggcccgctatggcctctgacccccaagagcctcagccttggacaggtggctcatggagctccaggcacagagaaggccctggaggacgcagctggggagcatggggtcggcctttgagcgggtagtccggagagtggtccaggagctggaccatggtggggagttcatccctgtgaccagcctgcagagctccactggcttccagccctactgcctggtggttaggaagccctcaagctcatggttctggaaaccccgttataagtgtgtcaacctgtctatcaaggacatcctggagccggatgccgcggaaccagacgtgcagcgtggcaggagcttccacttctacgatgccatggatgggcagatacagggcagcgtggagctggcagccccaggacaggcaaagatcgcaggcggggccgcggtgtctgacagctccagcacctcaatgaatgtgtactcgctgagtgtggaccctaacacctggcagactctgctccatgagaggcacctgcggcagccagaacacaaagtcctgcagcagctgcgcagccgcggggacaacgtgtacgtggtgactgaggtgctgcagacacagaaggaggtggaagtcacgcgcacccacaagcgggagggctcgggccggttttccctgcccggagccacgtgcttgcagggtgagggccagggccatctgagccagaagaagacggtcaccatcccctcaggcagcaccctcgcattccgggtggcccagctggttatgactctgacttggacgtccttctcttcccggataagaagcagaggaccttccagccacccgcgacaggccacacagcgttccacgagcgaaggcgcctggccacagctgccctctggcctctccatgatgaggtgcctccacaacttcctgacagatggggtccctgcggagggggcgttcactgaagacttccagggcctacgggcagaggtggagaccatctccaaggaactggagcttttggacagagagctgtgccagctgctgctggagggcctggagggggtgctgcgggaccagctggccctgcgagccttggaggaggcgctggagcatgggccagagccttgggccggtggagcccctggacggtccagcaggtgctgtcctggagtgcctggtgttgtcctccggaatgctggtgccggaactcgctatccctgttgtctacctgctgggggcactgaccatgctgagtgaaacgcagcacaagctgctggcggaggcgctggagtcgcagaccctgttggggccgctcgagctggtgggcagcctcttggagcagagtgccccgtggcaggagcgcagcaccatgtccctgccccccgggctcctggggaacagctggggcgaaggagcaccggcctgggtcttgctggacgagtgtggcctagagctgggggaggacactccccacgtgtgctgggagccgcaggcccagggccgcatgtgtgcactctacgcctccctggcactgctatcaggactgagccaggagccccactagcctgtgcccgggcatggcctggcagctctccagcagggcagagtgtttgcccaccagctgctagccctaggaaggccaggagcccagtagccatgtggccagtctaccatggggcccaggagttggggaaacacaataaaggtgggcatacganaggaagaagaaaacagacaattagaactcgccaaaagcgggcggggcccgagcatagaaagtttcccccaggggggccccacatcgttatcggtttacgcccaggatttgtttgtaaccaagaggttgtgcccccctattggcagagcgcctctatttaaatacaggcgtggcggcgcagtggccgcagtggttttttacacacgttcgtgagcgcgtggggacacactcgtgtagtcgttgggcaactcttgggagaaaggcagcccctaaatagtcgggcgcgcgggcgggccacatgttgcgcacaagataccttaagagagattaaacgctccaaggcgaattttac

SEQ ID NO: 14805 - DNA, 653 bp, Homo Sapiens
acggacatgtactcactacgtttcctaaggtagcgaggcctgggtggcgaattcggtcacgaggaggacatccgagtggtggttggagaggcagccttgtcacttgctgccggagcagcagtcagaacaactgcggtgtgagaccagcccacgccccacgcctgccacgctccctgtggctgtgtggtttggggccacggagcggaggcttcaacgcggacagttcaagtataccttggaccccaacatcacctccgctggccccaccaagagcttcctcagtgaaggacgtgagatatgcgtccgtggccagaatctggacgtggtacagacgccaagaatccgggtgaccgtggtctcgagaatgctgcagcccagccaggggcttggacggaggcgtcgcgtggtcccggagacggcatgttcccttggaccctcctgcagtagccagcaatttgaggagccgtgccatgtcaactcctcccagctcatcacgtgccgcacacctgccctcccaggcctgcctgaggacccctgggtccgggtggaatttatccttgacaacctggtctttgactttgcaacactgaaccccacactttctcctatgaggccgacccaaccctgacagccactcaaccctgaggacccca

SEQ ID NO: 14806 - DNA, 1922 bp, Homo Sapiens
  misc_feature (1425)..(1463): n is a, c, g, or t
  misc_feature (1783)..(1783): n is a, c, g, or t
agtgactaagcacccctgcccggatcaactggacttttgccccctgctccgccagcctcctgcttggatctctcctgggtctccctgctgcgcctgtccaggatgcagggagctcgggctcccagggaccagggccagtcccccggcaggatgagcgctctaggccggtcctcggtcatcttgcttacctacgtgctggccgccacagaacttacctgcctcttcatgcagttctccatcgtgccatacctgtctcggaaactgggcctggattccattgccttcggctacctgcaaaccaccttcggggtgctgcagctgctgggcgggccggtgtttggcaggttcgcagaccagcgcggggcgcgggcggcgctcacgctctccttcctggctgccttggcgctctacctgctcctggcggccgcctccagcccggccctgcccggggtctacctgctcttcgcctcgcgcctgcccggagcgctcatgcacacgctgccagccgcccagatggtcatcacggacctgtcggcacccgaggagcggcccgcggccctgggccggctgggcctctgcttcggcgtcggagtcatcctcggctccctgctgggcgggaccctggtctccgcgtacgggattcagttgcccggccatccttggctgccctggccaacctcctgggagctgtcctcagcttcacctgacatccccgccagcaccaaaggggccaaaactgacgcccaggctccacttgccaggcggcccccgggccagtgtgttcgacctgaaggccatcgcctccctgctgcggctgccagacgtcccgaggatcttcctggtgaaggtggcctccaactgccccacagggctcttcatggtcatgttctccatcatctccatggacttcttccagctggaggccgcccaagctggctacctcatgtccttcttcgggctcctccagatggtgacccagggcctggtcatcgggcagctgagcagccacttctcggaggaggtgctgctccgggccagcgtgctggtcttcatcgtggtgggcctggccatggcctggatgtccagcgtcttccacttctgcctcctggtgcccggcctggtgttcagcctctgcaccctcaacgtggtcaccgacagcatgctgatcaaggctgtctccacctcggacacagggaccatgctgggcctctgcgcctctgtacaaccactgctccgaactctgggacccacggtcggcggcctcctgtaccgcagctttggcgtccccgtcttcggccacgtgcaggttgctatcaatacccttgtcctcctggtcctctggaggaaacctatgccccagaggaaggacaaagtccggtgaccgctgcccagacacagactggcaataaactcctactaaatccnnnnnnnnnnnnnnnnnnnnnnnnnnnnnnnnnnnnnnnggggggggggctaagattttccctgggggggcccttttttgtcccgccagcttttttttgttgacaagaatggtggccccctaatgtgggaggagcctgtatatatataaaagcggagaaaggcgggagcgggagttttgaaacagagtgccagattgggggaaacaaggtggtatacctcgtgggtacactctttgttggaagagagaacccttatatgttgtggtggggggtggagaacacatatattgttgggggacaacacatttatgcctctatacatgggcagatatgttacagaagggcgctctaagaggtgngcatgatattataaatgttttatagtaagggtggtatatataggtgtgtgtgtgtaagacctcggaggtgctggataatgtgtggtatggctggggtgtaggataaaagttttgaggtgattagcgggaggttatatat

SEQ ID NO: 14807 - DNA, 816 bp, Homo Sapiens
  misc_feature (38)..(38): n is a, c, g, or t
  misc_feature (77)..(77): n is a, c, g, or t
  misc_feature (80)..(80): n is a, c, g, or t
  misc_feature (260)..(334): n is a, c, g, or t
taggttcatgaaaaactgaaggggacatttaggaaganggccgccatttgatgctgtcaaggtaactacacccagancanagggcatgataaaagtcctaatgcacatagagaacaaagccctgctcagaaatgctgtcctcaccagcagaaaaggactctgtggagaaagctgtcccttacataaaaaagaagaccatactgggttagcacttgatatccaagaagtgaaatggtcgttttcgaagattaacagtttgnnnnnnnnnnnnnnnnnnnnnnnnnnnnnnnnnnnnnnnnnnnnnnnnnnnnnnnnnnnnnnnnnnnnnnnnnnncccaggacctgttacatcacgaatatgcatcaacagccacaaacagcacgctctcagatcttccccttcacttagcttagaaccgtgtcagcaggtaattggaaaaacatggaccatttcgctgataattttaaacttggatgtactggcaagaaagggctctatattttgaaatcagccaaagccaggggacctgggaacctgtgaatgggggtaccccactccaattagtacatggttttctctggggtggtggtggttttgtttttgctgcagtgcagcattttacagagtgtccagttgaattcaaataatagatgataaatcaacaagggtcctgaatgtgataactacatcacacctccccagggaaggaggcccatctctggccttttgccaaatcagcgtgaatggagaaaaagccaaagtgttatcagaggcccaggcctctggaaggaagcagaaaagtgccccagggctcc

SEQ ID NO: 14808 - DNA, 623 bp, Homo Sapiens
atttataaaactttaatgagggagaggccctaactcttcctcagctctaccaactactgaaaggaaaagctggtgctggggagccctccacaccactgactgatgaatttcagcacgtcctggcacactgggctgtgggaggtcttgatggccataaggaatttattccagttgtccttgttagcagccttccctggccgcttaaattcaattttgttcctcagaatggggtatcctgtaataaggcagggcagggctcgaacaccagtgctcgctgccactagggaggcctcgtaggcgccacgctcatcccgaggcagaacctgctccagccgctggtccatggagactgtaagcacccagtctcgaacctcttctctctcagcctcatcggtcaggatccaaaaaagcgattgaggaagatgaatgccatgttatcccagccaactgcctgcagcaaagaagagtgccaaatgggagtgaacaagctgggtttgaatgctacttctctgggatccagatgcaaatgggagtgagcaagctgggcttgaatgctatttctctgggatccagggagaaaatccaggaagacataggaggactacatcctccgtaacatcagc

SEQ ID NO: 14809 - DNA, 828 bp, Homo Sapiens
gggctagtggagtgaggggtaacaagatggcgaccgagacggtggagctccataagctaaagcttgccgaactaaagcaagaatgtcttgctcgtggtttggagaccaagggaataaagcaagatcttatccacagactccaggcatatcttgaagaacatgctgaagaggaggcaaatgaagaagatgtactgggagatgaaacagaggaagaagaaacaaagcccattgagctccctgtcaaagaggaagaaccccctgaaaaaactgttgatgtggcagcagagaagaaagtggtgaaaattacatctgaaataccacagactgagagaatgcagaagagggctgaacgattcaatgtacctgtgagcttggagagtaagaaagctgctcgggcagctaggtttgggatttcttcagttccaacaaaaggtctgtcatctgataacaaacctatggttaacttggataagctgaaggaaagagctcaaagatttggtttgaatgtctcttcaatctccagaaagtctgaagatgatgagaaactgaaaaagaggaaggagcgatttgggattgtcacaagttcagctggaactggaaccacagaggatacagaggcaaagaagaggaaaagagcagagcgctttgggattgcctgatgaaaagttcctgatactttctggtctccaggggtttccatttctctcccttcttcttgggcacatatatgccctaaatgcacagtcatgtggcctacgtcctgcctcgcaatgaggggagcaggtacccccaggtacatccatggaactgcggcagcagtttgacttt

SEQ ID NO: 14810 - DNA, 727 bp, Homo Sapiens
tacatcagtggcaccctcaatgctctgattgtgcgtcgctacctctccctgctggacacggccgtggagctggagctcccaggataccggggtccccgcattccccgaaggcagcaagtgcccatctttccccagcctctcatcaccgaccgtgcccgctgcaagtacagtcacaaggacatagtagctgaggggttgcgccagctgctgggggaggagaaataccgccaggacctgactgtgcctccaggctactgcacagacttcctgctgtgcgccagcagctctggtgctgtgcttcccgtgaggacccaggaccccttcctgccatacccaccaaggtcctgcccacagggccaggctgcctctagcgccactactcgagaccctgcccagagggtggtgctggtgttgcgggaacgctggcatttctgccgggacggccgggtgctgctgggctcgagggccctgagggagcggcacctaggcctgatgggctaccagctcctgccgctacccttcgaggaactggagtcccagagaggcctgccccagctcaagagctacctgaggcagaagctccaggccctgggcctgcgctgggggcctgaagggggctgaggggatgatgtggggttcaggatggcccccccatggggggtggatgatttgcactttggttccctgtgttttgatttctcattaaagttcctttccttcaaaaaaa

SEQ ID NO: 14811 - DNA, 735 bp, Homo Sapiens
  misc_feature (632)..(632): n is a, c, g, or t
ggggggtttgacggaaggagcggcggcgacggaggaggaggatggaggcggtggtgttcgtcttctctctcctcgattgttgcgcgctcatcttcctctcggtctacttcataattacattgtctgatttagaatgtgattacattaatgctagatcatgttgctcaaaattaaacaagtgggtaattccagaattgattggccataccattgtcactgtattactgctcatgtcattgcactggttcatcttccttctcaacttacctgttgccacttggaatatatatcgatacattatggtgccgagtggtaacatgggagtgtttgatccaacagaaatacacaatcgagggcagctgaagtcacacatgaaagaagccatgatcaagcttggtttccacttgctctgcttcttcatgtatctttatagtatgatcttagctttgataaatgactgaagctggagaagccgtggttgaagtcagcctacactacagtgcacagttgaggagccagagacttcttaaatcatccttagaaccgtgaccatagcagtatatattttcctcttggaacaaaaaactatttttgctgtatttttaccatataaagtatttaaaaaaaccccncccctggcctcgccctcttaaaaataacgttcctgtgtcgggccggcgttcgggcccctccgaaaaaaagtttttcctaaaaacccattttcggttttttggg

SEQ ID NO: 14812 - DNA, 483 bp, Homo Sapiens
  misc_feature (65)..(109): n is a, c, g, or t
gtgactgccatgtccagctgtctcctactgtagcattgcacacacagtgctcaaagtgtacatannnnnnnnnnnnnnnnnnnnnnnnnnnnnnnnnnnnnnnnnnnnntgtatagagccacccaatatagcccacagagatacactcatacaacagaatatgaaccacacagagactacacacacagcatatggagtccacacaaagagcacgacctgggcagacctacacattgatcaattcagccagcagaattaattcattgtattcagttgtttatattgaacacctaacattgtagtagacactggggattcagcagtaagcaaaacagatgcaaatccctgtctgccctcaagggactcatattctaatgagtgagccaggctagaaatcagataaatacataaaatatagtgcatggcagatggcgataagggctaaggaaaaatagaaagtagagaatgggaatagggaagtcc

SEQ ID NO: 14813 - DNA, 837 bp, Homo Sapiens
gggtccggaattcccgggatgagctgttcctcgcgggccgccgggtgctggtcaccggggcaggcaaaggtatagggcgcggcacggtccaggcgctgcacgcgacgggcgcgcgggtggtggctgtgagccggactcaggcggatcttgacagccttgtccgcgagtgcccggggatagaacccgtgtgcgtggacctgggtgactgggaggccaccgagcgggcgctgggcagcgtgggccccgtggacctgctggtgaacaacgccgctgtcgccctgctgcagcccttcctggaggtcaccaaggaggcctttgacagatcctttgaggtgaacctgcgtgcggtcatccaggtgtcgcagattgtggccaggggcttaatagcccggggagtcccaggggccatcgtgaatgtctccagccagtgctcccagcgggcagtaactaaccatagcgtctactgctccaccaagggtgccctggacatgctgaccaaggtgatggccctagagctcgggccccacaagatccgagtgaatgcagtaaaccccacagtggtgatgacgtccatgggccaggccacctggagtgacccccacaaggccaagactatgctgaaccgaatcccacttggcaagtttgctgaggtagagcacgtggtgaacgccatcctctttctgctgagtgaccgaagtggcatgaccacgggttccactttgccggtggaagggggcttctgggcctgctgagctccctccacacacctcaagccccatgccgtgctcatcctacccccaatccctccaataaacctgattctgctgcccaaaaaaa

SEQ ID NO: 14814 - DNA, 1022 bp, Homo Sapiens
  misc_feature (677)..(677): n is a, c, g, or t
  misc_feature (903)..(911): n is a, c, g, or t
ggtcagctttctttaacttaattgtggtcgtgttaatgtagcacaaaaaatatattttaatgaagattaaatattataatttgaggttttggggactggtgctgattccaaaaagttaatttaataatatataccaacagattgtttgtcacgcttctgaaccaatgactgaatgtcaagatgttcgttaatttctagatgtttgtttcaagaccagctgtttcagatctattaatgtagggaatttttccctaagattgaattcctatatttacttggtaagatccactaatctgttatagggagttgttttctcttgccttatagttgagctatttggtttgacaaagctcagcagaaacttgatgtgaaaaatctacgattttcttctacattcattgatgccccttgtaatgtttgcatacactagaaaatgccttcaatttgtgttttaccagaattttgatactggtcagaaattttatactgccaacaaagaagactcaacttctcagatctataatgggatacattgtcatcctctagcaactcctatatagaaagttttaactgaatatgttacatataagaatttaattcttctcaaataattcttaacctcagtaatgaggcctaaatttactctgcttggctctctacacatggcatttcagggntataagatgtagcatttcaatgtgtaagatatatgtactaaacatatgtgttgctatcttcatcattaacatccttcttttctattgcttggctgtaatttttgtaaagataaattatattgtttttttgtatgtgtgtttgtagtatatgttcagaaggcaagcatcttcattttgctagctttgcagaatcttaaaatgtgtactcgttatttctaatgatgtnnnnnnnnntccctagtcctgtttagcatttgacttttttatatgttttaaatgttgctggatttttgtgctgtttgccaaacttatacaataaataaatgaaatattgtgctgattttc

SEQ ID NO: 14815 - DNA, 1674 bp, Homo Sapiens
  misc_feature (890)..(891): n is a, c, g, or t
  misc_feature (893)..(997): n is a, c, g, or t
  misc_feature (999)..(999): n is a, c, g, or t
  misc_feature (1007)..(1010): n is a, c, g, or t
  misc_feature (1049)..(1063): n is a, c, g, or t
  misc_feature (1141)..(1165): n is a, c, g, or t
  misc_feature (1216)..(1225): n is a, c, g, or t
  misc_feature (1287)..(1307): n is a, c, g, or t
  misc_feature (1346)..(1354): n is a, c, g, or t
  misc_feature (1424)..(1444): n is a, c, g, or t
gggccgcctacctcgcccaggctgccagaccggaagcgctccgctgtacctggatcctgctcctctgggttgaaacccgggcgccgccaagatgccggcttaccactcttctctcatggatcctgataccaaactcatcggaaacatggcactgttgcctatcagaagtcaattcaaaggacctgcccccagagagacaaaagatacagatattgtggatgaagccatctattacttcaaggccaatgtcttcttcaaaaactatgaaattaagaatgaagctgataggaccttgatatatataactctctacatttctgaatgtctgaagaaactgcaaaagtgcaattccaaaagccaaggtgagaaagaaatgtatacgctgggaatcactaattttcccattcctggagagcctggttttccacttaacgcaatttatgccaaacctgcaaacaaacaggaagatgaagtgatgagagcctatttacaacagctaaggcaagagactggactgagactttgtgagaaagttttcgaccctcagaatgataaacccagcaagtggtggacttgctttgtgaagagacagttcatgaacaagagtctttcaggacctggacagtgaagggagcccgggcagccaccgtctccagagccctgggcagcattttccagcaagatgtacacaatcttttgcctttatttcgtaaagttttatacagaagagagaagagcatgtctttacttgaaaaactcttgatcaagaatttgggtgggagaaaagaaagtgggttatcaagggtgatttgaaattttctgcagcattaaagctggcgcttaataagaataagtaataataaagaaatttctaacattccatgtcaaannannnnnnnnnnnnnnnnnnnnnnnnnnnnnnnnnnnnnnnnnnnnnnnnnnnnnnnnnnnnnnnnnnnnnnnnnnnnnnnnnnnnnnnnnnnnnnnnnnnnnnnnnanttttaaannnnttttggccccccacaatcttttcaaaaaacttttttttnnnnnnnnnnnnnnnaaggggagaaggacattgggaccaaatcggtgttccaaaaagaaaattcggggtaaaaaacatagggggtggggcttnnnnnnnnnnnnnnnnnnnnnnnnngggagggaaccccgagggggtcttgaaagaaattcccaaagggaactctcnnnnnnnnnnttattgggggtccttaacaagggaggggctcccaggggaggccccacatttcagattttagnnnnnnnnnnnnnnnnnnnnngcccggaaaatttgtggggaaatatttaagagagcactnnnnnnnnnaatcttgtgaagcgcaaacataaaaacccgccattgtagataaaacttgtaatctgtcgccgggcggtcnnnnnnnnnnnnnnnnnnnnnattgggtgaaaaaggaattggagccccacaggaggacaaacccggcgggggcggaaaaagaatgctggacaccataaatagtccgccccccatctattgtcctccacatgtgtgggggagaaatacccccgccgcggatttttgcgtccgggaaacgacaaaaaataataccttctccaacgaagacccccttctatcggaaaataatggtgagcgagaatatctacgcc

SEQ ID NO: 14816 - DNA, 822 bp, Homo Sapiens
ggggggggctacgtcgtgccctgcgcgtgagcagctgcagcggcagaggcagcatccagcggcggcgccagcagttccagtccgttgctttactttttgcttcaccgacatagtcattatgccgaagagaaagtctccagagaatacagagggcaaagatggatccaaagtaactaaacaggagcccacaagacggtctgccagattgtcagcgaaacctgctccaccaaaacctgaacccaaaccaagaaaaacatctgctaagaaagaacctggagcaaagattagcagaggtgctaaagggaagaaggaggaaaagcaggaagctggaaaggaaggcacagaaaactgaatctgtagataacgagggagaatgaattgtcatgaaaaattggggttgattttatgtatctcttgggacaacttttaaaagctatttttaccaagtattttgtaaatgctaattttttaggactctactagttggcatacgaaaatatataaggatggacattttatcgtctcatagtcatgctttttggaaatttacatcatcctcaagtaaaataaatatcagttaaatattggaagctgtgtgtaagattgattcagcattccatgcacttgctttaaaatttagtcctgtgcatactgtggtgtttttactgtgcatatttgaatttttcatgcagtttttctagagcaataatcagtggtgcttttgtacctaggttttatgtgattttaatgaaacatggatagttgtggccacctgctgactatttgtggtttaaaataaaaaggtttacttgtctgcccaaa

SEQ ID NO: 14817 - DNA, 1986 bp, Homo Sapiens
  misc_feature (1506)..(1584): n is a, c, g, or t
ggggactaccaagatggcggcccccgggagctgtgctctatggagctattgcggccgtgggtggtcgcgggcgatgcggggctgccagctcctcgggcttcgtagctcttggcccggggacctactaagtgctcggctcttgtcccaagagaagcgggcagcggaaacgcactttgggtttgagactgtgtcggaagaggagaaggggggcaaagtctatcaggtgtttgaaagtgtggctaagaagtatgatgtgatgaatgatatgatgagtcttggtatccatcgtgtttggaaggatttgctgctctggaagatgcacccgcttcctgggacccagctgcttgatgttgctggaggcacaggtgacattgcattccggttccttaattatgttcagtcccagcatcagagaaaacagaagaggcagttaagggcccaacaaaatttatcctgggaagaaattgccaaagagtaccagaatgaagaagattccttgggcgggtctcgtgtcgtggtgtgtgacatcaacaaggagatgctaaaggttggaaagcagaaagccttggctcaaggatacagagctggacttgcatgggtattaggagatgctgaagaactgccctttgatgatgacaagtttgatatttacaccattgcctttgggatccggaatgtcacacacattgatcaggcactccaggaagctcatcgggtgctgaaaccaggaggacggtttctctgtctggaatttagccaagtgaacaatcccctcatatccaggctttatgatctatatagcttccaggtcatccctgtcctgggagaggtcatcgctggagactggaagtcctatcagtacctagtagagagtatccgaaggtttccgtctcaggaagagtacaaaggacaatgatagaagatgcaggctctctcacaaggtgacttacgaaagtctaacatcaggcattgtggccattcattctggcttcaaactttaattcctttcctatcatggagcatgaaccagtcatatcctgttgaaagcctggaactgaaggataatctggcaaatgagacagcagcagagcatctcctcttaaggatacgtgccttggactcatgtttgaatcgaacagtctcaaagtggaagaacaaattcttgtcacttttttacagctttctttggagctgcttcagtccatctcccagaggcatttggtctgtatctttgctcaactgctaatttctcttggctgtagggtgtgtggttaaggtacaaccacccctaaagctcagttttgaagtgagtgtatttatagcttctctgctggtgctgccttctagagggatgatagatcatttgaacccagtgacaatttttaaccagaaaatttaattgtacctgaatcaacctttcagcctaggacgaagtctaggcccaagtcagagtattaatgatcatgagaattgtgtgctgaaccagtaaacgagtttaccttttgnnnnnnnnnnnnnnnnnnnnnnnnnnnnnnnnnnnnnnnnnnnnnnnnnnnnnnnnnnnnnnnnnnnnnnnnnnnnnnntggcggcccgccccggcccccaaaaagtttccaaaaccatcctttggccgcggggccccaaaaggaaaggaaccagggcccaaactggttccaaaggaaacccggggcatgaataagggcttggaatcccccccataaaaaaaccccggggggaacccaaggttttgaaaaaatccaaaggggattccgggggcctttactgggttcaacaacggggggcccaggggagcttcaaattcaaattcacccccccgcccctgccatttattggaagaaggtggtgggaattccattaaacactttccgccccgaacgtggaaagcccttccccaaaaggggctgtgatagaacccgtgaaatctgccaagggcgggaaataacaaaaccctgtggggcgccccc

SEQ ID NO: 14818 - DNA, 422 bp, Homo Sapiens
gtgttctagacgatcccttgcgcgagcttccatcaaaacgctcagagacgttgtgatgatgcgactgaggattatgcaacgtggtccaaccggacacggacagctctaggtagagaaagatctctctggggctaaggtgggaatggatcagaggagggagactggaagctgggaggtttggaaggagtctggaatgatggtccaagcagaacaagatgaggcctgagctggggctggggctgtgaagatgaacaagagaggatgaagaagagaaagcagggggcagaaggaatgaagcggaggctatgggtgctggcaggggaagaagacactgtttggagctaaggcctggtgactgagggaatattggcttttgggaggaagatgctaaattcgttgtggaacttgatggaagcgtcgcg

SEQ ID NO: 14819 - DNA, 942 bp, Homo Sapiens
  misc_feature (627)..(627): n is a, c, g, or t
tagccatgacttctggatctggttcttccacagggtcagcccattcaactgtaactacatttccccacacttttacttttccactcatcagccggcgtctggcttgtgcttgctgactggtgatcctcatattcaaggaagcagaacccccgattcttctttttgtcatcgggttgatgatagagaataacgtccaccaaaccctctgtgactttactgaattcttccaaaatgttttcttttagtcttattcttcggaatggatccaacaaaaagtctgttgtttgccacagaaatgcacactccaaggtgtttaccagggcgaatttcatagctgtcacacagtttcacggcttcctgtgcagcttcctttccacagaaggtgataaatgcataccctctattctgaccggacagtggatccatcataagacgtagatcccaaatgggtccggccttctcaaaaaggggcaccaactcatcctcatataaatcccttggtattttgcctacaaatacctccgttccaattccaggttgcacgccagagtacacactgtctggtggaggaccaccatacttcctctgtcctgtggttacatccagagtataaccagttctctcaangcaaggccttgatcttcgcttcatcaggtccctttgtggactcttgcaccttgctcccctgtttctctctctgcctgtaggtcttcataactccacataaaaatgcacttttgttctgaacatgtgataagtcactttccttgaactgctgtagtacagacagagctccttcttcattaaattccctgagagcatcaattgctctttcatcaagatcgacataagctaccaatccagggcagagcgggggccggcagccgggcccgtgagaatcagcgcgaggcgctttgaaaacgactagaaatggcgcgcgcg

SEQ ID NO: 14820 - DNA, 1228 bp, Homo Sapiens
cttgcagggtattcggagtacatggatccggtcatcgggtcgggtgcaagctgatgtaagggcgccccttccttgggcccgggcccctttcgggctcgcggcgcgtcgcatggaggaacccgattccctttcccgagacgtttgacggagataccgaccgactcccggagttcatcgtgcagacgtgctcctacatgttcgtggacgagaacacgttctccaacgacgccctgaaggtgacgttgcctcatcacccgcctcacagggccagccctgcagtgggtgatcccctacatcaagaaggagagccccctcctcaatgattaccggggcttcctggccgagatgaagcgagtctttggatgggaggaggacgaggacttctaggccgggagacccctcgggcctgggggcgggtgctctgggaagagtccgctgtgccactggccaccgctagggtctccacaggcgccctccctccgggcctccctccccctcgagccgccgcgatgtcccctgcgctcctgtcccctcccgcgtagtgcttgcatttgttccaggaatagcgctccaggctcctgctgcagctcatgggcagcactctagagcgcgctgcctccgccctcttttgccagcccagcccctccatgcacatttggacgctgtcctgcacttcaggtgcaagctgggctcctgttacatactggacagaccacccacagccgctgctgccaacccacctccactcctccagactgccagccaactacatcattctgcccacagacctacgctaccactgccatcgccatccaccgcatctcaccaacagactgtggctcctagtgatgtggactcacctcggaggtatccgagctggacacagcccctggacagtgatccagacagctggccgtcccccaaggagcctgtcaccttcagcgagacccatttcctccccatccccagagacctcttgtgttcctgccacatagctgccagggcttaagtgtgcctggcaaccaaatcgaatctctcattttctcctgtggaccagttagttttgcctagaatcctgttttcttctgaatttgcagctgtctctctgatgggtgccttttgttcaacacagtaagccctgctcccttccctgctctaatacactacctgtacaaaggttttttccttatttttaataaatgtcagacactattaaatagaaaaaaaa

SEQ ID NO: 14821 - DNA, 926 bp, Homo Sapiens
  misc_feature (13)..(13): n is a, c, g, or t
  misc_feature (80)..(80): n is a, c, g, or t
  misc_feature (406)..(437): n is a, c, g, or t
  misc_feature (651)..(651): n is a, c, g, or t
actatgacgtgangcacacatcaaagaagagaatgtctggggatgtcagggatgcatttgtggccatgttcaaaagtgcnaagacaagcctctcttctttgccgacaaactttacaaatccatgaagggtgctggcacagatgagaagactctgaccaggatcatggtatcccgcagtgagattgacctgctcaacatccggagggaattcattgagaaatatgacaagtctctccaccaagccattgagggtgacacctccggagacttcctgaaggccttgctggctctctgtggtggtgaggactagggccacagctttggcgggcacttctgccaagaaatggttatcagcaccagccgccatggccaagcctgattgttccagctccagagactaaggaannnnnnnnnnnnnnnnnnnnnnnnnnnnnnnnctcttatcttcagtggagcttaggaaacgctcccactcccacgggccatcgagggcccagcacggctgagcggctgaaaaaccgtagccatagatcctgtccacctccactcccctctgaccctcaggctttcccagcttcctccccttgctacagcctctgccctggtttgggctatgtcagatccaaaaacatcctgaacctctgtctgccngagtgccatggcctgctagacgccaaacatgtggggccccctcgggcgctcgaaaagttttctacacatttctttttggaggcccggaccccggtaggttaaggggaacaggggcgcataggtggttcccgtaggagaatccccggggccctgacctaacggccttgggaattccccgccggagtagaaagaatggccctgggcgcgggaaccgggagctggtgccgaaagatatcccccaaattgggcgggcctcgcggcgcgcgtgaccgggg

SEQ ID NO: 14822 - DNA, 1285 bp, Homo Sapiens
  misc_feature (468)..(506): n is a, c, g, or t
aaagacgcgatatagtaactaacactgcatacttttactgaacacttcctgtgagccaggcctcgtagtaacatctgaacatgcaatttcacattcagtgtggaataagaagtgtcataggttcgcgtgttttttcacaactgattatgatgtccatgatgacagcgtgcactaagcgctgtgtccaaccaaccctttacctggcattttagccagcaagacccgcttgcattgcagtcgttcacggtgctcgctggcacaattttagaatgttacatgaatactcaggcctgactaaccttcccctccaaaaaacaacaaaacagaacaaggctaagcccttactactcagagacacatctgtaagaccccacagggacaagaaaagtagctgtgatctaggtctgcactaaagctgcctttcctggcactcagaagtgcccttccaggcctaactgcagaagggtnnnnnnnnnnnnnnnnnnnnnnnnnnnnnnnnnnnnnnnacggatctgcaccagcaactgaaagaggtttggggctggcccttccccagccccggtaagccacagctgccttcggatggccccgctgtggttggccccggcaatgacctgctctaggcgggcctggttcacattatctttatcaatggcccccttctctaccaccttctgtagcagaggctccagacgaatgacataagcagacaatttttctcccgggttctgataagtgttcagaaatttgatctgggcatccctagagctctcaacgctcccaaacacctgctcaagcgccttcaggcattcggcagtggttatcgcggggttgttggacttaaggatgcgaataacatcagcggcggggcctctaagactctccatcaaccgccgcctcttttctacatcggacacctgccactcctctaggacctcattagtgtgctccagccagggatcaaaggtttcctctccaggccctgggatgtccctccccgagaaaagtgtcagcctcttgtaccatatggactcaacaagaggctgaataacattatccaaaatatagtttagcatctctgctggcatctctgggcccggggtcggagtagggttctgaaacccaaggacacgggcaacatcttgcacggtccacccctctctagctaggaagaggtgcaatctttctaaaaattcagcatcagaagttgggggcttaaataacacctctccacgacccctcctttgcccgcatctcctgggatcgcggcgtaatctacagcgcc

SEQ ID NO: 14823 - DNA, 1494 bp, Homo Sapiens
  misc_feature (772)..(780): n is a, c, g, or t
  misc_feature (881)..(985): n is a, c, g, or t
  misc_feature (1129)..(1154): n is a, c, g, or t
  misc_feature (1340)..(1348): n is a, c, g, or t
ggggttggtccgcgcgttgctgcgttgtgaggggtgtcagctcagtgcatcccaggcagctcttagtgtggagcagtgaactgtgtgtggttccttctacttggggatcatgcagagagcttcacgtctgaagagagagctgcacatgttagccacagagccacccccaggcatcacatgttggcaagataaagaccaaatggatgacctgcgagctcaaatattaggtggagccaacacaccttatgagaaaggtgtttttaagctagaagttatcattcctgagaggtacccatttgaacctcctcagatccgatttctcactccaatttatcatccaaacattgattctgctggaaggatttgtctggatgttctcaaattgccaccaaaaggtgcttggagaccatccctcaacatcgcaactgtgttgacctctattcagctgctcatgtcagaacccaaccctgatgacccgctcatggctgacatatcctcagaatttaaatataataagccagccttcctcaagaatgccagacagtggacagagaagcatgcaagacagaaacaaaaggctgatgaggaaaagatgcttgataatctaccagaggctggtgactccagagtacacaactcaacacagaaaagggaggccagtcagctagtaggcatagaaaagaaatttcatcctgatgtttaggggacttgtcctggttcatcctagttaatgtggtctttgccaaggtgatctaagttgcctaccttgaannnnnnnnnaaatatatttgatgacataatttttgtgtagtttatttatcttgtacatatgtattttgaaatcttttaaacctgaaaaataaatagtcatttaatgttgnnnnnnnnnnnnnnnnnnnnnnnnnnnnnnnnnnnnnnnnnnnnnnnnnnnnnnnnnnnnnnnnnnnnnnnnnnnnnnnnnnnnnnnnnnnnnnnnnnnnnnnnnttgggggggccccctccgccccccgagaaattttcaaaacttttggttggggccgccgcggccccagaagggaaagggaaaccgggggccataagtggttccctagggaaaacccggggccaagaaacaagggggttgggattnnnnnnnnnnnnnnnnnnnnnnnnnngggggggaaaacccaggggtgtttttgagaacaaaaccccacagggggtgcggttcctgggagggccctttctctgggggattcttttccaacagggggagttcccaaaggcggagtctctataatttaacaaaattaaaaccccccccgcgccccgggggcgcttatatttggggaaagaaagcnnnnnnnnnacaatttctccattaaagccactttttgtggccgaaaattgtggggaaaccccttctcccaaaacggcgggtgtgtgggaaaaaccctcggaactcccgcacggggcggataattacacacaccccttggggcgcgcttggtagag

SEQ ID NO: 14824 - DNA, 1367 bp, Homo Sapiens
  misc_feature (269)..(309): n is a, c, g, or t
  misc_feature (822)..(973): n is a, c, g, or t
  misc_feature (1060)..(1068): n is a, c, g, or t
  misc_feature (1235)..(1327): n is a, c, g, or t
ggggcagaggtttctgggagccaagagtggtaatggcgtctgtatgatcttcggagcctgctgcatcggacctcggccagtcataaaagatgacaacagcagccaggccaacctttgaacctgccagaggtggaaggggaaaaggagaaggtgatttgagccaactttcaaagcagtattcaagcagagacctaccctctcatacaaagataaaatacagacagactactcaggatgcccctgaagaggttcgtaaccgtgacttcagnnnnnnnnnnnnnnnnnnnnnnnnnnnnnnnnnnnnnnnnnaaaatagggatcgtccaacccgagaacatacaacctcctcttcagtgtcaaaaaagccacggttagaccagattcctgccgccaaccttgatgcagatgaccctctaacagatgaggaagatgaagattttgaagaagaaagtgatgatgatgatactgcagctcttcttgcagaactggaaaaaattaaaaaagaaagagctgaagagcaggccaggaaggaacaagaacaaaaagctgaagaagagaggattcgtatggaaaacattctgagcggaaaccctctccttaatctcactggcccatcccagcctcaggccaacttcaaagttaaaagaaggtgggatgatgacgttgtcttcaagaactgtgcaaaaggtgtagatgaccagaagaaagacaaaagatttgtaaatgacacactgcgatctgaatttcacaaaaagttcatggagaaatatattaaatagtacagttttatgtgcttaattaaagactgtaaaacgtaaaggnnnnnnnnnnnnnnnnnnnnnnnnnnnnnnnnnnnnnnnnnnnnnnnnnnnnnnnnnnnnnnnnnnnnnnnnnnnnnnnnnnnnnnnnnnnnnnnnnnnnnnnnnnnnnnnnnnnnnnnnnnnnnnnnnnnnnnnnnnnnnnnnnnnnnnnngggccgggggcccccgtaggaaagggaaaggggccttactttttccccaagaaacccgggccacaaaaaggggtgggatcccccacnnnnnnnnnccccccgggggaaaaccaggtttttaaaaaaatccaaaggggtttttggggggctctttcgggcacttcttaaggggggtcccaagggggaccccaaataaaattcacccccccgccctggccatttttttgaagaaacgggggggaaattccataaaacattttcnnnnnnnnnnnnnnnnnnnnnnnnnnnnnnnnnnnnnnnnnnnnnnnnnnnnnnnnnnnnnnnnnnnnnnnnnnnnnnnnnnnnnnnnnnnnnaaaaaataattttccccccccggggaaacaaccggggggc

SEQ ID NO: 14825 - DNA, 994 bp, Homo Sapiens
cggtaccggacatatgcccgggaattcggccattacggccggggagacgcgcgggcgggaagatggcggctgggttcaaaaccgtggaacctctggagtattacaggagatttctgaaagagaactgccgtcctgatggaagagaacttggtgaattcagaaccacaactgtcaacatcggttcaattagtaccgcagatggttctgctttagtgaagttgggaaatactacagtaatctgtggagttaaagcagaatttgcagcaccatcaacagatgcccctgataaaggatacgttgttcctaatgtggatctaccacccctgtgttcatcgagattccggtctggacctcctggagaagaggcccaagtggctagccagttcattgcagatgtcattgaaaattcacagataattcagaaagaggacttatgcatttctccaggaaagcttgtctgggttctatactgtgatctcatttgcctcgactacgatggaaacattttggatgcctgcacatttgctttgctagcggctttaaaaaatgtacagttgcctgaagttactataaatgaagaaactgctttagcagaagttaatttaaagaagaaaagttatttgaatattagaactcatccagttgcaacttcctttgctgtgtttgatgacactttgcttatagttgaccctactggagaggaggaacatctggcaacaggaaccttaacaatagtaatggatgaggaaggcaaactctgttgtcttcacaaaccaggtggaagtgggctaactggagctaaacttcaggactgtatgagccgagcagttacaagacacaaagaagttaaaaaactgatggatgaagtaattaagagtatgaaacccaaataaacagccaccacattttcaaaacagatttgtaaaaattgtatttgttaacactgtgcacaaacgttttatactaaataaatatcaaactacattcttccaaa

SEQ ID NO: 14826 - DNA, 1442 bp, Homo Sapiens
  misc_feature (697)..(705): n is a, c, g, or t
gggcacggtgcctgcttacaatttcccagtgactgctatggctattgcccccaataccaacaaccttgtcatcgctcattcggaccagcaggtatttgagtacagcatcccagacaaacagtatacagattggagccggactgtccagaagcagggctttcaccacctttggctccaaagggatactcctatcacacacatcagttttcatcccaagagaccgatgcacatccttctccatgatgcctacatgttctgcatcattgacaagtcattgccccttccaaatgacaaaaccttactctacaatccatttcctcccacgaatgaatcagatgtcatccggaggcgcacagctcatgcttttaaaatttctaagatatataagcctctactcttcatggatcttttggatgaaagaacactcgtggcagtagaacggcctctggatgacatcattgctcagctcccaccacccattaaaaagaagaaatttggaacctaaaaaagggcactgtctgtgtccttccttgaactgtctaccatgttgcttttcacaaatcatggtaataaaacaagttattcttgaaaataacgctccaccgaccaagacggacgagcggagatgcccaaagcaaaaagcacaattcctaccacaccggccagaaaaaaaataggagggatcgatcttcggggnnnnnnnnnaaagggggccccgaaaataacccccacccccggttttatctgcgaaaaaaaggggcccccccttaatggccccccttattggtaacacataagtcttggggccaaacgcattatacgaacccgctggcaacaagagaaacacatgggaaatacccttggggacctctatgcaaaaaaggaaaccaaccaccctcatacgggcgtctagaacggccattgtgaccacaaacacaaccctatttggagaagattcaaatgcccgtcttattggagggaaactcctcaatacgctctctcttcagcgcgcataatgaaaggcgctgttcttaagcagttagaggtgcgctgaataccaccgtcgtcctgttcttcgacaccgactgtggttcctgcctctctcctcgtccaagcgcttaaccattccgccaccatcctcatcttctaaaacaacacagaagggagacgcatcagagtgagctctctcaactcgcctatccttcttgttcgccactcgacatccttaccagatgctctcgccccgcccttgcgcccctccaacgacgctactttcattttttcacgggaagcgcgcccaactgcgcattggtgtcacaaccaataaaaggggtgacggaatgttgtgttaatggcctactcgcatctacaacacacatccccacgattatcacccccacacgtatttatcctccggaaaaggacaatcgccttattattcc

SEQ ID NO: 14827 - DNA, 269 bp, Homo Sapiens
ccctgggtgaatgcatgtgggatgtgtgcatgtgtgcatgtaggtcttggctcagaccctgcttcatggtggacaccacctgctgtgtctccccaacacctggtgtgtaccttccctcatggtccatgggactgggctcttgcttccaagtttcttcaaaggaagaagatagtcattgccccgagcggggcaaatcaatcatcttgtactaatgggaatggctttgggaagtgcccacatgcatgcacccagggcgatcctctagatcg

SEQ ID NO: 14828 - DNA, 1387 bp, Homo Sapiens
  misc_feature (1261)..(1297): n is a, c, g, or t
cctgccaacatctcatggcaggaccagcaacaatggattagaggaggagtttaagaagtgtacagcaatctatatccagaatgacaatgatgcggactggaaaccttccagccaacatgaagaagaaccgtgttttacagatcattccatatgaattcgacagagtgatcattccagttaagcggggcgaagagaatacagactatgtgaacgcatcctttattgatggctaccggcagaaggactcctatatcgccagccagggccctcttctccacacaattgaggacttctggcgaatgatctgggagtggaaatcctgctctatcgtgatgctaacagaactggaggagagaggccaggagaagtgtgcccagtactggccatctgatggactggtgtcctatggagatattacagtggaactgaagaaggaggaggaatgtgagagctataccgtccgagacctcctggtcgccaacaccagggagaataagagccggcagatccggcagttccacttccatggctggcctgaagtgggcatccccagtgacggaaagggcatgatcagcatcatcgccgccgtgcagaagcagcagcagcagtcagggaaccaccccatcaccgtgcactgcagcgccggggcaggaaggacggggaccttctgtgccctgagcaccgtcctggagcgtgtgaaagcagaggggattttggatgtcttccagactgtcaagagcctgcggctacagaggccacacatggtccagacactggaacagtatgagttctgctacaaggtggtgcaggagtatattgatgcattctcagattatgccaacttcaagtaagcggcaacaagggtccgtggaccaggaggattgcctttaatattttgtaatattctgttttgttaatataccccaaattgtgtatatatcttataactgttttagaaattggtacataggcttctattacctattaggtggaaattttatatgtaaatgtgttagcactgatagtcctttttccaatgttttattggggaattaaatagtgtgatgtttggattgatatcgtgaaatcctcagccgagaaattgggctggattgtgctttggttaatacatctttccctaaagaagataaacacaaaatccattccaggtagctcggcaccaactaagaaaaaaagcacaaagttctcagagctctccgaggaaagtggttgtccccgtaccaccatgcactgtaaatannnnnnnnnnnnnnnnnnnnnnnnnnnnnnnnnnnnnaccactgatatcatggggagtaataggaccagagcggtatctctggcaccacactagggactatcaggtaataaaagctttgactccctg

SEQ ID NO: 14829 - DNA, 610 bp, Homo Sapiens
  misc_feature (44)..(45): n is a, c, g, or t
  misc_feature (131)..(131): n is a, c, g, or t
  misc_feature (367)..(367): n is a, c, g, or t
  misc_feature (462)..(505): n is a, c, g, or t
caggaagtgcgccccaaacctcttcatattgaagatggattagnngagggggtgatgacccctccccaagcccctcagggcccagaccttcctgctctccagcaggggatccccacaacctcacacttgtntgttcttcagtgctggaggtcctggcagggtcaggctggggtaagccggggttccacagggcccagccctggcaggggtctggccccccaggtaggcggagagcagtccctccctcaggaactggaaggaggggactccaggaatggggaaatgtgacaccaccatcctgaagccagcttgcacctccagtttgcacagggatttgttctgggggctgagggccctgtccccaccnccgcccttggtgctgtcataaaagggcaggcaggggcaggctgaggagttgccctttgccccccagagactgactctcagagccagagatgggannnnnnnnnnnnnnnnnnnnnnnnnnnnnnnnnnnnnnnnnnnncacgcactggcctgcacagagagcatgggtgagcgtgtaaaagcttggccctgtgccctacaatggggccagctgggccgacagcagaataaaggcaataagatg

SEQ ID NO: 14830 - DNA, 442 bp, Homo Sapiens
  misc_feature (386)..(386): n is a, c, g, or t
tggtggatcatgatacgggagttggggagcgagtggcgcatgcctggggtgccggcggcgagaagcagggagcccatgctggcggcctggcccacgcaccaggtgcagatcgggttgaggatgtactgcatcgtgtcgtagatggccaggcccgcggtcaccacaccaccagggctgttgatgtacatgtggatgggcttcttgttgctctcggattgcaggaagaggagctgtgcgataacaaggctggcaacgctgtcatcgatcgggcccatgacgcacacgatgcgtcccgcagcagccgcgagtagatgtcatcaggcgcgctcgccgcgacccgtctgctccaccacgatgggaatgagcgggagagcccgggtcgccgntcggtcaggcaccgctgcaggccaggccgttctggactgatgtcgcgcgcgtgtcc

SEQ ID NO: 14831 - DNA, 698 bp, Homo Sapiens
ggggaggaagtcaaacctcccgatatttctccctcgagtggctgggaaacttggcaagagaccagaggacccaaatgcagacccttcaagtgaggccaaggcaatggctgtgccctatcttctgagaagaaagttcagtaattccctgaaaagtcaaggtaaagatgatgattcttttgatcggaaatcagtgtaccgaggctcgctgacacagagaaaccccaacgcgaggaaaggaatggccagccacaccttcgcgaaacctgtggtggcccaccagtcctaacgggacaggacagagagacagagcagccctgcactgttttccctccaccacagccatcctgtccctcattggctctgtgctttccactatacacagtcaccgtcccaatgagaaacaagaaggagcaccctccacatggactcccacctgcaagtggacagcgacattcagtcctgcactgctcacctgggtttactgatgactcctggctgccccaccatcctctctgatctgtgagaaacagctaagctgctgtgacttccctttaggacaatgttgtgtaaatctttgaaggacacaccgaagacctttatactgtgatcttttacccctttcactcttggctttcttatgttgctttcatgaatggaatggaaaaaagatgactcagttaaggcaccagcaaaaaaaa

SEQ ID NO: 14832 - DNA, 770 bp, Homo Sapiens
gagccccgcagctccgccgcagctgccgcctcgccgcggccgggccggagagcacggcggcgggagcgcggccttaggaggcggccggagcggtgggcacagctcggcgcggagcgtcctgtcaggcggcggccgagggcgtcgcggactctccccgcgatgatgccgatgatattaactgttttcttgagcaacaatgaacagattttaacagaagttcctataacaccggaaacaacctgtcgagatgttgtagaattttgcaaggaacctggagaaggcagctgccatttagctgaagtgtggaggggaaatgaacgtcccataccctttgatcatatgatgtacgaacatcttcagaaatggggtccacggagggaagaagtgaaatttttccttcgacacgaggactccccaactgagaacagtgaacaaggtggccgtcagacccaagagcaacgaactcagagaaatgtaataaatgtacctggagaaaacgtactgaaaatggggtgggaatcacgtgttgacttacccttcagagctccagatatgcagctaggcacagcagagattgaaatcacagcagatgttggtgccaggaacagcgttacatttctaaggcacagagcgcggcagcagcagctattctgaaaggaaagctcagaattgaagacggagtgagcccagagaacagctggagaaattctcaatgagaggcaggcgattccggcaaatcatgacggcattctgctgtgaaataaaagtta

SEQ ID NO: 14833 - DNA, 638 bp, Homo Sapiens
cggcgttgaatggcccggaggcgttgaatggccggagccgggagcacggtggagcggtggagggcgtcactgggtttcggcgtctggcaagcggttcagctgtctgctccctagcagccggccttcgggtcgggcgtctccgccggctactgccgcttcagttctcccggtgtggccacgagtcggcacaacattctgaaattttttggttattgtaatgatgttgatcgggagttgagaaaatgcctgaagaatgagtacgtagaaaacaggaccaagagcagggagcatggcattgcaatgcgaaagaaactttttaatcctccagaggaatccgaaaaataaattgtattttcactcgatgccttggctgagagaagacctaaagactctgggttgatacctgaaagaatcctgtcttatttggtctccataatcctttgaatggaaagtgacctgtgagagattgaaccatggagaaatatgaaaaccctggattctgagtatttgttgggcagggcgtttagtactgtctcccctttaccagcaaacctgacttcaccatgtttattccctttgcctacaaccagttaatatctgagtaacttatctccttcaataaaataatttaaatagcc

SEQ ID NO: 14834 - DNA, 517 bp, Homo Sapiens
gcgctaccagaaggccagccaggggcggcggcgcggctgaggcagcgcagcagcccagctacgtgtactcctgcgacccctacacactggcctactacggctacccctacaacgcgctcattgggcccaacagggactactttgtgaaagcaggcagcataagaggccgagggcgaggtgcagctggcaacagagccccagggcctaggggttcctacctcgggggatattctgctggccgtggtatatatagccgatatcatgaagggaaaggaaagcagcaagaaaaaggatatgaactggtgccgaatttggaaatccctaccgtcaacccagttgccattaaacctggtacagtagccatccctgccattggggctcagtattccatgtttccagcagctccagcccctaaaatgattgaagatggcaaaatccacacagtggagcacatgatcagccccattgctgtgcagccagacccagccagtgctgctgccgccgcagccgcggccgc

SEQ ID NO: 14835 - DNA, 1182 bp, Homo Sapiens
gcggccgctccctggctccacgccaagggagggcgcgccatgtccttcccactcgtgcacactggccaggttcagggtcatgctctgtttcaggatcttggggttactgtagccataaggtccgctctcggacgggaggaacgaggcgttgagggcatcgtcatagaaggtcgtttccatctttgcagtcatagaacagtccgtcacttcacgtgaggttagtttgggctgcgcgcacaagtttctgggccgcaacatggctctggcaagcgggggacacccgcgccccccggagcctttgacagggaaagtttctctaagagcgcacgcacccgctggctgtcgtccccgctgcgccctcctcaccagctcgctccagggagcgcagggttaattaagatgcctcccgcactcttacttgtcgactcgcgcgcgctacccggctttgaaaagtcgcggtcactcactgagcgctcttcgggcgcagcggttcctcggagtccgcaggcgaactcacttcccagagcagcggctctccccgcggagcggatcagtgcggaccctgcagtggccggccggcggcgggtcttggccgcccggactccgacgacttgtcccctcctccgctgctagggggagggggcgcccggcagccgcggctcgcgctcgcccaagttcaacaaccggtgcgagcgaagctgagcgcacgtccttcttctcttgcgtggctctccgccgccttctggtctttaccgccgtggagaagcctaagacgcaggaaaggcttgcaaaagttcgctccgggactctgccacttgtctccggtcctcccagccgggaaagttctttgctgctgcagccgctcgccgacttcccccggcgggcgcgtgggtaccgctgctttccgccgctgtcaacagcgcctgggcagcagggctctcctcccgggggcggctggagaccaggctctctggacactcccgaaacaccagcccgggagccacaggcgctagctctgggcagttagagagaaggtgaaaagaaaataagatttgcagttcggactatactgccgacctggctggctggctgtgtctgtctgtctgcctgactccgcgcacctccactcccgcctcgctgcttcagccacactcagatcccgggaattccggaccggtccag

SEQ ID NO: 14836 - DNA, 1097 bp, Homo Sapiens
  misc_feature (38)..(38): n is a, c, g, or t
  misc_feature (235)..(235): n is a, c, g, or t
  misc_feature (325)..(334): n is a, c, g, or t
  misc_feature (362)..(362): n is a, c, g, or t
  misc_feature (382)..(382): n is a, c, g, or t
tttagaaaaagtttctttgaaggggccggagggggggnccggacaatgggattttctacccatttttttccattgtattttgcccggaggacgggaggtcagggttttgtttggccccagggctgggagtgccagtggcgacaattctccgggattaaaatttttaagggtaatttttccccattccatttcaaaagagtaggccatggtctccttggtttcaatgccacgattntgagccacccttttacacatagcatacagttgtagaaaacccaaagccatcctggtgtgtggagctcaagagcccccatcctgctgtcgnnnnnnnnnngaagtcttcatccaatcagcttcctacntagactgggggacctccatnttctctgtgctctgtaggacccggaagacaaagaactaacctatgggtggctgccaaggaagatctactgaactgaggcaaatctcaacaaagtctttgtgcttcatggcatagaagagtatctgaatatcttcataagcctctgctcacttcttcacctttctgtactctgctgtgttaaaccgtgcagtcctgggaaggcaagggtggtagagaaaggaacaggaagagtctgctcagtcaggtgggctgtgaacttcagtacaggcaggacttaaaagtcctttgcagccccacaaagccagctccttccatgaggggcttcaacctgcccttctttgttatcctggagcacctttccaggggctgaaggacagaaagagccactgacaacttcagggccagtcagaaaagactgaggcagacacaagattgaggttaaggcccaggcccacgccctatcttcctatctcccaccagaggtttttggggtttgtgaatccggaatgaatgatgccctccacaaaaagtgacttttctttcaaggcatgggcggtaagggggaggaaaaacatccctcagcctagcaccctgaagcagtggggtgaggggtcccagagggttcaaatggctcctgttccctttgctgcagagaactgactagttctaaaatggtcttcagtttatttcaccctttctttttattaaatgttaa

SEQ ID NO: 14837 - DNA, 984 bp, Homo Sapiens
  misc_feature (637)..(638): n is a, c, g, or t
ggggaggaagagggcggcgacggtggtggtgactgagcggagcccggtgacaggatgttggtgttggtattaggagatctgcacatcccacaccggtgcaacagtttgccagctaaattcaaaaaactcctggtgccaggaaaaattcagcacattctctgcacaggaaacctttgcaccaaagagagttatgactatctcaagactctggctggtgatgttcatattgtgagaggagacttcgatgagaatctgaattatccagaacagaaagttgtgactgttggacagttcaaaattggtctgatccatggacatcaagttattccatggggagatatggccagcttagccctgttgcagaggcaatttgatgtggacattcttatctcgggacacacacacaaatttgaagcatttgagcatgaaaataaattctacattaatccaggttctgccactggggcatataatgccttggaaacaaacattattccatcatttgtgttgatggatatccaggcttctacagtggtcacctatgtgtatcagctaattggagatgatgtgaaagtagaacgaatcgaatacaaaaaaccttaaagccaggcctgtcttgatgatttttggttttttnncattgtcctgttgaaatcaagtaattaaacatttaagagccacaaaattgtatcacttttataatattttgcagtaaaatataataccatcttctctgttaatacataattgctccaagcttcctgtaaactataagaatatatttagtttacagtatatggattctatgaaaaaatgtccacaacacagtaattggtcacttgttaagaaaaatttatccttgtaagtatcttcaaagttgatatttggaactttattccaaaagtagtgcatgtggagaaagaatctagactttcttgtatacatttttctcttctccagtaataaacaattacctttcattta

SEQ ID NO: 14838 - DNA, 1052 bp, Homo Sapiens
gggggtgcagggcgggtggagtcgcggagtagtcctcatggccgccccgccggagcccggtgagcccgaggagaggaaggtagaattagaagatcatgtgatgttggagtaggagggtttatcttggtgactttgggatgctggtttcattgtaggtataattatgcaaagcaaagaatccaggaaagaattgccagagaagaaattaaaaagaagatattatatgaaggtacccacctcgatcctgaaagaaaacacaacggcagcagcagcaattgaacaatcttgagcatagaagtcaatgtaaacgaagttaagatcaaccacataaaacatttcatgtgcaataagctctcaatcaagtaaataaagtttaagttgtagtcatttttttcccacacttgtgtggaatgaaaacttgccagtttattctggccctgtgtctactgccaggatagcattcttacgtgttacatatagtggacttgtcatccttaaaatgtgaacagaatttattggcagtgtggcaaagaattataaaacatagtgtttaatgtacttggagtttccttgtagtagtaagtatagagtttgatgataagtaaacgtcccttaacaaaaacctcaaccttattactatcccattaaaaaacagcaaatacttactgagttcttgtaagagctaatgtcattgtaagatttaaaactaagggcttttatcactttgcaaattattttttaaatgcattcatcatttgacagtgttctctcatttcttaaaatgcgagtcatcttcccaaagagttgtttttaattgcctaaacatttttgggggagtatgcagggtttaaatttttagtataattaggtctgaattaaatatgcacatggaacttgtctggcagactgatgcaatagttaaacaactgcaggattactatttatggtaaccaatccattttggaaggcaaatcagctggctcccctttaaaatatttatttaaaaatacaataacccaccgggcatcttaactaaaattccccaggggatt

SEQ ID NO: 14839 - DNA, 1059 bp, Homo Sapiens
  misc_feature (51)..(103): n is a, c, g, or t
ggcaaccttaaagcacctttaaaatctggaccctttcccacaatttaaccnnnnnnnnnnnnnnnnnnnnnnnnnnnnnnnnnnnnnnnnnnnnnnnnnnnnnttggcaggctccctaaatctgcaattttaagataagcactccgggtgattcagtgtctattagccagccatccaatttcagaaacactgtttaaaatgcattaaaacaattcctacctcccacaaacaaaagtaaaggaatctgctgacagtcactgtgcttttgtcaatgtcaagggaccaatatgggaaggcaggcaggaaggggcctcccattcctaacacactgatctatagaagccctgtgcaacagcctgtcaagtgttgtttagggagtaaatacaattcaataagagttgttttagatcacagaacagcatccaaatcaccaacaggccaaccccattcatccccaggttaatgaactttgttgggtcgaagccagatgggacactgctgttcaaacaaaacacgggtaattgtgggtcctgacttgtgaagacatatggaataaaacatctataaaaacctttattaaacatagagcactatgcccaaataattttgaaggtttacgaaagtcacatcatggacaacatgtagaaatagtaacattgattccaaggttcccattatctgcaaaaagatgtgctatggctgtgtcgaaaacaaggcagtcgctgttcatgatggccgcagccacaccgtcatgaatcgaacggggcgtggcctcccaggtcaatctccgccggttcccattcaactccagtctgtaggcaaagttctcggcttgcttgcgggtgccaatgagcaggacgatggcaaaaaactgctggtggccttcgtacttctcttgtttctccagcaccagcatgaagtgatggccaaaacatgactgcatcatcacccagtcgacagccccttgcaagttaatgctgtagctagaaagacgtgtcttctcccttgagggtggaatgttctggtgccgtgcatgaaatgggacatcacagcttccag

SEQ ID NO: 14840 - DNA, 576 bp, Homo Sapiens
tgactagaggatcccaggcaaagctcctaccctgatagatcaggggtggctgctggaggctgtgctggggatctgaggtttggtctgggctcagtgggagatggcagtgcaatcctgatgagtgatgtctgccaggcaccgtaagtttgattagtgatgtctgccacgggcagggatggaaggagcagtgtgatgtctgctctcttctctcccctctgtccctcttcaggaagaaagagctcattctgtctcacaagccaccggcatcctgtatcagcttccagcctcccctcaggctttccagtcaccagggacactcggagccacagcctagagccccgtgttccctggcctgtgcgtctgcccccttctgagatgcagccagaagctctgtgcctgctgcaaagattcaggtggaccctcctctaatctcctcctgctgtgcccgccagtccttgccctcccaccaggtctctgagctcagtcttaccaaattcgccctttaacagcttgctctggcaaccccataaatgacacctgagctccgtaggagctttgcctggggtcctctaagta

SEQ ID NO: 14841 - DNA, 335 bp, Homo Sapiens
  misc_feature (262)..(275): n is a, c, g, or t
ggtgccgggtcggagggtgtagatgccggagatcgattgacaagggcaggtagtgagtgggtggtgagcgcctccccgggaaggtgagtgaccctccccgacaccggaatggcggtggaatcggttggggtaggcgggcgtggagcccctggatacactttgggggagtagatttgatgatgaggtaccccagggctgagaagaggaggaggggtgagagggggacggactgctcggatgagacggttttgggatgagattnnnnnnnnnnnnnnaagagcggttgcggaggggacggtctgttggaatcttgagggtcaatgggagttgcagta

SEQ ID NO: 14842 - DNA, 889 bp, Homo Sapiens
cgagttccggtgtttgaagcatgtctcatttcagatttggcatgtcaacctgtactttctgtttctatgaattacactactctaggtacttcatataagtggaatcatatagtatttgtccttttctgtctggcttatttcacatataatgtcttccaggttcatcatattgtagcacatgtcagaatttcattcctttttaaggctgaataatattccattatgtgtataccacattttgtttatccattcatccaccaatagacatttgggtatttccaggacaatatattcttaatttaatcccacattttaagacttacaggtaatttaaattcaattcaacttactgagtatttactaagggtaactcactatgggaagtactgtgggaaatacaagggtaaataagacatggtgcctgctctcaaggaaattatgatagactgggaaaagggaagagaaagaagtagaagtaaccagcatttgctaatcgcttgccatgtgccaggtgctttacccaatcgctgcatgtatagctcccaatgactctgtaagtaagatattgtaatatctacttcatataggaagacgaatgaaggcacttgagacttaaagtaaccacctccaaagctgggatttaaactcgtatcttggattcagaggcctgtgttcattccactacacatgctgttccctatgattcaaggcagaatgtgataaatccttggggagaagctacagcaaggtagaagaggaagagaagagattgctccttgcctgagggtaaaggtacatgacaaaggtaggtcttagagggtcaggaaggcttacgtttgacagagatggagggtggaaaaaattgcacaagcagagcagaaggtcgacg

SEQ ID NO: 14843 - DNA, 955 bp, Homo Sapiens
  misc_feature (197)..(222): n is a, c, g, or t
ggatcccctatccgtgttcggggttgccgtgtttgatgtcagttttccctgccagaatctacaatctccttgatcaccattatatcccaacgaagagctcagtacctggtacaaagcacatttgatcaatacttgctgaataaagaaataaaaatgaagaggcactccagcctgggcaacagagtgagatggtctcnnnnnnnnnnnnnnnnnnnnnnnnnncgactggaaaggagatgagggtacttgtgaagccatattatatgacacgctctgtgctaggacttttatataccttgtctcatctcttcatctcatataatccttacaaggatctcaaaagtggggaaatccccatataactgaagacgaaggcagttcagaagttcactgatttgccctaaggttcctcaatttgcaaacgtcaggccaatgatccaaccccaggtatgtttggcagtgaaggaccagttgagtcatagctgcaagtaaccaccctgcagtggtccctatcttggccgttagcttacattgacatttaacactcaaatttactcagtaacaccagctatcatgttttccactaaaactccacagcattctggcaacttttctattttagagcaataaagtaaattgttagcatccctttgacatataaatatttctacaaatagtaattctctagccattcatttggagtatttaaaactcaacattcatagcacattttatgtgacaaagaacttatgttcagaacacaaaaataagtcttatgtcttcattaaaaacgggtgaagaatttgaacatttgcaaactaaaatacaaatggaatacactcaacatcattaatcatcaagaaaataaaattatgagataatcattaataatcactacatatgcaccacagtgattaaaatttttttaagttaagccacgacagttcggggtgcg

SEQ ID NO: 14844 - DNA, 928 bp, Homo Sapiens
ctgttgctaagtgtgaactgtaatactagatatattcggggttagaaggacttgtctaagcctcattatactgaagttgaagaaaccaaatgagctccaccctcactttgcctgccctgatatggtcacttgttgagtcactggagttcctttcattttggcactgatgctgttttctcttgtctgatttgaaacagtactggtaataatatggttgttgaaaatgtgatcacctttatctaaagtgggagaagatacatacacagtatggcaaatggataaaatattgtggcatcaactacttttaaagtagaaaagctatccattttatacaatcactgatacagtctatgtcaaaaaaccaacagaccattattcctcttgaagttagtttgattttatctttgtatggttgtctacaatttgttttcctgtaaatgcagatagttaaaatctaaaggatagaatgctttcctaaaacagaacattagcctttaaggttaaatagactttacattgtatctaagttaatctttataaagcactagaatttttggtcaaaagtcaaaatagtattagaatactgaaattattgatagctttcataatctcagcttttttgaacttccacaatttttggaatatgtcataatttttttccctgtttcaaatgtgttcagaggaaatagaatgtaaaacatcacaaaaaaaattgcagtacataaaatttctggactatgttagttacttgatctggaagtttaaaatttggactaaaaggttttattgacataaagcctcgtgaaaatggttgatcatatacttttgacatcacttgtaagctcataaatataagaattcttttggaaagtagaggatggaaacacactggaacctcatgataagtgaacactctggtatcagccga

SEQ ID NO: 14845 - DNA, 1039 bp, Homo Sapiens
  misc_feature (513)..(569): n is a, c, g, or t
gggatgatgccccctatgggagggccaccaatgggacaaatgcctggaatgatgtcgtcagtaatgcctggaatgatgatgtctcatatgtctcaggcttccatgcagcctgccttaccgccaggagtaaatagtatggatgtagcagcaggtacagcatctggtgcaaaatcaatgtggactgaacataaatcacctgatggaaggacttactactacaacactgaaaccaaacagtctacctgggagaaaccagatgatcttaaaacacctgctgagcaactcttatctaaatgcccctggaaggaatacaaatcagattctggaaagccttactattataattctcaaacaaaagaatctcgctgggccaaacctaaagaacttgaggatcttgaagcaatgatcaaagctgaagaaagcagtaagcaagaagagtgcaccacaacatcaacagccccagtccctacaacagaaattccgaccacaatgagcaccatggctgctgccgannnnnnnnnnnnnnnnnnnnnnnnnnnnnnnnnnnnnnnnnnnnnnnnnnnnnnnnncaatgctaatgcttccacttctgcttctaatactgtcagtggaactgttccagttgttcctgagcctgaagttacttccattgttgctactgttgtagataatgagaatacagtaactatttcaactgaggaacaagcacaacttactagtacccctgctattcaggatcaaagtgtggaagtatccagtaatactggagaagaaacatctaagcaagaaactgtagctgattttactcccaaaaaagaagaggaggagagccaaccagcaaagaaaacatacacttggaatacaaaggaagaggcaaagcaagcttttaaagaattattgaaagaaaagcgggtaccatcgaatgcttcatgggagcaggctatgaaaatgattattaatgatccacgatacagtgctttggcaaagttaagtgaaaaaaagcaagcctttaatgcctataaagtccagacaaaaaaaa

SEQ ID NO: 14846 - DNA, 697 bp, Homo Sapiens
gtcttctctgtctagctggattgcaaaaatttattaaaattggagacactgttttaatcttcttgtgccatgagactccatcaggcagtctacaaagaccactgggaggctgaggatcacttgagcccagaagtttgaggctgtagtaagcttcaaaggccactgcactctagcttgggtgaggcaagaccctttcaagcagtaagctgcatgcttgcttgttgtggtcattaaaaaccctagtttaggataacaggtctgcctgcatttcttcaatcatgaattctgagtcctttgcttctttaaaacttgctccacacagtgtagtcaagccgactctccatacccaagcaagtcatccatggataaaaacgttaccaggagcagaaccattaagctggtccaggcaagttggactccaccatttcaacttccagctttctgtctaatgcctgtgtgccaatggcttgagttaggcttgctctttaggacttcagtagctattctcatccttccttggggacacaactgtccataaggtgctatccagagccacactgcatctgcacccagcaccatacctcacaggagtcgactcctacctcgaaaaagccgtcatgctcaggtctgcctttgcttctttaaaacttgctccacacagtgtagtcaagccgactctccagacctggcagccagg

SEQ ID NO: 14847 - DNA, 1850 bp, Homo Sapiens
  misc_feature (1661)..(1670): n is a, c, g, or t
ggggtggtcctgccgcctggtctcacctcgccatggttcgtctgcctctgcagtgcgtcctctggggctgcttgctgaccgctgtccatccagaaccacccactgcatgcagagaaaaacagtacctaataaacagtcagtgctgttctttgtgccagccaggacagaaactggtgagtgactgcacagagttcactgaaacggaatgccttccttgcggtgaaagcgaattcctagacacctggaacagagagacacactgccaccagcacaaatactgcgaccccaacctagggcttcgggtccagcagaagggcacctcagaaacagacaccatctgcacctgtgaagaaggctggcactgtacgagtgaggcctgtgagagctgtgtcctgcaccgctcatgctcgcccggcttttggggtcaagcagattgctacaggggtttctgataccatctgcgagccctgcccagtcggcttcttctccaatgtgtcatctgctttcgaaaaatgtcaccccttggacaagctgtgagaccaaagacctggttgtgcaacaggcaggcacaaacaagactgatgttgtctgtggtccccaggatcggctgagagccctggtggtgatccccatcatcttcgggatcctgtttgccatcctcttggtgctggtctttatcagtggccaagaagccaaccaataaggccccccaccccaagcaggaaccccaggagatcaattttcccgacgatcttcctggctccaacactgctgctccagtgcaggagactttacatggatgccaaccggtcacccaggaggatggcaaagagagtcgcatctcagtgcaggagagacagtgaggctgcacccaacccaaggagttgtggccacgtggggcaaaacagggcaagtttggccagaagaagccctgggttggctggcttgcctgcttggtgggccgttgaaagcgggtgaaggggggcttgggcacctgaacttggggcaattaggcttcccccgggtttacttgcccttggcgaccccccttggcaaggtcttcgacgcaccacggggaagaaccccttgggccaccttgggagatatgcctcgaaaaaccaacgtcttcacacccctctttgggcaaggaaaacgccgtcttctctcacacaccttatccacacccccctgatggtgcgaagaaacgcccccccaccaaatatttctccccacgagggtctgtctccacccccagagaaaacgcttgggggggcgacgctttccaacacccaggcggaaaccacccgcgtcagcaacgggcgcgcgacggaacaaaaagcgatcccatgagcgcggcgagccgggcccgctgaggacaccagcacgtgagcaccgaacccccatgcacagaggacagccggggcgaaacaaaaacatggcgcgcggcggggcgcccctacaaacagcacgccgcccatatcacaaccagacgcacctactctcgaccccccccagcagaccaaccacccccgaaagccgaaaacagacacccgccgcagaggttgtccacccaccccggccggaagagtattctcccccgccccacacgagcgccaaccaaaagacgtcaaacatcaccagcgacggagggagcgacgggnnnnnnnnnnacaacaggcgaagaggaccagccaagcgggagggagcgcagaaacagtcccaaagcaacagagcggcgcgcagacgcgcaggggagagcgaaacatcatcatcccccccaccccactaagggtgacgagcagaccccgcccccacacacgcgacggcggaagaaaaagacaggccgcccc

SEQ ID NO: 14848 - DNA, 542 bp, Homo Sapiens
ggggcatgcgcagagggccgatccagttcttttcggctggaatggggaatttgtgaggtaggccggaagtggtgttgcggagggaagtgtggggagagcagaggcgcagctctgctggagagacctgaggcttgcagcgctgggcccggccgggtcgctgcggctgggctggaggtcaaggatgcattccaggaaagttctataaaaatataccatcaactccaacctgatatttgacctagccatggaaaacctcattggctcctcactggatcagaccataaaaatgatccaggaatgaaaatctaagataaattcccaccacttcaagatgttcttatacaagtcaacagtctagcagatcagccagtctctttcatcatcaagcagacatactcaaggtaccaacacagcaaaggcacaaaatgtctctatatcagtatttttcatggtatatgtgagacccattagtgaggcatgaaatcaattctgtgagtcacaatgaacatttgtctaaaaaacaaaataaaatgtaaaatacc

SEQ ID NO: 14849 - DNA, 1216 bp, Homo Sapiens
  misc_feature (851)..(875): n is a, c, g, or t
acatgagagcgtgttgtattactaagtggcagagacgacatgacctgtgtgaaggaagagatctttgggcctgttatgtccatttgatcattatgacacatgaagctgaggttctagaaagagccaatgataccacttttggactagcagctggcgtctttaccagggacatccaacgggctcatagagtggtagctgagcttcaggctgggacgtgcttcattaacaatctataacgtcagcccagcggagtcgccctttggtggatataagaagtcaggatttggcagagagaacggccgtgtgacaatcgaatattattcacagctgaagactgtgtgtgtggagatgggtgatgtggaatctgctttgtgaaaacctgcagtgaaacctattgacatggccacgctgtggaatgatgtgaattggccccgtttacagaggcagtacaactgaatgttactctttacatccagaatctatggcgttcagtataagagaatggttcatgttactctgttctctctccatcagcttcctcactgaaaatgtgcattaagtgccttgtagatactaatcaagaaagctgtgattctcctcaaagcgtatttttgtgaaatcttttaagagccagtaacatacttctagagaacaggaaaagagactaggataatacatcttccacacatttggcccactggataatggttaattctctggcgtatttcaaagaacttgttcctggctgatccaagtgcagtgggtatttacaactaatttgatcacaaccaggttgtagatttctttggtccttctccattcccactgcttcacttgcctagtcttgaagnnnnnnnnnnnnnnnnnnnnnnnnnccttgttcctttataggttcctggtagaatcagtagagatgatttcagctcattgacatttttttaagctatatccccttgtcattccattgagaaagctgacaactgggatagggaggggattcgataatagatggggtcaaattctgtgtgaatgtgaacttgcctagtaagcactttgtctctgttcactactgcgatagaggaaatctatctccctatcttgggtccttgaactacagcctgctgtcttacaccagtggagctaccctttaaatgtacaaattatttgtatgctaatgtacatatggctgaacaatttacaaataaatccaccactg

SEQ ID NO: 14850 - DNA, 1579 bp, Homo Sapiens
  misc_feature (55)..(55): n is a, c, g, or t
  misc_feature (273)..(282): n is a, c, g, or t
  misc_feature (1038)..(1153): n is a, c, g, or t
  misc_feature (1156)..(1313): n is a, c, g, or t
  misc_feature (1396)..(1405): n is a, c, g, or t
atgcatagaatccaatttgccaaggttctaaaggcttatgaggtcctgaaggagncaggccttgtgatggagtaggtgacacaggcctggttgtcctgtcagcagaagggaaagcaggggctgggctgagaggaggacacggagggctctgctgaggttccttcctgggttccaccaacagggacagggagtcacttgccttccagttctgtgctgggatggcgggacagcacttggcttgcttggccagctgcgtcatgagtttgatttggnnnnnnnnnngcagctgcttcatatgctctgctccagcccctccccaacagctggtagcttatggtttcttcaagaggaaagtagactttatgctgtacatttgagctgtagagctaagattcgcttactggtgagctgtgaaaccttgttgcttttacccagagtctgatggcagtgactgtgatcaagggaatcttcaccgccacaagtgcaggcagcaggtgtggttcaggtccccccccactccactgtgctcctttgaagccaacgtgcctccctcgcctccatactggagggacgacgcaggggagaacagagaagtgcttggccctaggattgaggcacttgtttcctagcccgctgggttagggctggtgcaagcgaggcaatgttgaggatgctttaagcactaccagccgaatccgggaactctgttaacagttgtccaaccagcagaatgaggctaactgtataaagcatgggacccaggatgaggataaggaaaggacagcggctttccctgggcagtacaatggcttgaaggcaaaaagggataaagtgacagccgactgtgactctggtgaggaggggtgagcagggaggttgattctctgatgttaactaagtggcaaagtctcaaccgtgctcagccctccccaacccagggaagagaaacaaagattcaaagtaagcatgatactagtgggtttaccagtgtttcttccaaggagacatatattttttaataaacgatagttgcaatgnnnnnnnnnnnnnnnnnnnnnnnnnnnnnnnnnnnnnnnnnnnnnnnnnnnnnnnnnnnnnnnnnnnnnnnnnnnnnnnnnnnnnnnnnnnnnnnnnnnnnnnnnnnnnnnnnnnnccnnnnnnnnnnnnnnnnnnnnnnnnnnnnnnnnnnnnnnnnnnnnnnnnnnnnnnnnnnnnnnnnnnnnnnnnnnnnnnnnnnnnnnnnnnnnnnnnnnnnnnnnnnnnnnnnnnnnnnnnnnnnnnnnnnnnnnnnnnnnnnnnnnnnnnnnnnnnnnggttttgaaaaaatccaaaggggattttgggggcatttatggattttaaaaaggggggcccagggaacttcaaaataaaatannnnnnnnnntggccattattcgaaaaatggtgaaaatcaataaacattttggccaaatggaaacccttccaaacgggatgaaaaacctaaaatcccaagggaattcaacccttgggccctttgaataaaaatttccccccggaaaaaacgggggccaaaaaatttcccaaattgggccccctt

SEQ ID NO: 14851 - DNA, 437 bp, Homo Sapiens
cagggagcggggcagggtgagcacacaggccgccaggcctgagatggagttgtccagctggggcccttcctcccagcagtccttctccacatcgtaaatgtgcacgtagcctgtgcggctgccgcggttgtgtgagcggccacctaacacatagatcctgttgtccagcacagcaatgccaggctcaccgtgcccagcagggagtgggcagacagatgaccactgtccagacgtgcagctgtagcaggccacctggtgcacgtccctcctgtatccggcatcgttgttgctgcccccgatcacatacagcttgttgaggagggttgccatgccgtgccaggcgcgccgcacaggcccatcagccagtgtgtgccaagtgttgctgcctggatcgtagcagtgtgtctctttcaggtaatcctcccctctgcggccgc

SEQ ID NO: 14852 - DNA, 1344 bp, Homo Sapiens
gtcaacgtcttgttcagaactgtctttggactctcaggaatctttcagatgctgcaactaaacaggaagggatggaaggtctccttgggactcttgttcagcttctgggttcagatgatataaatgtggtcacctgtgcagctggaattctttctaacctcacttgcaataattataagaacaagatgatggtctcccaagtgggtggtatagaggctcttgtgcgtactgtccttcgggctggtgacagggaagacatcactgagcctgccatctgtgctcttcgtcatctgaccagccgacaccaagaagcagagatggcccagaatgcagttcgccttcactatggactaccagttgtggttaagctcttacacccaccatcccactggcctctgataaaggctactgttggattgattcgaaatcttgccctatgtcccgcaaatcatgcacctttgcgtgagcagggtgccattccacgactagttcagttgcttgttcgtgcacatcaggatacccagcgccgtacgtccatgggtgggacacagcagcaatttgtggagggggtccgcatggaagaaatagttgaaggttgtaccggagcccttcacatcctagctcgggatgttcacaaccgaattgttatcagaggactaaataccattccattgtttgtgcagctgctttattctcccattgaaaacatccaaagagtagctgcaggggtcctctgtgaacttgctcaggacaaggaagctgcagaagctattgaagctgagggagccacagctcctctgacagagttacttcactctaggaatgaaggtgtggcgacatatgcagctgctgttttgttccgaatgtctgaggacaagccacaagattacaagaaacggctttcagttgagctgaccagctctctcttcagaacagagccaatggcttggaatgagactgctgatcttggacttgatattggtgcccagggagaaccccttggatatcgccaggatgatcctagctatcgttcttttcactctggtggatatggccaggatgccttgggtatggaccccatgatggaacatgagatgggtggccaccaccctggtgctgactatccagttgatgggctgccagatctggggcatgcccaggacctcatggatgggctgcctccaggtgacagcaatcagctggcctggtttgatactgacctgtaaatcatcctttaggagtaacaatacaaatggattttgggagtgactcaagaagtgaagaatgcacaagaatggatcacaagatggaatttatcaaaccctagctgctgtcctgtcgcgg

SEQ ID NO: 14853 - DNA, 1049 bp, Homo Sapiens
gggagatgacgtgcggctcgtggggcagctcggcagcatggcgtccgtggcgctgagcgaggcggagaaggtgtacatcgtgcatggcgtccaggaagacctccgtgtggatggccgtggctgtgaggactaccgatgtgtcgaagtggaaactgatgtggtgtccaacactagtgggtccgccagggtcaagctgggtcacacagacatcttggtgggagtgaaagcagaaatggggacgccgaagctggagaaaccaaatgaaggctacttggagttctttgttgactgttcagccagtgctacccctgaatttgaaggtagaggaggtgatgaccttggcaccgagatcgctaacaccctctatcggatatttaacaataaaagcagtgtcgacttaaagaccctctgcattagtcctcgggagcactgctgggttctctatgtggatgtgctgcttctggaatgtggtggaaatttgtttgatgccatttccattgctgtaaaggctgctctcttcaatacaaggataccaagggttcgagttttggaggatgaagaggggtcgaaggacattgaattgtcagatgacccttatgactgcatacgactaagtgtggagaatgtcccctgcattgtcactctgtgcaagattggctatcggcatgtggtggatgctactcttcaggaggaggcctgctcgctggccagcttgctggtgtcggtgaccagcaagggagttgtgacgtgcatgaggaaagtggggaagggcagcctggacccagagagcatcttcgagatgatggagactggcaagcgtgtgggcaaggtactgcatgcctccttgcagagtgttctgcacaaggaagaaagcctggggcccaagagacagaaagttggattcctgggatgatttgcacatcaactgctcaactgtggattgttttttacttttccttttaaaccggttcgtatatatttttcttcgctgttacgaatttacagcagcatttgtacatgtaaaattaaaggctattttctggtctggt

SEQ ID NO: 14854 - DNA, 237 bp, Homo Sapiens
ctcagggtcctgggagaccctctgggctgaggaggaggaagagggcagcagcccagctgtttagggttgctggaggccgggctaccgtcttgtgcctgaaaaccacggggcctgtccccagctggggtgagcgctcaggcccaagcagaccccgggctccaccccagccccgcccaggctgctgccagtgcacacttttacaaatttaatataaagcaagtccagtcttaaaaaaaa

SEQ ID NO: 14855 - DNA, 831 bp, Homo Sapiens
tgagggggtgcagcatccccttgcagtgaccggggcgtgggtgagcagggtgaggtggggagaggggaagtgggggttgggaggtcaggccgggccgatgccccccagcagctcaggggtccaggatataaatctcatcctgtgcgatctcagtcacatagttgagggtgctcctgggctcggtcgatcctgtagaagcggctggcagtggtggcgtccaggaagcaccacttgggggacagtttctggcatgtcggggacttggctccagcaccatcgggctcctgctggagtctctcaatgtgggcacggcagagctctaggtcactgtctcctgggaccaccacagtgcccagcggcacagaggcctccttgagctgctccttgtcgtagtgcagggcctcatagtcgtgcatgctgacgcgactcacctggatgcgcaactgctctggcaccggctgctggtcgctgtgcaggggggcggcgctccgccgcttggccttctgcaccatggtggcctggttgcgcagggcgatgcggatgcgtgaggctgcaagcttgcagggctcgccatccacctgcaccgggatggccttggatgtggtgagcaccacctcgcgacactgcgtcagccgctcgccgtgtccgcccacctgcagcgcggccaacgacgtcatggtgaagccaatgacctcgaggtagccgtcgtcatgccgctggggctctgtggtggtcccaggagacagtgacctagagctctgccgtgtgcacattgagagactccagcaggagcccgatggtgctggagtcaagtccccgacatgccagaaa

SEQ ID NO: 14856 - DNA, 1255 bp, Homo Sapiens
ggagcagtggtataacgcagagtggcattacggccggggagactcgagcagtctctggaacacgctgcggggctcccgggcctgagccaggtctgttctccacgcaggtgttccgcgcgccccgttcagccatgtcgtccggcatccatgtagcgctggtgactggaggcaacaagggcatcggcttggccatcgtgcgcgacctgtgccggctgttctcgggggacgtggtgctcacggcgcgggacgtgacgcggggccaggcggccgtacagcagctgcaggcggagggcctgagcccgcgcttccaccagctggacatcgacgatctgcagagcatccgcgccctgcgcgacttcctgcgcaaggagtacgggggcctggacgtgctggtcaacaacgcgggcatcgccttcaaggttgctgatcccacaccctttcatattcaagctgaagtgacgatgaaaacaaatttctttggtacccgagatgtgtgcacagaattactccctctaataaaaccccaagggagagtggtgaacgtatctagcatcatgagcgtcagagcccttaaaagctgcagcccagagctgcagcagaagttccgcagtgagaccatcactgaggaggagctggtggggctcatgaacaagtttgtggaggatacaaagaagggagtgcaccagaaggagggctggcccagcagcgcatacggggtgacgaagattggcgtcaccgttctgtccaggatccacgccaggaaactgagtgagcagaggaaaggggacaagatcctcctgaatgcctgctgcccagggtgggtgagaactgacatggcgggacccaaggccaccaagagcccagaagaaggtgcagagacccctgtgtacttggcccttttgcccccagatgctgagggtccccatggacaatttgtttcagagaagagagttgaacagtggtgagctgggctcacagctccatccatgggccccattttgtaccttgtcctgagttggtccaaagggcatttacaatgtcataaatatccttatataagaaaaaaaatgatctcttatcaattagcactcactaatgtactactaattgagcaacctacgcactcagttgactacgtaaatctgtcaggtcttttgtgatttcctctgatgcaggagaggaaaaattgtaattgatgaaaataatgaatgaaaatcaacagatgaataaatggttctttataagtgtcaaaaaa

SEQ ID NO: 14857 - DNA, 594 bp, Homo Sapiens
  misc_feature (452)..(502): n is a, c, g, or t
cacggttatcagcaatacagatattaataaaaggcagacgaagtcaggaggtcagcaactttgcgggcttaccaggaggcctgtcctgcctctggaagccagcgacagagagggatgcccccgacccagccagccggagaaagggatggggtggtcacgaaggtctgagctgggtctgggtgtaggctgggaagcaggctggggtgtagactgcgaaggcggccctgccgggacttctttccagtccccggcgacctcttcgaattctctgctatctctggggagcctcgggtgggagggggtgtaagagacgcagggacgtggggagaggagacaaggcaggcaagaaccacaggggacggcggacagacgggcgacatcctgcggaggacgccgtcagtaccaggaagtgcaggcgatgaggaagcgcacgtcgtccagcggcccccacnnnnnnnnnnnnnnnnnnnnnnnnnnnnnnnnnnnnnnnnnnnnnnnnnnnggatgccggggctgtctccggccctccgtgcgcgcaggctggggctggggctggggctgggtttgcgcaggctccggggacgccgcggtcgc

SEQ ID NO: 14858 - DNA, 704 bp, Homo Sapiens
  misc_feature (281)..(281): n is a, c, g, or t
gaaatacaaattttgtcatgtttctcaagcagtttttctgagtagttttctgaggaggaacaaaatttacaaagggtacccaataactgaaaatgttttaactcaactctacatttgtaagcagtccacataagtagacaatgggttttccaagctgggcaaggtacatttaaatcagtaaaccagtttcaccatcgatgtattgtaatgtttcaatgtaagacacaaaaaacaatggcttgaaacttgtgttatcatatgtgattttgaaatgaacaccnttgaatagcactaatttttatttgtggtatttttctataacaaaacaagtagctctaggaaaagaggttttattttgtaaacgatcatttgtgacctcagacactctctggctaatattttaataagctcacagcagataattctgagatcatgggtgaggggtggtgcatgttgagatttaaattggcataaagctgcatactttttgtctagctgtttgatttcattttttaatatagtatgccaattttgtgactgttaccatgtgaaagtcctgttgaaatgaacaattgtctgccccacaatcaagaatgtatgtgtaaagtgtgaataaatctcatatcaaatgtcaaacttttacatgtgaatgattttctcaaagaacatagaaaagtcaataaaatcctcttaatttccacata

SEQ ID NO: 14859 - DNA, 449 bp, Homo Sapiens
  misc_feature (148)..(228): n is a, c, g, or t
  misc_feature (251)..(308): n is a, c, g, or t
tgagatcgagtcggtacctgaaatgggacagaaatttattcaaagaacaaatcaacaaagataataacattaactactatttattaagcatctccttcatgacaagactttttcccatatggagatataatggacaatgggaaatgtnnnnnnnnnnnnnnnnnnnnnnnnnnnnnnnnnnnnnnnnnnnnnnnnnnnnnnnnnnnnnnnnnnnnnnnnnnnnnnnnnccatcacctcacatagttaccannnnnnnnnnnnnnnnnnnnnnnnnnnnnnnnnnnnnnnnnnnnnnnnnnnnnnnnnngggtggtgagaacacttaagatccaccctcttagcaaatttcaagtatataatatagtgtggctatttgtagtcacatcgttgtagaatacatctccagaattcattcattcggataactgaatttctgtgcccatttcaa

SEQ ID NO: 14860 - DNA, 789 bp, Homo Sapiens
  misc_feature (361)..(399): n is a, c, g, or t
ttgttgaagaagcctaaaaggccaggcaaagtccaccgttgtttaaattcactccagtttggtaaaggagctctgggaggaggcgaaaaggcccaggtcgcgcagagaaggcaataaaacagcagatgaagacattcaaggaaccagaacctgctaactcgattgagtctgaaacagcagctctgagggaaaccttgttcaacgcgtcccagcgcatcagcgagttagagaggaatgtggaagaacttaagcggaaagctgcccaaaactccggggaggcagaatatattgaaaaagtagtatatactgtgaagcaaagtgcagaagatgttaagaagactttagatggtgaacttgatgnnnnnnnnnnnnnnnnnnnnnnnnnnnnnnnnnnnnnnnctgaagagtcagctgatgccagaaggaaagccgaaatgctacaaaatgaagcaaaaactcttttagctcaagcaaatagcaagctgcaactgctcaaagatttagaaagaaaatatgaagacaatcaaagatacttagaagataaagctcaagaattagcaagactggaaggagaagtccgttcactcctaaaggatataagccagaaagttgctgtgtatagcacatgcttgtaacagaggagaataaaaaatggctgaggtgaccaaggtaaaacaactacattttaaaaactgacttaatgctcttcaaaataaaacatcacctatttaatgtttttaatcacattttgtatggagttaaataaagtacagtgcttttgtatataaa

SEQ ID NO: 14861 - DNA, 1017 bp, Homo Sapiens
  misc_feature (29)..(29): n is a, c, g, or t
  misc_feature (32)..(32): n is a, c, g, or t
  misc_feature (108)..(166): n is a, c, g, or t
aactgcacaggcaacctgtgagccatagntgntttcagcaagtcccataccagttctgcaatgtggtatgcagagttggctttcaaagaatgtactcgacaccttgcnnnnnnnnnnnnnnnnnnnnnnnnnnnnnnnnnnnnnnnnnnnnnnnnnnnnnnnnnnntcagcctcccaaagtgttgggcttacagatccaaaatacggagctggcatatacttcaccaagaacctcaaaaacctggcagagaaggccaagaaaatctctgctgcagataagctgatctatgtgtttgaggctgaagtactcacaggcttcttctgccagggacatccgttaaatattgttcccccaccactgagtcctggagctatagatggtcatgacagtgtggttgacaatgtctccagccctgaaacctttgttatttttagtggcatgcaggctatacctcagtatttgtggacatgcacccaggaatatgtacagtcacaagattactcatcaggaccaatgagaccctttgcacagcatccttggaggggattcgcaagtggcagccctgttgattaatctctacatcattttaacagctggtatggccttaccttgggtgaactaaccaaataatgaccatcgatggctcaaagagtggcttgaatatatcccatgggttatctgtatggactgactgggttattgaaaggactagccacatactagcatcttagtgcctttatctgtctttatgtcttggggttggggtaggtagataccaaatgaaacactttcaggaccttccttcctcttgcagttgttctttaatctcctttactagaggagataaatattttgcatataatgaagaaatttttctagtatataacgcaggccttttattttctaaaatgatgatagtataaaaatgttaggataacagaatgattttagattttccagagaatattataaagtgctttaggtatgaaaataaatcatctttgtctgattaaaaa

SEQ ID NO: 14862 - DNA, 849 bp, Homo Sapiens
ggggtggggctatgcccggacagaggatcgcctcgctggcctactctctcctcccgtacggcgccggaatcccagctccacttaccaggccgcggctaccccgccgtcccccccgactcccgccaccccgctctctcaggctcttcaggatccaagtccgtaggccctttaaggggtctagttgccgtttgcgaggccctgggactttggtcccagacagcggggatccggatggcttccgtgcggatccgagaggccaaggagggagactgtggagatatcctgaggctgattcgggtgaagactgcaggccggagctagccgaattcgaaaaactctcggatcaggtgaagatcagtgaagaagccctgagagcagatggctttggagacaatcctttctatcactgtttggtagcagagattcttccagcgcccgggaagctactggggccctgcgtggtgggctatgggatatactatttcatctacagtacatggaagggacgcaccatttatctggaggatatctatgtgatgccagaatatcggggtcaagggattggttccaaaataatcaaaaaggtggctgaggtggccttggataagggctgctcccaattccgcctggccgtcctggactggaaccagagggccatggacttgtacaaggccctaggagcccaagatctgacgggaagctgaggggctggcactttcttctgctttcaaggagaggcaacgagaaagttggcaggaaagtgacgccatccctaggaggatgcctgtcttgagtttctccttccccatcagctaagcactctccagagactacgtcccgataagccga

SEQ ID NO: 14863 - DNA, 1071 bp, Homo Sapiens
  misc_feature (300)..(300): n is a, c, g, or t
  misc_feature (759)..(815): n is a, c, g, or t
ggaggtggctatgtcttcttaagcctctggccctcagaggctcctccctatctcctgggtgagttaccactaggctaccaggtctctaggggcctgagagaggccctctagagaatccagggaaactgtgagcccaggagttgcccatctatggtttcattcctcccctggctcttctccctcttcaggccataatttccctggtgccaatttcttttcctcctggggcatcctcatcccagggctctctgctgtagattggctgtgccagcttccaacaggttactggcaatgccagtngaagtttctgtaggccctaagctgaagaagtgaggcaagtgattctgcctccatccctggtttccccaaagccccaggcaccatccttaggggagaaggtctacagttatcattattttaattccattactttcagtctggaaaactaagctagtcagaactgtcatcttgcttcccaatctaagaacctgtggccctggaacacttttcaagaattggttcattgtgctttacacagtagatctgttccaacagttctgtgtaaaccaaatgctatttttcaatgcattgtggactgctgaccatttaaaagcagcctatgattgcttctttttgtaaagcaagcaacctccctccactttagctgttttgactatttgaattttcacatattgggcttacccagagtggagcacacctccagggcatgtggctgacactgggtcaatgtctgcatcnnnnnnnnnnnnnnnnnnnnnnnnnnnnnnnnnnnnnnnnnnnnnnnnnnnnnnnnnaagccactccccaggctggtgctctcctcctgtgcccagtgactgcccagtggcagctcagctgcccttcactcccacctgctgccaaagtccctgtgctaatgggattacaaatacaaaaagtggaaaaaaattttcgtaaactttgttttatattaaaagaaaaatccataagtctgtgtgtgttaaacatgaggttctgcctctgtggctgtgtttgaaaaaataaagttttattagaataatccattttccc

SEQ ID NO: 14864 - DNA, 621 bp, Homo Sapiens
agatcccctgaaatggcacagaattacattcgagggcatccgacacaaaggacacttgtgcaagcaatgtaccttgtatgtgacatttcttctgaacccttaggagagatattgatttaaagctaccaagatgctgtatatgcaatgctgcgaccatcatgaacctacccggcatcccactcttgtgatttaaagcaagcctggaaagctgaaatctaactgaaataacattagttgctctacttcaccctgcaggaggaggacaggaaagtcagaaaaaggcaaaaagtggtaacttggtggtgtctgaggtcacataatggctgctgattttgtaaattctatactctgtaatacctaggtgtgatgagtccatgaatgaagaagctaggagctggaatttcccatccactgggtagaaaattatttttcagtgacacatagtaaaactaagtatctatgaatttttaaatcatataaacttgatcattctttcaaatccctttcctgaaggtcaacgttcccttttgttctttttcttttttatgatctgtcatccccctccactccagtaatctacagtctaatggtttacttcatttctgtgcccattcaggtacg

SEQ ID NO: 14865 - DNA, 241 bp, Homo Sapiens
cttgaggatccagcttacgcctatggttgtatgccttagggcaggttattaccctctctgagtcttggctatctacaaaatgatgatgataaaatctactttatagaaagactatgaggataatatttggtctatgctagttcccctctgatggttgttcacaacctgttagttgtctttatttgactatttattcttgttgtttagtgtctagcggtaaaagcttgggatcctcagatca

SEQ ID NO: 14866 - DNA, 594 bp, Homo Sapiens
tggttacatttaacaggaacgctatactgttacaattattcgattatttaggaatttgcctcaggccaaaattggaacagggttcggacctctcagatctcgaccacccaacctgaaaggtgcttacgaagttgaaaggcccagaggaggcctccgggcaaatggccggagctggaccgaccatgctgctacgagaagagaatggctgttgcagtcggcgtcagagcagctccagtgctggggattcggacggagagcgcgaggactcggcggctgagcgcgcccgacagcagctagaggcgctgctcaacaagactatgcgcattcgcatgacagatggacggacactggtcggctgcttcctctgcactgaccgtgactgcaatgtcatcctgggctcggcgcaggagttcctcaagccgtcggattccttctctgccggggagccccgtgtgctgggcctggccatggtacccggacaccacatcgtttccattgaggtgcagagggagagtctgaccgggcctccgtatctctgaccacgatggcgcttacctttcagacttcattaaacttatgaccgaatgggaaaaa

SEQ ID NO: 14867 - DNA, 728 bp, Homo Sapiens
  misc_feature (625)..(626): n is a, c, g, or t
  misc_feature (636)..(636): n is a, c, g, or t
  misc_feature (649)..(649): n is a, c, g, or t
  misc_feature (657)..(657): n is a, c, g, or t
  misc_feature (662)..(664): n is a, c, g, or t
  misc_feature (667)..(667): n is a, c, g, or t
  misc_feature (674)..(674): n is a, c, g, or t
gggggacctttccgagttggctgcagatttgtggtgcgttctgagccgtctgtcctgcgccaagatgcttcaaagtattattaaaaacatatggatccccatgaagccctactacaccaaagtttaccaggagatttggataggaatggggctgatgggcttcatcgtttataaaatccgggctgctgataaaagaagtaaggctttgaaagcttcagcgcctgctcctggtcatcactaaccagatttacttggagtacatgtgaaagaaaacgtcagtctgcctgtaaatttcagcaagccgtgttagatggggagcgtggaacgtcactgtacacttgtataagtaccgtttacttcatggcatgaataaatggatctgtgagatgcactgctacctggtactgctttcagtgtgttccccctcagcccctccggcgtgtcaggcatactctgagtagataatttgtccatgcagcgcatgcaatcagaatctcactgagccacccatcattgggaaataattaccctcagttggacaggacttggtgatcacgatccaggcactcacttggattctactggctcatacacggttattaaaccttgatcctgctcccttccnnccccccaggncccacccaaccgnaccggcangcggnnnggngccccgngcgggcggggcgcgacgcgaggggcagcgcggcgaaccggcgcgccgcgccgcg

SEQ ID NO: 14868 - DNA, 1083 bp, Homo Sapiens
gggaggttccgggctgcttaggttggcaccggtccgtggtccccgggggcgcagtcgcagcgctcccgccctccaggcgtcagcgagtgcgcggtccagtgcggccggaacctggcgcaactcctagagcggtccttggggagacgcgggtcccagtcctgcggctcctactggggagtgcgctggtcggaagattgctggactcgctgaagagagactacgcaggaaagccccagccacccatcaaatcagagagaaggaatccaccttcttacgctatggcaggtaagaaagtactcattgtctatgcacaccaggaacccaagtctttcaacggatccttgaagaatgtggctgtagatgaactgagcaggcagggctgcaccgtcacagtgtctgatttgtatgccatgaaccttgagccgagggccacagacaaagatatcactggtactctttctaatcctgaggttttcaattatggagtggaaacccacgaaccctacaagcaaaggtctctggctagcgacatcactgatgagcagaaaaaggttcgggagcctgacctagtgatatttcagttcccgctgtactggttcagcgtgccagccatcctgaagggctggatggatagggtgctgtgccaaggctttgcctttgacatcccaggattctacgattcccggtttgctccagggtaaactagcgctcctttccgtaaccacgggaggcacggccgagatgtacacgaagacaggagtcaatggagattctcgatacttcctgtggccactccagcatggcacattacacttctgtggatttaaagtccttgcccctcagatcagctttgctcctgaaattgcatccgaagaagaaagaaaggggatggtggctgcgtggtcccagaggctgcagaccatctggaaggaagagcccatcccctgcacagcccactggcacttcgggcaataactctgtggcacgtgggcatcacgtaagcagcacactaggaggcccaggcgcaggcaaagagaagatggtgctgtcatgaaataaaattacaacatagctacctggggt

SEQ ID NO: 14869 - DNA, 523 bp, Homo Sapiens
tagtgtttaataatgcaataaaatgtagaaatatgtaaatttacatattacaatgaatcaataaggagtcaaaatccagtgacacattcataaaaactccatatatcatcctcagaataatcagtttctgtacaaagatttacagatgtccaagtatgtagtttttcctcagtgtgctacagaatttaaaggttctgctcgaatattccccaaatcaagcgcagaatctgtttcttcatcgatttctccaatgactgcaacgttgtcacctcttacaatgtataatcctagtaccacttgttctaccccctgtgaagagctgaatactcgttcatggctttcatccaaaatcaaattaatggtctggtcaaaacctttcagtgttcccacaatcattctcccatctgatgtaataacggcaacagttcggttgatgtagttctccaaagcggacgtcatgctgttcggcccggcggttccgggtaacgcagcggtgcggacagcaagcagaactgaaagcccc

SEQ ID NO: 14870 - DNA, 1456 bp, Homo Sapiens
  misc_feature (723)..(868): n is a, c, g, or t
  misc_feature (877)..(877): n is a, c, g, or t
  misc_feature (898)..(911): n is a, c, g, or t
agttacggggacagcagacgcaagtccgtgtagtacagataacagaacttatatttccacctcgttgccaatgtgacacccttagcccagaaaaaagccgaggaatagtatcgagggaatggccatcatgaatcactatcctcctcctgttccatttggttatccaaatcagggaagaaaaaataaaccatatcgcccaattccagtgacatgggtacctcctcctggaatgcattgtgaccggaatcactggattaatcctcacatgttagcacctcactaacttcgtttttgattgtgttggtgtcatgttgagaaaaaggtagaataaaccttactacacattaaaagttaaaagttcttactaatagtagtgaagttagatgggccaaaccatcaaacttatttttatagaagttattgagaataatctttcttaaaaaatatatgcactttagatattgatatagtttgagaaattttattaaagttagtcaagtgcctaagtttttaatattggacttgagtatttatatattgtgcatcaactctgttggatacgagaacactgtagaagtggacgatttgttctagcacctttgagaatttactttatggagcgtatgtaagttatttatatacaaggaaatctattttatgtcgttgtttaagagaattgtgtgaaatcatgtagttgcaaataaaaaatagtttgaggcatgnnnnnnnnnnnnnnnnnnnnnnnnnnnnnnnnnnnnnnnnnnnnnnnnnnnnnnnnnnnnnnnnnnnnnnnnnnnnnnnnnnnnnnnnnnnnnnnnnnnnnnnnnnnnnnnnnnnnnnnnnnnnnnnnnnnnnnnnnnnnnnnnnncaacccaancatctgcgccgtggacccacnnnnnnnnnnnnnncgcgcggcttcgtccttcccgcgcagaaaccaaatccacaacacaacgctctggggtctctccccccgaaaaaaaatcccgggagggtccaaacggaaggcgccttgtcacccaatcacaaaaattggacttctgcgcccgccctcctccgcgggacctgtcctgacaaacaagaccgaaaccccctctgtgcccccagattttggtaatttccattctccacacacctgcggggcggcggtatcgcggaaacgatgtgtgcctgaataaatacccatccaacgccctggcttcgcccttctgtggggataaaaccacctgtgcacctacgggcacggtaataccttcccgtgccccaccgcactcgtgcgctatacactcaaatacccttggcgcccccttgggcgtaataaattaattctgcccccgccgccgccgataaacaaatccgggattggctcgacggaatctcgggcttacatttcctgtggctggcgcgttctgatacagaaacaaatggtgggccacaacattttgccccccgg

SEQ ID NO: 14871 - DNA, 678 bp, Homo Sapiens
ggggagtggaagaaacgcggaaccatggccgctgtggttgctgtttgcggtggtctagggaggaagaagttgacacacttggtaacggctgctgtcagccttacacatcccgggactcacacggtgctttggagaagaggttgttcacaacaggtatccagcaatgaggacctgcccatttcaatggaaaatccttataaagaacctcttaagaaatgtatcttgtgtggaaagcatgtagattataagaatgtacagcttttgtcccagtttgtttctccatttactggatgcatttatggaaggcacattacaggtctttgtgggaagaaacagaaagaaatcacaaaagcaattaagagagctcaaataatggggtttatgccagttacatacaaggatcctgcatatctcaaggaccctaaagtttgtaacatcagatatcgggaataaattctatcacgttaccactaataaacttattttacagtaagtggttgtatgatgccaatactgactcaaaccaacctttggatagaaaagtgtttgaggagtgaggtaaagaatgacacttccccttcataccaatgtccattaagcagattgcttatttaaaatgttaacactcatcacattttatctatgttgaataaaagtggttctgtgtgattgtcattt

SEQ ID NO: 14872 - DNA, 807 bp, Homo Sapiens
gatgtcagctcctccgctgtagtattgctccttaaaaacccctctctctgaaaatgacatgccctcgcaatgtaactccgaactcgtacgcggagcccttggctgcgcccggcggaggagagcgctatagccggagcgcaggcatgtatatgcagtctgggagtgacttcaattgcggggtgatgaggggctgcgggctcgcgccctcgctctccaagagggacgagggcagcagccccagcctcgccctcaacacctatccgtcctacctctcgcagctggactcctggggcgaccccaaagccgcctatcgcctggaacaacctgttggcaggccgctgtcctcctgctcctacccacctagtgtcaaggaggagaatgtctgctgcatgtacagcgcagagaagcgggcgaaaagtggccccgaggcagctctctactcccaccccttgccggagtcctgccttggggagcacgaggtacccgtgcccagctactaccgcgccagcccgagctactccgcgctggacaagacgccccactgttctggggccaacgacttcgaagcccctttcgagcagcgggccagtctcaacccgcgcgccgaacatctggaatcgcctcagctggggggcaaagtgagtttccctgagacccccaagtccgacagccagacccccagccccaatgacaatcaagacgggagcagagcctggggggccctaaagggagcccctcggaaagcgaaaaggagaggccaagctgccgatccagccagacacctcggatacgagggaaagagggata

SEQ ID NO: 14873 - DNA, 970 bp, Homo Sapiens
  misc_feature (181)..(224): n is a, c, g, or t
  misc_feature (570)..(570): n is a, c, g, or t
cgggaacgaggctcaggcggcaggcccgcgcggagccgttgccatggcagccgccgccggggacgcggacgacgagccgcgctcaggccactcgagctcggagggcgagtgcgcggtggcgccggagccgctgactgacgctgagggcctcttctccttcgctgacttcgggtctgcgctnnnnnnnnnnnnnnnnnnnnnnnnnnnnnnnnnnnnnnnnnnnncccagtcgccgctgcgctacttgcacgtcctgtggcagcaggatgcggagccgcgcgacgagctgcgctgcaagatacccgctggccggctgaggcgcgctgccaggccccaccggcggctcgggcccacgggcaaggaggtgcacgctctgaagagactgagggactcggccaatgccaatgatgtggaaacagtgcagcagctgctggaagatggcgcggatccctgtgcagctgatgacaagggccgcacaagctctacactttgcctcatgcaatggcaatgaccagattgtgcagctgctcctggaccatggtgctgatcctaaccagcgagatgggctgngggaacacgccactgcacctggcggcctgcaccaaccacgttcctgtcatcaccacactgctacgaggaggggcccgtgtagatgccctggaccgagctggtcgcacacccctggcacctggccaaagtcaaaagctgaatatcctgcaggagggccatgccagtgcctagaggctgtgcgtctggaggtgaagcagatcatccatatgctgagggagtatctggagcgcctagggcaacatgagcagcgagaacgcctggatgacctctgcacccgcctgcagatgaccagtaccaaagagcaggtggatgaagtgactgacctcctggccagcttcacctccctcagtctgcagatgcagagcatggagaagaggtagcaagagaggctccctgcctt

SEQ ID NO: 14874 - DNA, 695 bp, Homo Sapiens
  misc_feature (250)..(364): n is a, c, g, or t
actgacaggacctgtcagcttctgactcttcaaaggagtcagacagtcggagaaggagacatttcaggtagggagcagctgtggggtctggcgtggtaaaccttgctggcttgtttagatcctagattttagccagaatacttaaaaagttcatctggatggtagccagtgcatgtcccacagagtgcaatggccatttccacctgtggctttcgaggccgaccgtcttggctcaaagccagccctggcnnnnnnnnnnnnnnnnnnnnnnnnnnnnnnnnnnnnnnnnnnnnnnnnnnnnnnnnnnnnnnnnnnnnnnnnnnnnnnnnnnnnnnnnnnnnnnnnnnnnnnnnnnnnnnnnnnncacaggtaaaactagtttgaacagtggcacaagtgtccaataaataatactagtatgttaacaattggtagtagtaacatcacccttctcctggttaccctgatgtgtgtgacaccaaccaggcagccttctccagcctattttcaggcaaagtgcatggggcccacctccacctcccttagcttgaccacagcaaaaactaacttcactaataatgtaagggaaaggcccttggatttgagtcagccagaggttcaagtgctggatctgcaccaaaaggacaagtcagtttttcctctcgtctgaaaaatggggatactgctccctgtca

SEQ ID NO: 14875 - DNA, 1273 bp, Homo Sapiens
gccgtggcctctgcgggccgctccgccggtgctgtccctgggcgcctccgtgctctcaggccaaccgcctctgagagcgcccactcgagcgccccgggagccagagggcgggggtcctcgccgggaccctcctgtgggcccaggggacaaaagtggctctcaatccagcacatgcacattgaagcaagttaaaggatttaatatgaagcacagaagcagatagtgccaaatagcaagcagtagttgttacacatttggtgagcagggcagcatttccttctcccactgctgctgagatggcagaaattagtcgaattcagtacgaaatggaatatactgaaggcattagtcagcgaatgagggtcccagaaaagttaaaagtagcaccgccaaacgctgacctggaacaaggattccaagaaggagttccaaatgctagtgtgataatgcaagttccggagaggattgttgtagcaggaaataatgaagatgtttcattttcaagaccagcagatcttgaccttattcagtcaactccctttaaacccctggcactgaaaacaccacctcgtgtacttacgctgagtgaaagaccactagattttctggatttagaaagacctcctacaacccctcaaaatgaagaaatccgagcagttggcagactaaaaagagagcggtctatgagtgaaaatgctgttcgccaaaatggacagctggtcagaaatgattctctgtatggcatttcaaatatagatacaaccattgaaggaacgtcagatgacctgactgttgtagatgcagcttcactaagacgacagataatcaaactaaatagacgtctacaacttctggaagaggagaacaaagaacgtgctaaaagagaaatggtcatgtattcaattactgtagctttctggctgcttaatagctggctctggtttcgccgctagaggtaacatcagccctcaaaaatactgtctcaacagctggaaatataaaagatttgcaaacttctttgtatctgtctctgcattggtatgccattttatagtccacaccctgaaaatgtatttcttccagaaagtctggaggaaggacctatataagtagaagtaaaggtatattctgtcactcagctgtattcacgtctgagcagttctgcagtaacacctgcttaaaattctccctttgcatgttttgtaaataggctccagttttgttttttaaaaggaatttattttttgcctcaccagtccacccaactgattct

SEQ ID NO: 14876 - DNA, 804 bp, Homo Sapiens
  misc_feature (162)..(224): n is a, c, g, or t
tttttccagaatgcctttattttcagtatcatagaatttaaatacagagtcaaaagatgatttataaaatataaaacattttctgcttggccgtatttgaagacaagctgaatacatatctatgttctgaataagtccactatggatatatataggaagagnnnnnnnnnnnnnnnnnnnnnnnnnnnnnnnnnnnnnnnnnnnnnnnnnnnnnnnnnnnnnnnattctttctatagttacaggaaatacttcttctataattctgatttggactcccatcctccaccatttactcatccactcattacctaaatcttggctttctttcctatattgtaaataatccatccaaacttctagccagtactgtcaggagggttcttgctcgagtgagctgttaatactattttccactgacaacttctgcacatcgaggacacagtgtatctgaagactccgctgtatacttccaacaacgggggcatttttctttcgtagtcggcatgacaattactttataggaagactcttcacgaatatcaccaccttctaagttgatgaggaatttccctttaagctcgattacatctgcagtcatctctcgtggttcctgagccagtaaagttgactcagaagccatcattaattcattcaactgagaggtgctggaagtctcttcagactgcagcatctctattatctcaaaaagcagtccaggttctatcacagtgataaccttgtactcagctgcatttttgccagggatgcttccagatgagttctcggaagtataaagcgttgag

SEQ ID NO: 14877 - DNA, 1108 bp, Homo Sapiens
cgagctgatacccaagtgaattcgactcgggtactggaggatcctctaagtcgaccaggctccagcttaacgatatttggaggtcagcacggtgctcacgtgtcgacggaacttgtacagggaggcatgcaccgcagtggtgaatacacgtcgaccaggctccatctttaacgatattggggaggtcagcacggagctcacgtgtcgaaggaacttgtctagggaggcatgcaccgcagtggtgaatacacgtcgagctggaggcatgcatgcatgctcgggtactggagctcggccccagttaatcgactcgggtacttggagcatcctctaagtcgaccaggctccagtctataacgagtattaggacggtcagcacggtgctcacgtgtcgacggaactatgtacaggaaggcatgcaccgcaatggtgaatacacgtcgaccaggactccatgtaaacgataattaggacatcagcacggagctcacatatccaaggaactatgcataggaaggtatgcacggcacgtggtgaatacacgtcgatgctgtgaggcatgccctggctgctcgtggtcctggaggagtcctcttcagtcgaccaggctccagcttaacgatatttggaggtcagcacggtgctcacgtgtcgacggaacttgtacagggaggcatgcaccgcagtggtgaatacacgtcgaccaggctccagcttaacgatatttggaggtcagcacggtgctcacgtgtcgacggaacttgtccagggaggcatgcaccgcagtggtgaatacacgtcgaccaggctccagcttagcgatatttggaggtcagcacggtgctcacgtgtcgacggaacttgtacagggaggcatgcaccgcagtggtgaatacacgtcgacctggaggcatgcttgcgtgctcgggtactggagcacggtgctcacgtgtcgacggaacttgtccagggaggcatgcaccgcagtggtgaatacacgtcgagctgcaggcatgcatgcatgctcgggtactggaggatccatctagagtcgaccaggatccagctttaacgatatagggaggtcagcacggtgctcacgtgtcga

SEQ ID NO: 14878 - DNA, 530 bp, Homo Sapiens
tttatcaagatactggcaagatgataaaattaagcctgacatatagaatggataggggaaggggggaattaaagacacataagataattatgggacttttgcttataatctcaacagtgaaaatggagagaaagaaatgaacctaaaacattctgaaggaataaacagtggtctgtgtgttagtccattttactgaaatagagttgctctaaagtagctattgaaaacttcttaaaatagggctaattttagaaagtttcaatagcacttccctggggggactgacaaaagctgaactatttagtggcactgtcactacaaaaggggaaaaaatgtttcaaaggcgagaaacccatttcctacaaagaaacagtaaaggcccttactatgtaagtcgagagcccacagtttgctgtttaaatccaagtaattcaatcagggcacccaaataccagcccggaacaagacaaaaagcctacattataacatgggtaaactgctattgaaattctaaaataggggggatcctc

SEQ ID NO: 14879 - DNA, 732 bp, Homo Sapiens
cggggaactcgtacttgccctcctggatgctctcaaacagcatgttctgcaggcagggcaggcctcgccgcggtcccagccgcagtcgctgccacagcggcccacgaagggcgggtagccgctgagtaggatatacaagatgacgcccaggctccacaggtcgcagcgcttgtcgtagatgctagcctcctcgctgaaggcctccactacctccggggccatgtactccgccgagccgcacggagtgagcagctccggggtggagataggggagcagtccccgttgagtttgatgccgctgcccaggtcgaagtcacagatcttcacgggggagacctggttggggtgctcacagaggatgttttccggctttaggtccctgtgggcgatgcctttgttatgcagaaagtccaaggcgctggccacgtcctgcaccaccacgctggcctccagctcgttgaagtgccggcgcttgtggatgtggctcaggatggagcctccccgcatcttctcaaacaccaggtagaagcggtcctcctcctcgaagaactcaatcagctctaggacgttcctgtgtccctggcactggtacagcatctccacctccctgaaaaccctgctccgaatgtggcctggctgcttctcaatgatcttgacggcgtactcctggctggtgatcaggttgatgcaggtcagcactcgggcatgagcgccctcccctataatcgtggg

SEQ ID NO: 14880 - DNA, 2004 bp, Homo Sapiens
catccttccctatcatccggagagtgcagtctctccatgctccgccgtcttccatgattcgctctgttcccatttcacggacagaagttcccccagatgatgagccagcctactgcccaagacctctgtaccaatataagccatatcagtcctcccaggcccgctcagattatcatgtcactcagcttcagccttactttgagaatggccgggtccactacaggtatagcccatattccagttcttctagttcctattacagtccagatggggccctgtgtgatgtggatgcctatggcacagtccagttgagaccccttcaccgccttcccaatcgagactttgctttctacaatcctaggctgcaaggaaagagcttgtacagttatgctggtttggctccacgtccccgggccaacgtgactggctatttctctcccaacgaccataatgtagtcagcatgcctccggctgctgatgtgaagcacacctacacctcatgggatcttgaggacatggaaaaataccgcatgcagtccatccggagagagagccgtgctcggaagaaggtgaaagggcctgtcatgtcccaatatgataacatgaccccggacggagcaggacgacttgggtgggatctatgtcatccatctgcgtagataaatcagatcctgggaaaactggacttctctcagatggcagaaggaaaggagagccgccatgcagccaaggccatcagaccacgagggagaggaccgcttctataggaggcatcccgaggcagagatggacagagcccaccatcacggaggccatggtagcacgcagccggagaagccatccctgcctcagaagcagagcagcctgaggagcaggaagcttccatgacatgggctgcagtcttcctgagcacagggcacaccaagaagcaagccataggcagttctgtgagtcaacagaatgggcccccttatccccagggagctggcacagattagattatgggtccaaagggattccagacacttctgagaccagtcagataccaacaacttctggagtaaaatatgctgcatccgggcaagaatctttaagactgaaccacaaagaggtaaggctctccaaagagatggagcgaccctgggttaggcagccttctgccccagagaaacactccagagactgctacaaggagggaagaacacctcactcagtcaatcgtcccaccccctaaaccagagaggagtcatagcctcaaactccatcatacccagaacgtggagagggaccccagtgtgctgtaccagtaccaaccacacggcaagcgccagagcagtgtgactgttgtgtcccagtatgataacctggaagattaccactccctgcctcagcaccagcgaggagtctttggagggggcggcatggggacgtatgtgccccctggctttccccatccacagagcaggacctatgctacagcgttgggtcaaggggccttcctgcccgcagagttgtccttgcagcatcctgaaacacagatccatgcagaatgagccctgcgagcaatagagttgaagcagcctctgctggacagtggactgttctatttttttcaataaccaaaaagattaaacaaaaaatactataaaacccctgaccacatttaaaaaatgataataaaagtaaacaaatcagcatctttttccccttccctgcttcattaccccctcttccatctatagactttgtcatttttgtctttagaaaagatctgaaggatggtaaagccccgtgctgaaacccagtagagaaacctgtctcaggacacacttgccatctagggctagcttgaaagagcctgaggactgcctttaactgaatttgaattcagcattgtcctttcttcttagtatttgctgcataattgagagcagttcacatcgatttcctggtaggcgtctgcattccctgattgtgttcctgcttctccttcagtagctgcac

SEQ ID NO: 14881 - DNA, 521 bp, Homo Sapiens
gcacctttgccgcaacccggggccgccccttggccaatggctttcccgtaccagtacccgccaccccgcaccccatacaacccacacccggctttcccggagctgggctacagctacggcggggcagcgcccagcagtcagcacagccgaaggcagtcggagcagtggctccaaccgtagcggcagcgatcggaggaaggagaaggacccgaaggccggggactccaagtccgggggcagcggcagcgaatcggaccacaccacacgcagcggccatggggcccccacggagcctccgggccgcgacctggcctcagtgcccccggaactgaccgccagcagacagtccttccgcatggccatgggaaaccccagtgagttctttgtggatgtgatgtgagcagggcccctcccccagctccattccgctcccaccccagccggctgcgttcctctctccatccgtccgtctttttttactttgtctggtacctgaaagggaaataaaaggaactaaatcc

SEQ ID NO: 14882 - DNA, 1069 bp, Homo Sapiens
  misc_feature (220)..(286): n is a, c, g, or t
aacaggctgatgccccacagagttcactgcctgtgagacttagcaccaagtgctgaggctggaagaaaaacgcacaccagacgggcaacaaacagtctgggtccccagctcgctcttggtacttgggaccccagtgcctcgttgagggcgccattctgaagaaaggaactgcagcgccgatttgagggtggagatatagataataataatattagtaatnnnnnnnnnnnnnnnnnnnnnnnnnnnnnnnnnnnnnnnnnnnnnnnnnnnnnnnnnnnnnnnnnnncgtcatatcaggatgacctcgagagctgaggctctagccacctaaaaccacgtgcccaaacccaccagtttaaaacggtgtgtgttcggaggggtgaaagcattaagaagcccagtgccctcctggagtgagacaagggctcggccttaaggagctgaagagtctgggtagcttgtttagggtacaagaagcctgttctgtccagcttcagtgacacaagctgctttagctaaagtcccgcgggttccggcatgcgctaggctgagagcagggatctacctggcttctcagttctttggttggaaggagcacggaaatcagctcctattctccagtggagagatctggcatcagcttgggctagagatgccaaggcctgtgccaggttccctgtgccctcctcgaggtgggcagccatcaccagccacagttaagccaagccccccaacatgtattccatcgtgctggtagaagagtctttgctgttgctcccgaaagccgtgctctccagcctggctgccagggagggtgggcctcttggttccaggctcttgaaatagtgcagccttttcttcctatctctgtggctttcagctctgcttccttggttattaggagaatagatgggtgatgtctttccttatgttgctttttcaacatagcagaattaatgtagggagctaaatccagtggtgtgtgtgaatgcagaagggaatgcaccccacattcccatgatggaagtctgcgtaaccaataaattgtgcctttctcactcaaaaaaaa

SEQ ID NO: 14883 - DNA, 1126 bp, Homo Sapiens
  misc_feature (312)..(312): n is a, c, g, or t
  misc_feature (1083)..(1083): n is a, c, g, or t
tctctcacacagataaaaaacataagagagaagaaggagggggggatgactcatgactgtactgcctctcgcttcttggtgtttctgaccacaccacatgttggtgtgtttcaccaccagttgttttgttgtacgagcgtgctattttttcctcttgtaatccctttcacatgggtcgctcttattaggcggcgtaaaacccctgtcgaatttttttccacgggaccaagatcttttgtgggcacaccatatcagtccacgatcttctggaaccaatagatattggggaaaacaaaaattttcccagattcnccactataggattgcatttttttggataacgccaaagttatatgccttgttttataggggacaccccgctagtatttaaaggttgaaatacgaacagtggctgactacccagaggatgtagtattttggctttctgcattacaacgtcttctggaggaagggagcaggatgggtttcatttgtatctagtgtgtgtcttaacatctttctaaatcggcagtgtaactgcatagtttaacttcctgtctgtctccctcattttactcttccctccttgtcttatgttttggcttttgtgtatcagagcatctttctttgcagcatcctagtcttgcttcagtttctgtggtctcttttcatcctgcttgaagattcggagtgtggaaggaggctaggaagtctggtgcagtaggtgagcagacctcttgctgcccagcccagggtgggtggggcgcacacctgtctttgtgcatgcaaatctgatacacctggcgcatcctctggagagcacaacgcatggaaaggtctggaagctctgtgtagccattccttctgcagtcatcctacccaagtaaaagtaaccttggctatgttaccaccgttttggtcacccaggaggacatcttagcaagggtgcctgcgagggagtgtgggactgggcctcatcctcgccggcgttggaaaccaaggccttgtatgccacgccttatgaagcactgtttcacagttactttcacttcccgaataaaggttaccaggtaattaatatcngagcggacgagggaaaaaagcaacaagcccccgcggaagaagg

SEQ ID NO: 14884 - DNA, 955 bp, Homo Sapiens
  misc_feature (697)..(697): n is a, c, g, or t
  misc_feature (866)..(891): n is a, c, g, or t
gggggggcggcctgggataggggctgtggcagtacgcggggacccggctgcggtggctgcgggactgacgagaaactactaaagttcctggggaagcaaagtagaatttcataagaacaaaatggatggagaggagaaaacctatggtggctgtgaaggacctgatgccatgtatgtcaaattgatatcatctgatggccatgaatttattgtaaaaagagaacatgcattaacatcaggcacgataaaagccatgttgagtggcccaggtcagtttgctgagaacgaaaccaatgaggtcaattttagagagataccttcacatgtgctatcgaaagtatgcatgtattttacgtacaaggttcgctacactaacagctccaccgagattcctgaattcccaattgcacctgaaattgcactggaactgctgatggctgcgaacttcttagattgttaaataaaataaattataataaactgttaactcttttcagtatttaatacctgtagttcagttagtaactttttcatatatagcatgttgcctgtatgcagttgaactatataaagttcattgcaaagcagattatcttgtttttttgcatagcaatcaaagttgaaatttggttgctacatcaacaaattaaggacattttcacaaactgagaaataaacaaatatgccaatttcctanaaccccattacacccccctaaatataacaatgtccggccgccctcggcccccgaaaaacttttcataaccattccgttgggggcgcgggccccacaaggcaaatggaacatgccccatcagctgttttcccaggaaaatcctgggcccaggcacaaccggcttggaatnnnnnnnnnnnnnnnnnnnnnnnnnngcgggcaaccgaagacccgtctttgacaaaacccccccaacgggaatttcttgacgggccctaa

SEQ ID NO: 14885 - DNA, 4071 bp, Homo Sapiens
  misc_feature (2973)..(3000): n is a, c, g, or t
  misc_feature (3025)..(3041): n is a, c, g, or t
  misc_feature (3649)..(3650): n is a, c, g, or t
  misc_feature (3653)..(3653): n is a, c, g, or t
  misc_feature (3657)..(3660): n is a, c, g, or t
  misc_feature (3666)..(3667): n is a, c, g, or t
  misc_feature (3669)..(3669): n is a, c, g, or t
  misc_feature (3684)..(3685): n is a, c, g, or t
  misc_feature (3688)..(3688): n is a, c, g, or t
  misc_feature (3699)..(3700): n is a, c, g, or t
  misc_feature (3731)..(3731): n is a, c, g, or t
  misc_feature (3743)..(3743): n is a, c, g, or t
  misc_feature (3766)..(3767): n is a, c, g, or t
  misc_feature (3789)..(3789): n is a, c, g, or t
  misc_feature (3985)..(3985): n is a, c, g, or t
  misc_feature (3996)..(3996): n is a, c, g, or t
accagcaggcctagtcacccccaaggaaatgagccagagctctacatcgacattggagcatatggggagccgcgtgtgaaacactttgaagccaggtcctgcatgaggcagctggagaagtttgtccgcagcgtgcatggcttccagatgctgtatgccgactgctacatgaaccgggaggagttctgggagatgtttgatggctccttgtaccacaagctgcgagagaagctgggttgccaggacgccttccccgaggtgtacgacaagatctgcaaggccgccaggcactgagctggagcccgcctggagagacagacacgtgtgagtggtcaggcatcttcccttcactcaagcttggctgctttcctagatccacactttcaaagagaaacccctccagaactcccaccctgacagcccaacaccaccttcctcctggcttccagggggcagcccagtggaatggaaagaatgtgggatttggagtcagacaagcctgagtccagttccccgtttagaactcattagctgtgtgactctgggtgagtcccttaacccctctgagcccgggtctcttcattagttgaaagggatagtaatacctacttgcaggttgttgtcatctgagttgagcactggtcacattgaaggtgctgggtaagtggtagctcttgttgcttcccgttcagcgtcacatctgcagtggagcctgaaaaggctccacattaggtcacctgtgcacagccatggctggaatgatgaaggggatacgctggagttgccctgccatcgcctccatcagccagacgaggtcctcacaggagaaggacagctcttccccaccctgggatctcaggagggcagccacggagtggggaggccccagatgcgctgtgccaaagccaggtccgaggccaaagttctccctgccatccttggtgccgtcctgccccttcctccttcatgcctgggcctgcaggcccaccccagccaccactgagtccactcggagtgccctgtgttcctggagaaggcattccagggttgaatcttgtcccagcctcagcctgggacacctaggtggacgagagtggtctccgctctgaattggatccaggggacctgggctcattcttcttggctcaccaaccctgcaggcctcatctttcccaaaacccactttgtcttggtgggagtgggtccgcgctgctctgcagcaggggctggggagtggacagcatcaggtgggaaagtggagtccaccctcatgtttctgtaggattctcaccgtggggctggaagaaaagagcatcgacttgatttctccaaccactcatccctctttttctttcttccaccactccccaccccagcttgtagttaatttcagtgccttacaaatcctaagctcagagaaagttccatttccgttccagagggaagggaacctccctaggtccttccctggcttgttataacgcaaagcttggttgtttatgcaactctatcttaagaactgcccagcctcagctgaaaacccgaatctgagaaggaattgcgtcatgtaagggaagctggaattaagggagctgagccagtcatggttgtggcgtgtgagtcaggagacctaggtttcagcccctctctactgtcagcgagctgtgcaacgtgggcaagtcattgtcctctgagctgcagtttcctcatctgtcacatcgctacagacaagacctccctggaacccttctgattgtcttagacactgtggttgcaaaacccacggaaagcctcatttgtgtggaaagtcagaggaaaaatgatccagtggacacttggggattatctgtcattcaagatccttccttcaaccccaaggtcagctcccatctcatttccagaaaggctcatacctggcttgcagggaagcatctgtcttgtcatcccaggtgccagaatcctctcagagtcattgaagggtgttcacccatcccacccaaggcttggcacactgccagtgtcttagcagggtcttgtgagggctgggggcatccaggcactcagaaggcaaaggaaccaccctacccatttggcctctggagggggcagaagaaagaaagaaacctcatcctatattttacaaagcatgtgaattctggcattagctctcataggagacccatgtgcttccttgctcagtgcaaaactgatgattctacttgctgtagatgaatggttaacacgagctagttaaacagtgccattgttttgccagtgaagcctccaaccctaagccactgggacggtggccagagatgccagcagcctctgtcgcccttagtcatataaccaaaatccagaccttatccacaacccgggacttggaaaggaaggtattttggaatcacaccctccggttatgttgctccagtaaaatcttgcctggaaagaggcagtcttcttagcatggtgagctgagttcatggcttttttttgtagccagtcctgtccctggccatccatgtgatggttttggatggagttaaacttgatgccagtgggcagtgcatgtggaaagtatcagagtaagcctctcccctccagagccctgagtttcttggctgcatgaaggttttctttagaatcagaattgtagccagtttctttggccagaaggatgaatacttggatattactgaaagggaggggtggagatgggtgtggcagtgtatggtgtgtgatttttattttcttctttggtcatggggggccaaggagaaaggcatgaatcttccctgtcaggctcttacagccacaggcactgtgtctactgtctggaagacatgtccccgtggctgtggggccgctgcttctgtttaaataaaagtggcctggaacagaaatcttattttatgcgacacaccgtagtagatttattttgcccgcggccggcaccgccgccaatgtacctgnnnnnnnnnnnnnnnnnnnnnnnnnnnnggcgatgaaggatttttttgtcggnnnnnnnnnnnnnnnnnaaaaaccttgtttacaccactttgtgggggcggcgccgccccacccaatgtggcagggggtgagttgggggaacagcgagtgagctgacctaaacaaacaccctcgggggcctccccaccatgggcgtttgcgcgttgtgcttgaccatgccaaaaaaaagaagattgggggtggggggtacccccagcggggtttcgccggaaaaccgacacgccccagaacggcggcggccctaccggggtgggccggtttggcacggcgcgcttatctatccgaaagaggggggggtgcgcgcaacggatcggcaggtctgggggataatctatacacacgtgaggctcgcgcccgccgcccctttgtatgctcctataccgcacgctcccccgcaaactcgccgcgccggagcgtgcagaagatcatatctcgtgtagggacacgcgcgtgacccgtggtcggtcgctcacagcctcagcgtccgacaaacgatctccgcctgctcgaaacgcatagcgactgcgcggatgccgattgatatcatcttggctgccactccactcgttatgcgtgttactcggcgcagcttcgcggcagagataaacatacgacnntcncctnnnnacgggnncnaatatcgacccgtcnnttntcacgcccggnncggggacgaggacgagacccttcttttttcntccccctcgagngtcatctcaaaaaaagagtctcnngagagggggcgggcgccggggncgacgtactttgtttcccacgcgccgcggcttgtgattcgtggggggcccgccacagcgacacgtctgtagtgatccgtccccactcctccccgccgtgcgctgagccgagcgagatctcactccgacgcgctggcctctagctagtcctcgcgccaccttagatccaagctggatatacaaaatataagggatcntgctacgcatnttgcctcagatgagcaccccgacccccggcgttgattagtcgggacataaattaacaggatgggcgcgcgcctgc

SEQ ID NO: 14886 - DNA, 809 bp, Homo Sapiens
ccgacaaaaacacggctaggtcgaggctgggtgtggaattcggcacgagggtcccgcgaagccacatccctacaaagcaggaaagtatgcttgggagaggccaagtgagtggggaatcagcccaaagccaggcgtcagtgtctccctcacctgaagctgactttttccccaccttggacagagggcgggagatgccatccccactgaacccagtgctttcaccagccatattagctcccactcaccccccgtcgtggaagcctcgtgcctgtcacacctgcagggcctggggcgtgcatggcctcagggatggcctgttcagctgctgggtgactcgggtccaggtgcctcaccacctgctgagctctgtgtgatttctggacacttctgctcgttgccttttgggctcagtgaagagtctggagtttatcttggagtgaggtggccggttcttggtgggatctgagcagagtccattcaggagcaggaaagttcatctcagaccctaaatccagccacgtcattgccactgcttaacacctctaacaacttcccctggcacttagtgacagcgtcttggctccttccctcggctcatggccctcagaatctgcgtcacatacaccccagtctcccgataggtctctgcactcgctgttgcctctgcctggaacaagtctccctcctggtggtctggctccgggtgtggccttcctgacctttcacttcccagtttttgccccttggggcgggactcgtgcatttcccgggggggaccctggggccccaggggcccggcccgtgtcccg

SEQ ID NO: 14887 - DNA, 1159 bp, Homo Sapiens
  misc_feature (758)..(807): n is a, c, g, or t
  misc_feature (881)..(881): n is a, c, g, or t
tttcgggatcatgagtaagctgtggcggcgtgggagcacctctggggctatggaggcccctgagccgggagaagccctggagttgagcctggcgggtgcccatggccatggagtgcacaagaaaaaacacaagaagcacaagaagaaacacaagaagaaacaccatcaggaagaagacgccgggcccacgcagccgtcccctgccaagcctcagctcaaactcaaaatcaagcttgggggacaagtcctggggaccaagagtgttcctaccttcactgtgatcccagaggggcctcgctcaccctctccccttatggttgtggataatgaagaggaacctatggaaggagtcccccttgagcagtaccgtgcctggctggatgaagacagtaatctctctccctctccacttcgggacctatcaggagggttagggggtcaggaggaagaggaggaacagaggtggctggatgccctggagaagggggagctggatgacaatggagacctcaagaaggagatcaatgagcggctgcttactgctcgacagcgagctctgctccagaaggcgcggagtcaaccttcccctatgctgccgctgcctgtagctgagggctgcccacctcccgccctcacagaggagatgctgctgaagcgcgaggagcgggcgcggaagcggcggctccaggcggcgcggcgggcagaagagcacaagaaccagactatcgagcgcctcaccaagactgcggcgaccagtnnnnnnnnnnnnnnnnnnnnnnnnnnnnnnnnnnnnnnnnnnnnnnnnnntgcggctccggcccccatggtgcgctactgcagcggagcacagggttccaccctatccttcccacctggcgtcncgcccccacggcagtgtctcagcggccatccccctcaggcccgccgccgcgctgctctgtccccggctgtccccatccgcgccgctacgcttgctcccgcacaggccaggcactctgtagtcttcagtgctaccgcatcaacctgcagatgcggctgggggggcccgagggtcctggatccccccttttggctacgtaaggcccttaacccggactctgcgccccgtcccatgcccgctcttgagtatcttccccaccctattaaaaaacatccggtg

SEQ ID NO: 14888 - DNA, 1600 bp, Homo Sapiens
atcagtaactgcatggccaaagcatacccacagtactacagaaagccgtcagtggtcaagcggatgccggccatgctcactggactctgtcaaggctgtggcactcggcaggtggtgtttactagtgatcctcataaaagttacctccctgtgcaattccagtcacctgataaagcagaaacccagcgtggagacccgtctgttatttctgtcaatggcactgactttaccttccgaagtgcaggcgtcctcctccttgttgtggatccgtgcagcgttccattccgcttgacggaaaaaacggtttttcctcttgctgatgtcagtcgcattgaagagtatttaaaaacaggcatccctccaaggtccattgttctgttgagcacaagaggagaaataaagcagttaaacatttcacacttactagtacctctgggattagccaaaccagctcatctttatgacaaagggagtaccatatttttgggattcagtggaaactttaaaccatcatggactaagctatttaccagtcctgctggacagggccttggggtgcttgaacaattcatacctttgcagctggacgaatatggttgtcccagagccaccactgtccgcagaagagacctggaactgctaaagcaagcttcaaaagcacattagagactaactgtaacttaagtgctgggggaaaaaaaatgtgaactaacttatttaatttatggcattttaaaatgacactgttaacccaacggaaccattttccagtttgatacagaatggggagaaaagaaagcgtttgaaattattgcttggataccagcttcatgcaccttctacttgtacaaaatgttaaagacgttgtttgtatttgtaaggctggtgtattcagagagcatatctcttattcctcactttccacccccgtattttgtaatgaccatgagcaatgtctttactttttgtataatggggcggggtggacgtgcgggcttctgacagtcagcctgaggtcctttagaggaccagcttacggaccacctttggataccttgcaagtctaatggctcaggctggggtccgggcgggcaattttgactttggccggcctggcaatggttccagtcaccggcctctgggggcccccgggttttcctggccgccagacccttttgaagggaccttctccttgatgaaaaaatccggaactggccacggagttttcttaagataggtaggcaaaccgttcaaggggcccccaaaacatccctcgggcctcttattttattttggccccctagggcaacattcgtcgcccctaattatttttcactcaccccctttccataaataatcctaagccctaatatcgcccgtcacggggggcttagaatacttgtacccaacccacaggggaaaagacatctacccggcggacatctaataagagggccctcctctggcggggtatcttattattttctcccccccttgaaatcttgccggaaccaaccccgcgggtgtcaatcaatttgttttccctcgtcgatccactatacagcctccagaaggggttcactatgggacaaccatccca

SEQ ID NO: 14889 - DNA, 1689 bp, Homo Sapiens
  misc_feature (950)..(1077): n is a, c, g, or t
  misc_feature (1169)..(1177): n is a, c, g, or t
  misc_feature (1409)..(1454): n is a, c, g, or t
  misc_feature (1484)..(1545): n is a, c, g, or t
ggtgaattaaattattcttgtcggtttgattctaaacatctggcagctgctctggagaatctcaataaggctctcctagcagacattgaagcccactatcaggacccttcacttccttaccccaaagaagataacacacttttatatgaaatcacagcctatctggaggcagctggcattcacaacccactgaataagatatacataacaacaaagcgcttaccctattttccaattgtaaactttctatttttgatcgctcagttgccaaaacttcaatacaacaaaaatctgggaatggtctggccgaaaaccgaccgacccggttgattggccaccacttgtcctgggactgctcactctgctgaagcagttccattcccggtacaccgagcagttcctggcgctgattggccagtttatctgctccacggtggagcagtgtacaagccagaagatacctgaaattcctgcagatgttgtgggtgcccttctgttcctggaggattatgttcggtacacaaagctacccaggagggttgctgaagcacatgtgcctaatttcatttttgatgagttcagaacagtgctgtaactgtttttcctacttcttcaatggaaggattgtccttagatcttcccaccatcacaaatgaatttgaagatgaaaagaaactcagttgctcatacaactgcattttttctgtctattatgggaaacatcagacgttctgagtaagatatatctcatggcattagttaatataactgatattgtttaaatcatggtattacatgcaatttatatcagataaaagcagaacacatttttgtactgcctctcttaaatgctgaatgtaactgttatgtataaatccatttagttttatgttctaaagaactatttgtgcaactccagattttcagtaaaatagtattactagtacccnnnnnnnnnnnnnnnnnnnnnnnnnnnnnnnnnnnnnnnnnnnnnnnnnnnnnnnnnnnnnnnnnnnnnnnnnnnnnnnnnnnnnnnnnnnnnnnnnnnnnnnnnnnnnnnnnnnnnnnnnnnnnnnnttttctaaggccttcaggacgaaaaacaaacataaaaatcctttggcgccggccccttcgcccttaacaaacccttaccaggctcttttttnnnnnnnnncccctcccgcaaaggaaaagggggttactttcccctcccaaaaaaaccccgccaaagacacctttggcccttccctcgaaaaaaaccccggggggcccctcccggtgttttacaaaattcacaatggcgtccctttttgtccccccggtcttcttccatgccgatccttttgcgccccttttgaaacattatcgctcaccctgttcgcaaacatatcgatcctcgggggggnnnnnnnnnnnnnnnnnnnnnnnnnnnnnnnnnnnnnnnnnnnnnnacaatggcccgtaattggccgctttttctnnnnnnnnnnnnnnnnnnnnnnnnnnnnnnnnnnnnnnnnnnnnnnnnnnnnnnnnnnnnnngttttgcacaaagtgcgcccaaacacaaacccctcttatctcggcccccccttttttaaacataaaagggggcggaaaacctccccccgtgtattggcctcctcgcccccaaaaataatattttgtgcccacaaacccttcacg

SEQ ID NO: 14890 - DNA, 591 bp, Homo Sapiens
agcagctgaggctgcgggagcgggagttgacagacctgaagggggccctgaaagaggaggtagcctcccgtgaccaggaggtggaacatgtccggcagcagtaccagcgagacacagagcagctccgcaggagcatgcaagatgcaacccaggaccatgcagtgctggaggccgagaggcagaagatgtcagcccttgtgcgagggctgcagagggagctggaggagacttcagaggagacagggcattggcagagtatgttccagaagaacaaggaggatcttagagccaccaagcaggaactcctgcagctgcgaatggagaaggaggagatggaagaggagcttggagagaagatagaggtcttgcagagggaattagagcaggcccgagctagtgctggagatactcgccaggttgaggtgctcaagaaggagctgctccggacacaggaggagcttaaggaactgcaggcagaacggcagagccaggaggtggctgggcgacccgggaccgggagttggagaagcagctgcggtcctgagggtcgaggctgatcgagggcgggagaccatgataaagctaccactc

SEQ ID NO: 14891 - DNA, 1072 bp, Homo Sapiens
  misc_feature (152)..(195): n is a, c, g, or t
  misc_feature (902)..(911): n is a, c, g, or t
aatgatttcttatgatgataaaaatcgaatgggatcagacgatgtttgcatttttttactacttgaataggacacctcaagtttgagatttcattttcttttagaacacagtcacaagattaatctggtgaatcctttagtcacagttctcnnnnnnnnnnnnnnnnnnnnnnnnnnnnnnnnnnnnnnnnnnnnaaaactgaatggtcacatttaattgctttggggaccattgaatagttgggaagtaagaattttttaattggcatgagacggttcctcaactgttaaattaaccaactttgacctgtctttagaaaaaggcttatttgtatgatttcgggctaactccccggggaccatattaaatgacaaaaatgctcctttgggtgacacaccctacaaagtatttgctgttacgaacataaacgcccacattcttaatatctaatatttttgaccagtgatgttttatgctgtcatctgaaccctagagaagcagtgtcagaggaaaccttggtgtcacatgtgtcttagcaaaagggttaccatgatcgagggtcatgtgaccaaaagatgctccagagaagcttgagaatttgtttcaagttgggaggagggttggagatacaaaaatcactctgctctacaggactcttcagctgtctatgcaagaaattccgttttctctttcagcacctggaaagacacagcagcccaccgaggcgataggtgattcactaagcacaagaggaatgttttctaagcaaggcgtcccttgcctctcaaacaaatgccctccaagtttgttagggtttctattcctgcaacttgtggtatcaaaaccacttcctggaattgtcaaagcactgccaaaataaatgtttttcccccttctaagnnnnnnnnnntgacagtgctcatatttgacacttgtgtattggactctcttttgaatgaataaaaaggaaaaggggtttggtgtaattcctgatggggtgcgtgttgtttttcatgccatggtttgtgaattttaattgtggtttcccatttcgttgttgtaactgggcag

SEQ ID NO: 14892 - DNA, 821 bp, Homo Sapiens
cctaggtgttgtcgtccctgctagtactccgggctgtgggggtcggtgcggatattcagtcatgaaatcagggtagggacttctcccgcagcgacgcggctggcaagactgtttgtgttgcgggggccggacttcaaggtgattttacaacgagatgctgctctccatagggatgctcatgctgtcagccacacaagtctacaccatcttgactgtccagctctttgcattcttaaacctactgcctgtagaagcagacattttagcatataactttgaaaatgcatctcagacatttgatgacctccctgcaagatttggttatagacttccagctgaaggtttaaagggttttttgattaactcaaaaccagagaatgcctgtgaacccatagtgcctccaccagtaaaagacaattcatctggcactttcatcgtgttaattagaagacttgattgtaattttgatataaaggttttaaatgcacagagagcaggatacaaggcagccatagttcacaatgttgattctgatgacctcattagcatgggatccaacgacattgaggtactaaagaaaattgacattccatctgtctttattggtgaatcatcagctaattctctgaaagatgaattcacatatgaaaaagggggccaccttatcttagttccagaatttagtcttcctttggaatactacctaattcccttccttatcatagtgggcatctgtctcatcttgatagtcattttcatgatcacaaaatttgtccaggatagacatagagctagaagaaacagacttcgtaaagatcaac

SEQ ID NO: 14893 - DNA, 1751 bp, Homo Sapiens
  misc_feature (1461)..(1559): n is a, c, g, or t
  misc_feature (1622)..(1631): n is a, c, g, or t
ggggttgggcagggcaatacgcctgcgtgttgccggatgcgcatgcgcaggcgccgtgtggcactcggcggtcgaaaggggagttcaaggagacgggggcgacgcggctgagggcttctcgtcggggtcggggctgcagccgtcatgccggggatagtggagctgcccactctagaggagctgaaagtagatgaggtgaaaattagttctgctgtgcttaaagctgcggcccatcactatggagctcaatgtgataagcccaacaaggaatttatgctctgccgctgggaagagaaagatccgaggcggtgtttagaggaaggcaaactggtcaacaagtgtgctttggacttctttaggcagataaaacgtcactgtgcagagccttttacagaatattggacttgcattgattatactggccagcagttatttcgtcactgtcgcaaacagcaggcaaagtttgacgagtgtgtgctggacaaactgggctgggtgcggcctgacctgggagaactgtcaaaggtcaccaaagtgaaaacagatcgacctttaccggagaatccctatcactcaagaccaagaccggatcccagccctgagatcgagggagatctgcagcctgccacacatggcagccgcttttatttctggaccaagtaaagatgggtccgtggcccacactcggtcatgtgctcagacaacgactgatgaaaacgcccatgcggtttgcatcgactgatagtgtgttctttccgggatcacaaacattaacaaaaaagttaacttatgtgacttggcagttattctataccatttcctgtccattaaaatttttaaaggaaatagcaaaaacaatgaccccgcactacagctcccatgtcggccgcctcggcctctagaatccttcataaagaattaccctgataacatatgcgtaatgctttatgaagctttagaaatgagctcatgactcattaaaaaatactaaacatgatgctacttttactatctccacctaaataatctgaggacgggttccatactttagcctcaacgctgagtcgcgccttgtagaaattggcctctgtctatacttgccaaaagactatccggttaggatgaactacattccctaacttacagtgcaaattccgatcttgggaaaaaggccacaccacctcccttgtatttttaaaggggcgctctccgccacctttttaaccatatcgcctagggggggttggcccttgtggcccttattcgggaaccaaaactgggccttttgggctcattacagagcggaaaaaagggcccccggaaatctaaggccctcccccaagggccggaacaggcacacacctccggcctgtttacgccccgtaggagagcccctgatagccccctatatgttataccgtctgcacagtgatagtaacccctccccctatttatttttcnnnnnnnnnnnnnnnnnnnnnnnnnnnnnnnnnnnnnnnnnnnnnnnnnnnnnnnnnnnnnnnnnnnnnnnnnnnnnnnnnnnnnnnnnnnnnnnnnnngaaaagcacggccttttattgagaaaaccatttgttacctctgtgggagggcgcgggggaggnnnnnnnnnnggcgggggtcgggggggcgaccaaagtggggcctcccccatgctgatttattcctctcgcagagagccgcacccgcgaggggccactgaaaaaacaagggcccctggcgggtatacgcga

SEQ ID NO: 14894 - DNA, 998 bp, Homo Sapiens
ttgtcagcaagactgttgcagaagatctatccttaagaggcagaaacatctgcggtgaggaaggcagctattgaaggtatcccaggagcatgagactgagtttgcagagctgagggttgtcaatttccttttctactgatatcttcttcctttagagcaaacttcctccttaggacctcagagataagcacagcagggtcttcctccttcaataaactccggttcagatcttgactctgttttcattcggtgaaagtccttcaggatacccatcatgtctgcaaagctgctgcccttggacaaagagacgcagtcatcctcttcagacgaactgcaggcagctttgtgttctggtttgcaacattcagggctggcagaacaaagcagggggactgatggaagctcagggacctccacctctgtctcctcgatgatgtcactgcatcagctgccactatctttgcaatctggctgcgcaagtggctcagctcgtcctgcagctcagtagtgcggcttagggctggcagagctggcttcttcagggccagaagcctctcctcggacccacgcaggttgggaacagaggcattgcgctgcatgacaatcagagggctgggtttccaggtgtgcctcagggggcgcgtatcactcctgacccgggcatatgtctcctcttcatccgcagcaatccaggcgatgtcagccagggtagggactgggggcacatctctcaaacacaggtcagagatgttgggcagggtctcaaaggacgcccgggcacacggcttcaagggtaggttggtcccaattcttcttactacacttcgagcagccccatgtggcttgttttgccagattgggatggtcacagtggcttccattcctgacatttgaaccagctcctgcacttgaaggacaaggcagccactgggcagctccgggaggcgggaggcgtgactccttcatatcaggccatctcaaggtcgggctcccggacg

SEQ ID NO: 14895 - DNA, 809 bp, Homo Sapiens
  misc_feature (632)..(633): n is a, c, g, or t
  misc_feature (636)..(637): n is a, c, g, or t
  misc_feature (639)..(649): n is a, c, g, or t
  misc_feature (651)..(651): n is a, c, g, or t
  misc_feature (654)..(657): n is a, c, g, or t
ggggcgggtcgggacgctctgcgtggggcggggcgcaagggaggtttcgagcccggaaggtccggcgcccagagctaacgggagtcccaggttaaacactttaagatgagaaaaattgatctctgtctgagctctgaagggtccgaagtgattttagctacatcaagtgatgaaaaacacccacctgaaaatatcattgatgggaatccagaaacgttttggaccaccacaggaatgtttccccaggaattcattatttgtttccacaaacatgtaaggattgaaaggcttgtaatccaaagttactttgtacagaccttgaagattgaaaaaagcacgtctaaagagccagttgattttgagcaatggattgaaaaagatttggtacacacagaggggcagcttcaaaatgaagaaattgtggcacatgatggctccgctacttacttgagattcattattgtatcagcctttgatcattttgcatctgtgcatagcgtttctgcagaaggaacagtagtctcaaatctttcctcataatgataacaaaatgctcttgcatgattttttaacaatatatttaaacaggaagttgtcactgatatactttattaaaaggatttttaaccccnnccnncnnnnnnnnnnnanaannnnccttggtcggcggccccggccccccaaaaagttttcaaaaacattcgttgtgcgccggcgggcccaataggaaaggggaacatggtccaataccggttttcctaaggaaaaccctgggcctggacttagggccttggaattcccccccaaat

SEQ ID NO: 14896 - DNA, 575 bp, Homo Sapiens
ttacaggtggtaaacccgaagaaatgttcattatagatgtctgatacatgtatggtctcggtagtacatatgaaattcactgtggggaatacacagaaagaggcagcctttctcaggagaattaaactgatgttgggaaagatgcccatatgagggaagagagagaccttctcatattattttatattgttttatactcagtacctgttttaagaaaaaacaacaaggaagtgaaatcaaagacaggcagcccggcaccaggcctgaaaccagccctgggcctgcctggcctaaacctagtagttaaaaatcaacttacgacttagaacctgatgttatccgtagattccaagcattgtataaaaaaattgtgaaactccctgttgtgttctgtaccagtgcacgaaacccctgtcacatagcccctagattgctcaatcaatcacgaccctttcatgtgaaatctttagtgttgtgagcccttaaaagggacagaaattgtgcacttgaggagctcagattttaaggctgtagcttgccgatgctcccagctgaataaagcccttccttctaca

SEQ ID NO: 14897 - DNA, 805 bp, Homo Sapiens
ttacctggcatgtcattgtagaggctgatatattacaagccggaatcattcaaacaatataaaaagtgcctcaatgaaataaaacccaaaagtagtttatcaatagtaactgtgatacttaatatacaaatgctgtagtattgtgtttgtaatttggtaagtaaatgaccaagtatctgaatgcaaaagtgatgaactttgatgaaagcttaattttgctagtaaatttcacacgaaggggtaaaataggataatctttaacataaagctttaggacaaataatttaaacatatcataaacactgaaaatgtgtttttaattgttatttacagttaatcagtgataccagtgtttagcttaatccagccaattgccagtcttgactccttctttcaacatctgttattaagatcttccttataaatacttagacaaattaatttagtgaaggagagcgatctgtggtccagagtaactcaatgtatggccatttggtttgcagacagcgtttaataggagtgtcatctgtctgtagcatgggatcttcaaaacccatcacaactgcagtcccttctacgtacatgacctgttcattataatttgactgcttcaatccattgtagtggtagacagtaaaagattctggaccactggagccctgatcaggaaaaaattcttgaagaaatgggcccaataatatgattcctaatccttctggatctaatttattcctcatgagatttatatattcaggatctgaaacaaggtccaatgctttcatcacatcttccagaagtgaatccc

SEQ ID NO: 14898 - DNA, 455 bp, Homo Sapiens
agaggatcccctggtagcgctcgggttaacgatggtgcggacatcagccagcacttcctcatgtccactcctcacggcctcgcagacctggcagcacatggagtagatgaggcaggcggtggctgcgctgtccaccccgccactcaagggcagcaaaaaccctgcctgttgacttcgtcttaaaaaatcccagagccagcaggcaggtccaaggcttatctcctcctcagggctgtggtatttccactcgatgggctcagagatgggtgccagcaagtcctcgtggcacgagagggcaaagtccaccttcactctggggtaggggctcgccctgctggccgccaggtttcgaggtgaaatcctccgacactgtagcctccggacgtcctccagatccagcgtggccgtcagacttccacgtcatccagagaaaactgggatccttacccgagcgc

SEQ ID NO: 14899 - DNA, 296 bp, Homo Sapiens
atatatcagggacggccaggagcggaggagcagacagctggtggccatcaccagcgtccagcaggcggcgttcggcgaccacaacatccagtaccagttccgcacagagacaaatggaggacaggctgtgatccaaaatcccttcagcaatggtggcagtccggcggccgaggctgtcagcggggaggcacgatttgcctatttcccagcgtccagtgtgggagatactacggctgtgtccgtacagaccacagaccagagcttgcaggctggaggccagttctacgtcatgatga

SEQ ID NO: 14900 - DNA, 734 bp, Homo Sapiens
  misc_feature (110)..(110): n is a, c, g, or t
tcaagagtcggtgaccaccaaatccagcctggaagcgtgtttgtgtcatcaagccgacctgcccgtactgcagtatggccaaagagatcctcagtcaattgcccatcaancgagggcttctggaatttgtagatatcacagccatcacccacacttacgagattcaagattatgtgcaacagctcacgggagcaagaacggtgcctcgagtctttatcggtaaagattgtataggcggatgcagtgatctagtctctttgcaacagagtggggaactgctgacgcggctaaagcagattggagctctgcagtaaccacagatctcataggaaatgttcaacaattctgtgaaaggtcacaggacccaattggagaaatcatatgaaaagcatagttggtcttggtgtcatatggatcagaggcacaagtgcagaggctgtggtcatgcggaacactctgttatttaagatggctatccagataatcctgaacactgtgtatttattttatttagactaccagcaaagattaaagcatgaaatgtaaaacatctgataaaacttacagccccctacaccaagagtgtatctgtgaaagagctcctacactttgaaaacttaagaatcccttatcatgaagtttgcctgttctagaattgtaagattgttaatttccttcaatctctagtgacaacacttaatttcttttctaataaaaaaaaccaatagatgaaa

SEQ ID NO: 14901 - DNA, 1410 bp, Homo Sapiens
  misc_feature (101)..(101): n is a, c, g, or t
  misc_feature (189)..(189): n is a, c, g, or t
aaagatttgcctgagccagaatcgcacgagagactacgatagtgcaaaaataatctctttgcacccagactcattgtcagtatgagtttgtacatatagancggatatatgataccgagacagtgattgatggagtatgatagccataaaggtcgttccagccaggtgcaatgggtcaacctgcaatcncacacaccagggtgggagtattgcttgaaaccatgagttcaagaccagcctaggcaagaaagcttttatcttgagaacatggtgtctggagttaaaggtattggcatactccacacatctgtaccattcttgagtgatcgcttaggaatgaatgtgatttgaactcattcatgttgagagggtgtcaaattgagaaccaggtagatccccaccacctacagtaaaaaggaccctaaagtaaattggttgaagaaattagatcccaaagattcttggtgaattttgaagtcttcatcagtatatccatattaaaacgagatgacagaagccaaagtaattatgggctgacaggacaactggatcagtttcattaaaaagggcaaacttgaagataaatcttttgactccagctctttagaggatctaaagtgaccttgatggacagtggaagaaatcacaacatggaattcctcgaataacaatttattgactttaaataattttgtctaatgctacatatacacaattaaaaaacctttacactatttctagaaagtcagcatgtatttttggctcgaagtttctctagtgttttctgtggaaggaataaaaatttgagtttcagttgtgtaaccacaaacaacccaaataataaaaaaatcttgtcggccgcctcgggccctccagaagctttcctaaacccattccgtttgcgcgcgccggcgccccataacgctaacctgaaacactggtccataagctggttttccataggaagaatccctgggcccatgaacctaagtggctttgggaattctctccccccaaataaacaaaaactgccccccgggtcgggacaaaaccccgaaagcccggtttaccttggaaacaaaaaattccccacaaagtgggcaccgtttccttggagaggggcccattttaacctgggagaattctttactccaaacgagggaagcgtccccacaggcggggagccttcccgaattatccctaaatttttacacgcaccccccgggtccctgtgataaaattcttattcgcaacaagaaacatggggctgcggaaaattttcccttctaaggccattttcctgggcccgaacacgtggggaaaagcccctttctccataaaacggggcaattgtaatagaaaaccctggaaattggcaccagggggggttatctcacgaccacctttggt

SEQ ID NO: 14902 - DNA, 1565 bp, Homo Sapiens
  misc_feature (1217)..(1363): n is a, c, g, or t
  misc_feature (1381)..(1397): n is a, c, g, or t
  misc_feature (1412)..(1484): n is a, c, g, or t
ggcacaggaaaaacagccaccttcagtatctcagtcctccagtgtttggatattcaggttcgtgaaactcaagctttgatcttggctcccacaagagagttggctgtgcagatccagaaggggctgcttgctctcggtgactacatgaatgtccagtgccatgcctgcattggaggcaccaatgttggcgaggacatcaggaagctggattacggacagcatgttgtcgcgggcactccagggcgtgtttttgatatgattcgtcgcagaagcctaaggacacgtgctatcaaaatgttggttttggatgaagctgatgaaatgttgaataaaggtttcaaagagcagatttacgatgtatacaggtacctgcctccagccacacaggtggttctcatcagtgccacgctgccacacgagattctggagatgaccaacaagttcatgaccgacccaatccgcatcttggtgaaacgtgatgaattgactctggaaggcatcaagcaatttttcgtggcagtggagagggaagagtggaaatttgacactctgtgtgacctctacgacacactgaccatcactcaggcggtcatcttctgcaacaccaaaagaaaggtggactggctgacggagaaaatgagggaagccaacttcactgtatcctcaatgcatggagacatgccccagaaagagcgggagtccatcatgaaggagttccggtcgggcgccagccgagtgcttatttctacagatgtctgggccagggggttggatgtccctcaggtgtccctcatcattaactatgatctccctaataacagagaattgtacatacacagaattgggagatcaggtcgatacggccggaagggtgtggccattaactttgtaaagaatgacgacatccgcatcctcagagatatcgagcagtactattccactcagattgatgagatgccgatgaacgttgctgatcttatctgaagcagcagatcagtgggatgagggagactgttcacctgctgtgtactcctgtttggaagtatttagatccagattctacttaatggggtttatatggactttcttctcataaatggcctgccgtctcccttcctttgaagaggatatggggattctgctctcttttcttatttacatgtaaataatacattgttctaagtctttttcattaaaaatttaaaacttttcccatnnnnnnnnnnnnnnnnnnnnnnnnnnnnnnnnnnnnnnnnnnnnnnnnnnnnnnnnnnnnnnnnnnnnnnnnnnnnnnnnnnnnnnnnnnnnnnnnnnnnnnnnnnnnnnnnnnnnnnnnnnnnnnnnnnnnnnnnnnnnnnnnnnngaaaagaaggcaggagcnnnnnnnnnnnnnnnnnggggccgttgccggnnnnnnnnnnnnnnnnnnnnnnnnnnnnnnnnnnnnnnnnnnnnnnnnnnnnnnnnnnnnnnnnnnnnnnnnnagaaacgggggggaatctttttacacacaaagaaagagcgcgggcccaaaagagaaaatggcgggtgggaaattacgccgc

SEQ ID NO: 14903 - DNA, 707 bp, Homo Sapiens
acagatctggcccagcagaagaaagagtgacaactttcttagaaagtcagaagaagcagtataagatttgtaaggaaaaaataaaagaggaaatgaatgaggaccatagcacacccaagaaagagaagcaagagcggatctccaaacataaagagaacttgcagcacacacaggctgaagaggaagcccaccttctcactcaacagagactgtactacgacaaaaattgtcgtttcttcaagcggaaaataatgatcaagcggcacgaggtggagcagcagaacattcgggaggaactaaataaaaagaggacccagaaggagatggagcatgccatgctaatccggcacgacgagtccacccgagagctagagtacaggcagctgcacacgttacagaagctacgcatggatctgatccgtttacagcaccagacggaactggaaaaccagctggagtacaataagaggcgagaaagagaactgcacagaaagcatgtcatggaacttcggcaacagccaaaaaacttaaaggccatggaaatgcaaattaaaaaacagtttcaggacaccttgcaaagtacagaccaaacagtataaagcactcaagaatcaccagttggaatgttactccaaagaatgacacaaacatcttaagacctgaaagatgacgacagaaacttccttggcagagaagtataagcgtga

SEQ ID NO: 14904 - DNA, 583 bp, Homo Sapiens
cgatgacatcagtgaccaggaggaccaccgttctgaagaaaagagcaaggagcccctgcaggacaacgtgatcgccacctacgaggagcacgaggacagcgtctatgccgtggactggtcctcggctgacccgtggctgtttgcctccctgagctatgacgggaggctcgtgatcaacagggtgcccagggccctgaagtaccacatcctgctatgactcccgggcctgggttatccaggtcccattgagtggttttcctcttggcagattctcaaacagtcgcagctctttggaggtgactcgtgttccaggtggatccctctctgggagagccgctgttcccttcctgtagcagcagcatttatgaatggggtgaatggggctattgtcgacggcacagctaatgcccgaacccagcccctgtcggcagagacagagccccacattattatgtgaataacaatgttttctgttttaagggtgtcaggagtttcgctttttaaaaaaatgtctgttcctgcagtagtaactcttctttctcttgagagtaaaaaatgaaataaaataaatccacgctgtttt

SEQ ID NO: 14905 - DNA, 472 bp, Homo Sapiens
ggtaccagttcgacggagactctcgcctgggacccaagcgagagtcgaaattagcagagcgctaaaaggaggggcccgaaggcagtggggctttgagctagaagcctctttttacctgcttgacaggtaatttctgtaattggttgtgattgaatttgatagggtagagaattaaatgagggaagctgtgtatacttcctagtaagagctattatatgaccgattacattaacatcatatggaaaaaaattgtcaaaagtactccgggaaagcccttaaatagttggtaaagtacagaacacatgattgtcaatatatgtaaatacaggatgagctaggacagaggggcccttctttcacaccacttaaattagttcccactttaaccttgctttgagattgacttctggagagttacatgcagatagactcaactttcctaagtcaggtgagactgagagtctcctgaact

SEQ ID NO: 14906 - DNA, 674 bp, Homo Sapiens
ggctggcaggatgggcagggtgtgcccctgactggcaacgtgaccacgtcgcagatggccaacgagcagggcttgtttgatgtgcacagcgtcctgcgggtggtgctgggtgcgaatggcacctacagctgcctggtgcgcaaacccgtgctgcagcaggatgcgcacggctctgtcaccatcacagggcagcctatgacattccccccagaggccctgtgggtgaccgtggggctgtctgtctgtctcattgcactgctggtggccctgcctttcgtgtgctggagaaagatcaaaacagagctgtgaggaggagaatgcaggagctgaggaccaggatggggagggaagaaggctccaagacagccctgcagcctctgaaacactctgacagcaaagaagatgatggacaagaaatagcctgaccatgaggaccagggagctgctacccctccctacagctcctaccctctggctgcaatggggctgcactgtgagccctgcccccaacagatgcatcctgctctgacaggtgggctccttctccaaaggatgcgatacacagaccactgtgcagccttatttctccaatggacatgattcccaagtcatcctgctgcctttttttcttatagacacaatggacagaccacccacaaccttgagttctgcta

SEQ ID NO: 14907 - DNA, 1245 bp, Homo Sapiens
gggagtcacggtgaggcgactggacccacactctcttaacctgccctccctgcactcgctcccggcggctcttcgcgtcacccccgccgctaaggctccaggtgccgctaccgcagcccctccatcctctacagctcagcatcagaacactctctttttagactccgatatggggtcctccaagaaagttactctctcagtgctcagccgggagcagtcggaaggggttggagcgagggtccggagaagcattggcagacccgagttaaaaaatctggatccgattttactgtttgatgaatttaaaggaggtagaccaggaggatttcctgatcatccacatcgaggttttgaaacagtatcctacctcctggaagggggcagcatggcccatgaagacttctgtggacacactggtaaaatgaacccaggagatttgcagtggatgactgcgggccggggcattctgcacgctgagatgccttgctcagaggagccagcccatggcctacaactgtgggttaatttgaggagctcagagaagatggtggagcctcagtaccaggaactgaaaagtgaagaaatccctaaacccagtaaggatggtgtgacagttgctgtcatttctggagaaaccctgggaataaagtccaaggtttacactcgcacaccaaccttatatttggacttcaaattggacccaggagccaaacattcccaacctatccctaaagggtggacaagcttcatttacacgaatatctggagatgtgtatattgggcccgatgatgcacaacaaaaaatagaacctcatcacacagcagtgcttggagaaggtgacagtgtccaggtggagaacaaggatcccaagagaagccactttgtcttaattgctggggagccattaagagaaccagttatccaacatggtccatttgtgatgaacaccaatgaagagatttctcaagctattcttgatttcagaaacgcaaaaaatgggtttgaaagggccaaaacctggaaatcaaagattgggaactagtggaaagcggaagagcaggtcttgatgtgtcctagaattttgccatttctgagattgagccattgaaggcattccatttctaaagcttatttagccggtgcttctaaagaattccacactaacgtgataacatggtttttgtaacaataaatgtaggatatttcctggcacatgcaaataaacctaatcattgtttctttaa

SEQ ID NO: 14908 - DNA, 423 bp, Homo Sapiens
tgtagcgctcgggtaaaatataaaagggaaatcagttgtccacattgcaaggtttcacatgcagtggtgaaggctagatttctaatggggctggcactggtattttggctgacttggagggaagggggggtaatgttcatgaaagcaagtattactcagaaagttgttgccaggagaggtggccatagactgcatgagactagttacagaagccagccaggtgtggtggcacttgagcacgggagtttgaatctagcataggtgacatagcaaacctcagggctgtcagagcagattgatgggagcgctttgtcctgcttttccacacaccagaacaattccttgctgaatgtatttgcagatcaacctaataaaagtgatgcaaccaattatgctagccgctctcctcctgtaacggccata

SEQ ID NO: 14909 - DNA, 464 bp, Homo Sapiens
gcaggcagctggatggagggggcgcgcggctcaggtccatgaagcccccaggaggagaatcgagcaatctttttagaagtccagaagaagctactccttccagcaggcctaataggatggcatctaatatttttggaccaacagaagaacctcagaacatacccaagaggacaaatcccccagggggtaaaggaagtggtatctttgacgaatcaacccccgtgcagactcgacagcacctgaacccacctggagggaagaccagcgacatttttgggtctccggtcactgccacttcacgcttggcacacccaaacaaacccaaggatcatgttttcttatgtgaaggagaagaaccaaaatcggatcttaaagctgcaaggagcatcccggctggagcagagccaggtgagaaaggcagcgccagaaaagcacgccccgccaaggagcagagcccatgccca

SEQ ID NO: 14910 - DNA, 1411 bp, Homo Sapiens
  misc_feature (92)..(92): n is a, c, g, or t
  misc_feature (222)..(237): n is a, c, g, or t
ggggcccccgcgggcggccccaaaagggaaaatggttctttggaaaagctttctttggaagggcccgggagggcgggcccgcccagaggtantttcttccttgttgttcgtggcgctttttttgcaaaaacggtagactttttaattaagtgcttttattccccaggttaaagccatgcagttacaaaagtagttagaaatttctgaagggggttagagttnnnnnnnnnnnnnnnngctgactcttacacatatattatctagcacttcatggggacactactgttcaaaaggccctggccaaataactcccaaatgaaacactcaacccaaggatgttttcagcccacctgttagtgaagctgggtgcagaatgcaaagcctctaaaaggagaggatacaaagtcaggtgagtaggggccattggcaatgctcagagccagccagactccaaacagggagcccaagtggtttttttctgggacactctacttgaattattgtttaattagtcaaccatagatcttcaaaagagaacaattagttaacatgataaaaagtgactgcattctttggactgtatcataattatagtaagcaaattctgacagttttaatgaaaatagcctccaccattttgcaggtatgaagataacttaattatccacagggcttttaatgtctgctggacaatacatgaatgataagctataaatgacattgttttatgatataaaaatactagtttttttcatttattatttctataggcattcactgtttgagtcaaggttaggcttgttaagtgattaaaggcaattttattacagcagcatgtacttattctattctaaaagaataatattcataaacagaaacaggttttatatttgtttgcaacctgcaaaattgaattattttgctgatataaaatactaagaactcacttgaggaccatgccaccttctgaaaaggccacacacctacttcttaaatgtgttaaagttacagtgtgtcccagactcatccagaaaaaataagcaagcaactgactgctcttgactgttcctccccagcactagcactgattgtgttgggaaaagccacagagcaaggctgcacagccagataaaggaggctttttatttaaaggcaaaataccaaaatggctctctggtgtaggtgatttctactttcacactcagcttgtacatgatccgctaaccttaatttctttctccttaacgggctgacttggattgtacttgtgagaaatgtatccattattaatgagtcacgagagacagggatttctgtggctacatgtataactgtgatatgtctgcagaagttacatgtgaaagaggatagtgagaagttagccatgatccatctatgtgaaggcacacca

SEQ ID NO: 14911 - DNA, 1009 bp, Homo Sapiens
  misc_feature (266)..(266): n is a, c, g, or t
catgctaatgtcacaagtattggcagactcatggaattcgttactctaaaggagctcgggaaggcaatcgagggttctgtcacagcacagggtgtgaaagtcgggccgcccctcgccagcttccgagacagtgccaccagcagcagtgacacggagaccactgaggtgcatgcactctgggggccccactcccgtcatggcctcccccgggagggcagcccttccgacagcgacgacaaatgccaatgagcccctcgtgggtgccntaagatggtgctagccatgcccgtcagcccagaatgtgcatctttcattccttctgccttcggaaggcaggaggcagctacagctggaggctgcaccccagccccctccagacctggggtgccagcttctcccagttcatcctacctggaatctgacccactacccacctgcaacaagtcttccagaggcaggaagataggccctgccctggcaggatgggttggggtcacttgacccctgctccccctttgaggggaaaggggtggaactaagatgggtttataactggaacctccaatgaccagatgtatatagagatttacaaagatttttatattaatttaataaaacaaattcttaaatagaacaaaataaacacctaatgagccacttatatatagaatgcttgtgcccgttggctctcgttcttaccttgggccctcttacctgccaaagcctacaaggcccttaattctaaagccacccacccttcccacaaccataaaaacgtacagtccagtgaccttggaatgcaggatctgccagaggcctccactacgtgggcattaacaccctggctggggcggggccctgtactgtagccttggcctttcattcagacagaaaggctctaccttctttcctccccaagaagagacactccctcatgactgtcactcactggcacaattcctgcctctcagcaggcatcagctgacaactcccggccacccctgtggcc

SEQ ID NO: 14912 - DNA, 761 bp, Homo Sapiens
ggggtgaggaaatccccaggcccttagtccatgggcccagggatttttcctagggaaatcagtctatggacccatgttccctttacccttattggggcccggggcgcccaaagggaaaggttttagaaaagtttcttgaggggccgaggcgggcccgacagggggggtgttttgttccttgtggttaatattattccctgccaatagcattttccatctaacacatttaaattctcacagcataattgcaaacatgtacatattggttcccacgagaaatctgcaggtgacatttcgggatgtttggagtcaatcagataaagcacattatgacagaaaccataagaggggagctgggacctgggactgtgcagaatgaaaagccacggctacgggaagcataagcttgtgctgcaacggcatgtgcacatgacctgctgctcctggccctctacgaagcatgcccagcaagggaacctcctccgtccctcctccacgtgcttccttactaaggctgagagctcaactgaagaccttccccaataaatgacagatggctcttcagtcaggaatgcagttagtggtttcatgacagacacactggtcccacctggcttccctgctgaaccacccagtactgaataacacctgtaccaatgtgggatgacatcagctaggaagcaaagtaatttgcctggttgatgattattttttatacctaatgattcacccaatagtaaaggaaccccacagctaagatc

SEQ ID NO: 14913 - DNA, 677 bp, Homo Sapiens
atggctcgatgattgcctggcgcgactctgtttactagacttatcccgtgtgtcttccattctgctttgcccaggacctctgtaagatgagctgttgcctctattgccttctaatctattatctctattatctggccgaggcaggcctttatcttggttgttttctgaatggggtagaccaatacccacaggtttaaaatcattatctgctgttaatgatgatgttgctactgctgttcctccctccatcccccctgtttttgaaggaaaagtagattgagcaggtacaggcttattcgcaaggggtacaggctgagtaacagcttgggctttgtcgatttgagtctccatactttgaacattctggtcccaattagagggctctacgggcccttccgagacttcacttttaggtggctcttgttgagagtcgcttagattctcatttgactgagccgccttgacatcctttacatctgcagcaatggaaaatgcagctgattgcattttaaaattcttctgctggttactactggtgtctgctaatggttctttgtttcctgaaagaggttctgcttgtgacttaggttgctgctgatgctgctgtccaaaagctggtttggggcctttccactgtggtccactctgtcgaggccaagttggggggatctctagag

SEQ ID NO: 14914 - DNA, 566 bp, Homo Sapiens
ttcccagcccagtccagcaatcacttgtctagctttctggaaccttgagtactttcttgaaccatgagtcctgtgaccaccctagcagctctaaccctcccttatctgaaaggaagtgtgaggtgacttgcaggtcccagagttgattgaagaccccatccagaaagaaggcaccctgtgggagagattgcaaggcctaggtctgaatccggaagcttccaccccatggagaagggctggcagtggagctgagctttggagccaaggactgtactgcagtgcagggagagtgaggccagaaaggctgagacaactcagggaaagaaaacctcccttctggctaatagtcaagcaccgcctgagtagaccaacactctcctgtccacaggggcagcagatgaagacacaaccagagaggactaacaggccccctcagctctcagtcagagggcagagcaacacagaatagacattaaaggaacagactttgaggccaggcagccttgggtgtgcatctgtccctactaagccatgtgacattaaacaagtgagtccacctcaaaaaa

SEQ ID NO: 14915 - DNA, 1832 bp, Homo Sapiens
  misc_feature (1702)..(1702): n is a, c, g, or t
  misc_feature (1752)..(1791): n is a, c, g, or t
cccagctgtacctcgcgtgtcccgggtcgggagtcggagacgcaggtgcaggagagtgcggggcaagtagcgcattttctctttgcattctcgagatcgcttagccgcgctttaaaaaggtttgcatcagctgtgagtccatctgacaagcgaggaaactaaggctgagaagtgggaggcgttgccatctgcaggcccaggcaacctgctacgggaagaccggggaccaagacctctgggttggctttcctagacccgctcgggtcttcgggtgtcgcgaggaagggccctgctcctttcgttccctgcacccctggccgctgcaggtggctccctggaggaggagctcccacgcggaggaggagccagggcagctgggagcggggacaccatcctcctggataagaggcagaggccgggaggaaccccgtcagccgggcgggcaggaagctctgggagtagcctcatggaagagaagcagatcctgtgcgtggggctagtggtgctggacgtcatcagcctggtggacaagtaccctaaggaggactcggagataaggtgtttgtcccagagatggcagcgcggaggcaacgcgtccaactcctgcaccattctctccctgctcggagccccctgtgccttcatgggctcaatggctcctggccatgttgctgattttgtcctggatgacctccgccgctattctgtggacctacgctacacagtctttcagaccacaggctccgtccccatcgccacggtcatcatcaacgaggccagtggtagccggaccatcctatactatgaacagcttcctggttggccgacttcaggcggcggggcgtggacgtgtctcaggtggcctggcagaacaagggggacacccccagctcctgctgcatcatcaacaactccaatggcaaccgtaccattgtgctccatgacacgagcctgccagatgtgtctgctacagactttgagaaggttgatctgacccagttcaagtggatccacattgagggccggaacgcatcggagcaggtgaagatgctgcagcggatagacgcacacaacaccaggcagcctccagagcagaagatccgggtgtccgtggaggtggagaagccacgagaggagctcttccagctgtttggctacggagacgtggtgtttgtcagcaaagagatggccaaagcacttggggttccagtcagcagaggaagccttgaaggggcttgtatggtcgtgtgaggaaagggggctgtgcttgtctgtgcctgggctgaggagggcgccgacgccctgggccctgatggcaaattgctccactcggatgctttcccgccaccccgcgtggtggatacactgggagctggagacaccttcaatgcctccgtcatcttcagcctctcccaggggaggagcgtgcaggaagcactgagattcgggtgccaggtggccggcaagaagtgtggcctgcagggctttgatggcatcgtgtgagagcaggtgccggctcctcacacaccatggagactaccattgcggcttgcatcgccttctcccctccatccagcctggcgtccaggttgccctgttcaggggacaaatgcaaggctgtggggaggactcttgcctgttgtcctgtgttccccacaggaagagggctctgggggggcatggctggggcgattgcaagagncctcagaggcagatttaatcttcctcagaagccaaatatcaagaacatcnnnnnnnnnnnnnnnnnnnnnnnnnnnnnnnnnnnnnnnngggggcggctaaaaaataccccgagacccaaataaagtaca

SEQ ID NO: 14916 - DNA, 868 bp, Homo Sapiens
taaatgttttgggggtgttctgttttctccaacttggtctttcacagtggttcgtttaccaaataggattaaacacacacaaaatgctcaaggaagggacaagacaaaaccaaaactagttcaaatgatgaagaccaaagaccaagttatcatctcaccacaccacaggttctcactagatgactgtaagtagacacgagcttaatcaacagaagtatcaagccatgtgctttagcataaaagaatatttagaaaaacatcccaagaaaatcacatcactacctagagtcaactctggccaggaactctaaggtacacactttcatttagtaattaaattttagtcagattttgcccaacctaatgctctcagggaaagcctctggcaagtagctttctccttcagaggtctaatttagtagaaaggtcatccaaagaacatctgcactcctgaacacaccctgaagaaatcctgggaattgaccttgtaatcgatttgtctgtcaaggtcctaaagtactggagtgaaataaattcagccaacatgtgactaattggaagaagagcaaagggtggtgacgtgttgatgaggcagatggagatcagaggttactagggtttaggaaacgtgaaaggctgtggcatcagggtaggggagcattctgcctaacagaaattagaattgtgtgttaatgtcttcactctatacttaatctcacattcattaatatatggaattcctctactgcccagcccctcctgatttctttggcccctggactatggtgctgtatataatgctttgcagtatctgttgcttgtcttgattaacttttttggataaaaccttttttgaacagaaaaaaaa

SEQ ID NO: 14917 - DNA, 910 bp, Homo Sapiens
  misc_feature (61)..(86): n is a, c, g, or t
  misc_feature (846)..(856): n is a, c, g, or t
ccaatatgtatttcaatacatgtttgtttccacttttcccagtgccacacacacacccccnnnnnnnnnnnnnnnnnnnnnnnnnnagtcacaagttggattacattagaattggtgccacagttgactttaaaagcattttaataaccacccaactcttagattttgcagtttagtgaacttcaagttcagaaccaaaaagcagagaatcgtttcatgtgacatgatgtttctatagacctcgtgctctctaggtgacaatgcagagccaggccaaaggtgtttaagctttgtcaccttccacagctttgtggccacattcatatttagataagctcggactctgctcccctcttctggagatggggagaggcaagtgtgtatgtgttgtcatacttactgcattaattcttcactcgaaccgtttacatcagcgaataaacccattgttcaatgcaaagtgcaaacagtgaaacatgaacttaaataaactggactagacccatcacatccaacaggatctatttagatttacagcatttaataaagtataagtcagaattcacaatatcttaaactgtgctgtttcctaagatcaagtaacagccaagtcagtgtaattttatgaaacctgtaatggccacatttgttgtgtctccgatgtatttctataattgcattaacaggaaaaaacttaatccatataccagtgactttgagtcttaaatgttgcaagcaaaggataaaaattcaagggaattttgtcagatatggttactttcaccttttccgttgttacttgattgtctcccaagccctatatgtatccgacatataatgttcccnnnnnnnnnnncacatagaaacctctactataaaaccatgaactaaaagaagtataaagcgtgga

SEQ ID NO: 14918 - DNA, 272 bp, Homo Sapiens
agatagtaggtattgtaagtttgagtggtgttggccatcgaaatgagtgggtgtgtaaaggatatagtaagtgtagggggcatgaaaaagactagagtgttgttgctggccggtagactgtggggagccaagggattccacagggtcactgttgagtttgggggcataaccatgaaaataagcatatgcctaatagtaataattagtagtgataagtaaggctgataagggagaggggatccgtgcacgttaacgattactaggactatgca

SEQ ID NO: 14919 - DNA, 1470 bp, Homo Sapiens
ggagaaccgcgacctccgcaaccttgagcggcatccgtggagtgcgcctgcgcagctacgaccgcagcaggaaagcgccgccggccaggcccagctgtggccggacagggactggaagagaggacgcggtcgagtaggttttaaaacatgaatcctacactcatccttgctgccttttgcctgggaattgcctcagctactctaacatttgatcacagtttagaggcacagtggaccaagtggaaggcgatgcacaacagattatacggcatgaatgaagaaggatggaggagagcagtgtgggagaagaacatgaagatgattgaactgcacaatcaggaatacagggaagggaaacacagcttcacaatggccatgaacgcctttggagacatgaccagtgaagaattcaggcaggtgatgaatggctttcaaaaccgtaagcccaggaaggggaaagtgttccaggaacctctgttttatgaggcccccagatctgtggattggagagagaaaggctacgtgactcctgtgaagaatcagggtcagtgtggttcttgttgggcttttagtgctactggtgctcttgaaggacagatgttccggaaaactgggaggcttatctcactgagtgagcagaatctggtagactgctctgggcctcaaggcaatgaaggctgcaatggtggcctaatggattatgctttccagtatgttcaggataatggaggcctggactctgaggaatcctatccatatgaggcaacagaagaatcctgtaagtacaatccccagtattctgttgctaatgacaccggctttgggggacatccccaagcaagaaaaggccctgatgaaggcagttgcaaactgtggggcccattcctgttgctattgatgcaggtcatgagtccttcctgttctataaagaaggcatttattttgagccagactgtagcagtgaagacatggatcatggtgtgctggtggttggctacggatttgaaagcacagaatcagataacaataaatattggctggtgaagaacagctggggtgaagaatggggcatgggtggctacgtaaagatggccaaagaccggagaaaccattgtggaattgcctcagcagccagctaccccactgtgtgagctggtggacggtgatgaggaaggacttgactggggatggcgcatgcatgggaggaattcatcttcagtctaccagcccccgctgtgtcggatacacactcgaatcattgaagatccgagtgtgatttgaattctgtgatattttcacactggtaaatgttacctctattttaattactgctataaataggtttatattattgattcacttactgactttgcattttcgtttttaaaaggatgtataaatttttacctgtttaaataaaatttaatttcagactaggggctgtattactatgaagaagaaacttgtgca

SEQ ID NO: 14920 - DNA, 1133 bp, Homo Sapiens
  misc_feature (102)..(158): n is a, c, g, or t
  misc_feature (370)..(416): n is a, c, g, or t
  misc_feature (657)..(657): n is a, c, g, or t
gggggcttcacggggttcggtaaaaaagctcgcacatttgacttggaagcaatgtttgaacaaactcgaaggacagctgtggaaagaagtcgcaaaacactnnnnnnnnnnnnnnnnnnnnnnnnnnnnnnnnnnnnnnnnnnnnnnnnnnnnnnnnntgaagatattgagccaacatcctcaagatcaaatgtggtcagagattgctccaaatcatcttccagggatacgagcagcagtgaaagtgaacagagttctgactcttctgatgatgagttaattggccctcctttaccccctaaaatggtaggaaaaccagttaattttatggaggaagatatcctcggtcctttacctccacctcttaatnnnnnnnnnnnnnnnnnnnnnnnnnnnnnnnnnnnnnnnnnnnnnnnggaaaatcctgttcacaagattcctgactcgcatgagataacgctgaagcatggcactaaaacagtgtctgctttgggtctggatccctcaggtgcccgtttggtgacaggaggatatgactatgatgttaagttttgggattttgctggaatggatgcttcttttaaggcatttcgatcccttcagccctgtgagtgccatcagatcaagtcattacagtatagtaacacaggagacatngattcttggttgtatctggaagctctcaggccaaggtgattgacagagatggttttgaagtaatggaatgtataaaaggagaccagtatattgtggacatggccaacaccaagggtcatacagcaatgcttcatactggctcatggcatcccaaaataaagggagaatttatgacttgctcaaatgatgcgactgtgaggacgtgggaagttgaaaatccaaagaagcaaaaaagtgtgtttaaaccacggacgatgcaaggcaaaaaagtcattcctactacgtgcacatatagtagagatggaaacctcatagcagctgcctgccagaatggaagcatacagatctgggaccgaaatttgactgttcatcctaagttccactataaacagggctcatggactcggggcacagaccactttcttggcgggaacttttttccctattgagggggaattgtccccttggccctcctc

SEQ ID NO: 14921 - DNA, 720 bp, Homo Sapiens
cccatttaatcgctgactgtcctggttgttgccatgtactgccccagagccacctttgaagaagttgtagccgtaagtgttctcgttgttgttagggttctcttcgttgtcatcagtgtacttgttattgtcttcaggattctcgttgttgtcatctgcactctcattgttgtcagtggtttcgtggtcatcagcactctcgttgttatcagtggtctcgttgttggggacctcattgtggtcaggattctcgctgtcgcagatgttctcattgatgtcagttatctcattgtcagtggtctcgaagtagtcggtggtctccatgaagtcagagatcttgatgtcatgaattgtctcatcaatgtctgagatctcgctgaaaatgtcttccactgcataatagtcaggagcgtcttccatgatcaccacctcacatctgcccctggttttactgtaaggaaggcatgtggctgagtatagcagtggtgggaggtggtgtactcatagcactcaaagggtgggaagtaactgcggaagcagtaggctataagggatcccaggaatggggctagggtgggtaaagtcccacttctgcccctgactgtgtaacctcaagccatttctgggcatgatttcccacttgtaaaacatattccactgggattatctcaaaggtccctttttggctccataaatcctgtgttacactagtctttaccc

SEQ ID NO: 14922 - DNA, 788 bp, Homo Sapiens
gggcacgtggatttggtagagaaaccccggactgggatcatggcagccgagactcggaacgtggccggagcagaggccccaccgccccagaagcgctactaccggcaacgtgctcactccaaccccatggcggaccacacgctgcgctaccctgtgaagccagaggagatggactggtctgagctatacccagagttcttcgctccactcactcaaaatcagagccacgatgacccaaaggataagaaagaaaagagagctcaggcccaagtggagtttgcagacataggctgtggctatggtggcctgttagctgacaaagatgttcttcctcttccccgacccacatttcaagcggacaaagcacaagtggcgaatcatcagtcccaccctgctagcagaatatgcctacgtgctaagagttggggggctggtgtataccataaccgatgtgctggagctacacgactggatgtgcactcatttcgaagagcacccactgtttgagcgtgtgcctctggaggacctgaatgaagaccccgttgtggggacatctaggcacctcaactgaggaagggaagaaagttctacgtaaatgggagggaaagaattttcccacccatctttccgaaagaattaccaagattcccggtcccttccagggcaggtggaacttcccccaaacccagccccctgccctggggtccccttgaacttggcctttaaattcctaaccctttaaaccctggggaaccctcccggttacttcccccaggggggaaacctaa

SEQ ID NO: 14923 - DNA, 662 bp, Homo Sapiens
aacgagtggtcctcagctgagggcagcctgtcgaggatgaaggcccaggtggaggaggagggcaagcggcgggctggcgtgcaggcagacctggaagtggcagcccagaaggtcgtgcagctggaaagcaagaggaagaccatgcagcctcatctgctgaccaaggaggtcacccaggtggagagggaccccggcctggacagccaggcggcccagctcaggatccagatccagcagctccgcggggaggatgccgtcatctcggcccggctggaagggctgaagaaggagctactggcccttgagaagagggaggtggacgtgaaggagaaggtcgtggtgaaagaggtagtcaaggtggagaagaatctggaaatggtcaaggcagcccaggctctgaggctgcagatggaggaggatgctgcgcggaggaagcaggcggaggaggctgtggccaagctacaggctcgcatcgaagacctggagcgggctatcagctcggtggagcccaaggtcatcgtgaaggaggtgaagaaggtggagcaggacccagggctcctccaggagtcctccaggctgaggagcctcctcgaggagctgaggaccatcgttgcaacgatggtcctcagctgatccaagtggaaccctttgttaactatact

SEQ ID NO: 14924 - DNA, 792 bp, Homo Sapiens
gggggaaacacgagtccaagctgcagctggcagggattgcggggtgccggccgtctgagttttttaaaactgctcgccgcgaagtctgtctgcagccaaaatgtccaacagaaacaacaacaagcttcccagcaacctgccgcagttacagaatctaatcaagcgagacccgccggcctacatcgaggagtttctacagcagtataatcactacaaatccaatgtggagattttcaaattgcaaccaaataaacccagcaaagaactagcagagctggtgatgtttatggcacagattagtcactgctacccagagtacctaagtaattttcctcaagaggtgaaagatcttctctcctgcaatcataccgtattggatccagatctgcgaatgacattttgcaaagctttgatcttgctgagaaataagaatctcatcaatccatcaagcctgctagaactcttctttgaactttttcgttgccatgataaacttctgcgaaagactttatacacacatattgtgactgatatcaagaatataaatgcaaaacacaagaacaataaagtgaatgtagtattgcaaaatttcatgtacaccatggttaaaagatagcaatgcaaccgccacccaagatggtcttttaaatgtaaatgaattgaaactctaacagaaaggaaacatcctgggaaatgaatgccaaaaaactggtccaatggttaatccaccgaactggcattggttttcctcctaaagggtcccaccccaagaaatatttaaatttgggccct

SEQ ID NO: 14925 - DNA, 754 bp, Homo Sapiens
ggttttttagtaaactttattgtaccgaacaaaaaaaatgattttgcaatgattttctctcccacaaaagcgtgggtgaaaaccagtaacttataaaaatactttaggactctaataatacatacattcacaccttatcttctgagtatttaaatgggggaggttcacctgaaaaaaacccatagcttttttgcctcaactgacctgtaaaaaagtccacctatatcaactttctgccaatctggagaagatctgttttctttgatctgacgtcatgtgttcacaagcttctaaaatgtttgccaaaattaaagtctgctggatggtttttgccttaacccatattcttccattcattccaaatactatctccagtggatagagttttcccacttcctgtatgatttcacaatctggagctaatagctttctaattaagcccagagtcactttaaaaagcagaccatcctgtccaatgacacccattccattggctcgtccacagcggtcaatacagaccatctctggttccatgtctttattagcaaccacaaactggccatagatgagatctccaacctgcacatttggtctgtttctcttagttgcaccttcaaaggacaagtaagacaaacaagctggctcactccctccaacatcaactttgaatatatctccagatttagctgtcactatgccaatcacatggtctccttttactggaacataccgcttctgatgagagtccacccag

SEQ ID NO: 14926 - DNA, 835 bp, Homo Sapiens
ttccctaagacccatcataattagccatggatcaatcggaagggcatcaattaacaaccctttcctttttacactctgaatggggatcccacaacccactgcccacagctctctccgacaaggcttcaaagctctgctgagtgttgatatccacaccagaaagccaacaaccaaagccagggtgactgtgataccaaccaacaaccatctccggccttcctgtctgcttcaacatatccaacattttagcttggaacactggatcaactgcctccacactgacacctgttcctgactgtggcatagcaaacacatcaatcactctgacggtataatcatcaacaaattctccaagcatcaaacccataacttccattggaactccagcacggccatgttttaacatttttaacagtgccagggaagagatatagacttgttctgctgtgtccactgcaggagcatctgtaggtggcccctggcccagtccaggcatacctcctccaagtctaagaagtctgtccatatttctggtcagtaactacaactcttaaggtgttaaccttcaatttgttgagtttgacaaatgtcttcttaaagaaagctcttgctaattctggcaggtacaacttccccaagtatattttattttttctttctctcctgaagacgggcgggagccggatgccgcgatatggacccttgtcttgcctctgtggtgacgcgaagacagaggcaacagcagcagcggcgcacacccgacgcggctcagtctgcaaaccggcgatgaatcagcccgattccattcaaaagagttgcccgggcctccgccccc

SEQ ID NO: 14927 - DNA, 1519 bp, Homo Sapiens
gtgcgcttctggatcaccgagcgccaagtacggcccgggcccggcgcgactaggggcagggagggggcgggccgggccgcgtggagtcgggctgacccgggtgaccttggccaggccacgtgggcgccccctgtctccgtttcctcctctcggagttgtgccgggaacgcgcaccaccggccttcaccccttagggcgcgggaggggacgcaggggaaatcgaagctgccagatgcccacgaccacaacgtcaccctccagattgccctctcggaggggcccagtccgcgcaggtggctgctccctactgcctgagctgtggctgagcagcagattggggagaaacaggctctcgcaccttgtcctttattcgacgatttcttcaatggacagaattattagatcctacaaatgtgttcatttcagttgaaagtatagaaaactcgaggcaactattgtgcacaaatgaagatgtttccagccctgcctcggcggaccaaaggatacaagaagcttggaagcggagtcttgcaacagtgcatcccgacagcagcaacctgatccccaagctttttcgacctgcagcgttcctgcctttcatggcgcccacggtatttttgtcaatgacgccactgaaagggatcaagtccgtgattttacctcaggttttcctctgtgcctacatggcagcgttcaacagcatcaatggaaacagaagttacacttgtaagccactagaaagatcattactaatggcgggagccgttgcttcttcaactgtcttaggagtaatccctcaggttgtccagatgaagtatggcctgactggcccttggattaaaagactcttacctgtgatcttcctcgtgcaagccaatgggaatgaatgtctacatgtccccgaagtcttgaaaccattaaggggattgcggtcatggacaaggaaggtcaatgtcctgggtcattccagaattgctgggacaaaggctgttagagaaacgctagcatccagaatagtgctgtttgggacctcagctctgattcctgaagtcttcacctacttttttaaaaggacccagtatttcaggaaaaacccagggtcattgtggattttgaaactgtcttgtactgtcctggcaatgggactgatggtgccattttcttttagtatatttccacagattggacagatacagtactgtagtcttgaagagaaaattcagtctccaacagaagaaacagaaatcttttatcacagaggggtgtaggcgtgagttttaggtgaatttatgtggttcctgcttgaaaaccttcccctctccaggttcggtttagagaactttgccacaggtcttctggggtttttaaggctggctggagaagacagtgggagggtgccccgtctgacacccctggggttgctgagggaacggttggagtggggatcggcctgcgaaaggatactgtgaaatcactaattaactaataaacctgtctcaagttgaggatttgaagaaaa

SEQ ID NO: 14928 - DNA, 837 bp, Homo Sapiens
  misc_feature (730)..(762): n is a, c, g, or t
tgctgaagctgcttttgggggacctggcacctgttcggggcatcagacacgctcacaggaatctgaagattggctatttcagccagcaccatgtggagcagctggacctaaacgtcagtgctgtggaactgctggcacgcaagtttcctgggcggcctgaggaggagtaccgtcaccagctgggtcggtatggcatctccggagaactggccatgcgtcctcttgccagcctgtctgggggccagaagagccgagtggcctttgctcagatgactatgccctgccccaacttctacattctggatgaacccacaaaccacctggacatggagaccattgaggctctgggccgtgccctcaacaatttcaggggtggtgtgattctggtgtcccacgatgagcgctttatcaggctggtgtgccgggagttgtgggtatgcgaaggaggcggcgtcacccgtgtggaaggaggatttgaccagtaccgcgccctcctccaggaacagttccgccgcgaaggcttcctctagggccaccaggctgaggactcgcccaggacatggactggtctctcagacccctgggccaccatgtaggccaccactccaggccgtggacttcccccaacttggggacagccttattcccaaatgtctctatccttttgactggagcatcttctgcacaaccttgggagcccatccaagggttggtgaggactggtctcccnnnnnnnnnnnnnnnnnnnnnnnnnnnnnnnnntatagattcccccactgccccagctctgactggaccccaagtggctgctatgtaaattaaatctctccccgcgtc

SEQ ID NO: 14929 - DNA, 918 bp, Homo Sapiens
ggaggcagtggtatcaacgcagagtggtcattaggcgggcagcagcaagaagaagaagaaggaagacactgaccgctcccagtccagatctccatcccgctccgtgtcaaaggagcgggaacatgccaagtctgaatccagccagagggaaggtcgaggagagagtgagaatgctggcaccaatcaggagacccggtccaggtcgagatccaattccaaatcgaaaccaaaccttccatcagaatcacgctccagatcaaagtcagcttcaaaaacccgatctcggtccaagtctagatccaggtctgcttccagatcgccctcccgatctagatctaggtcccactcaaggtcctaactggctatggccacagctggaactacccgagaagtcttttgtacatgtttggtagccgtagcacaagtgattggagtagaacatgtcactgctgtacatttttaactcccctaatggtgtgtctataattgttaaatctaagtgcttcctctcagtaaagcctcctggcaccaggccttcctgctcgactgaaaaaaattttctctttgaaaatccccttttactcatggcccacagtagaatatccaaaacgccttggctttcaggcctggcctttcctacagggagctcagtaacctggacggctctaaggctggaatgaccacataggtaggtatggtgagttcaaccatttttgctcttgaattgatgcccttcgatgtatgccatttagtgaaagtgctaagtcttaagtttcctaccactttggtttcatatttttggacttaacaaagttgtgaatagcacagtcgaggaaaattgatacctgcagtaacccataggaaataaactgtagagttccatattctggtattgtgattatattgttttatattaaa

SEQ ID NO: 14930 - DNA, 2402 bp, Homo Sapiens
  misc_feature (1435)..(1499): n is a, c, g, or t
  misc_feature (1540)..(1548): n is a, c, g, or t
  misc_feature (2115)..(2150): n is a, c, g, or t
ggggagatcatcccaggccacacagaggccggcttggtcactatggaggagataggcatcttggtggagaaggctcaggatgagatcccagcactgtccgtgtcccggccccagaccggcctgtccttcctgggccctgagcctgaggacctggaggacctgtacagccgctacaagaagctgcagcaagagctggagttcctggaggtgcaggaggaatacatcaaagatgagcaaaagaacctgaaaaaggaatttctccatgcccaggaggaggtgaagcgaatccaaagcatcccgctggtcatcggacaatttctggaggctgtggatcagaatacagccatcgtgggctctaccacaggctccaactattatgtgcgcatcctgagcaccatcgatcgggagctgctcaagcccaacgcctcagtggccctccacaagcacagcaatgcactggtggacgtgctgccccccgaagccgacagcagcatcatgatgctcacctcagaccagaagccagatgtgatgtacgcggacatcggaggcatggacatccagaagcaggaggtgcgggaggccgtggagctcccgctcacgcatttcgagctctacaagcagatcggcatcgatcccccccgaggcgtcctcatgtatggcccacctggctgtgggaagaccatgttggcaaaggcggtggcacatcacacaacagctgcattcatccgggtcgtgggctcggagtttgtacagaagtatctgggtgagggcccccgcatggtccgggatgtgttccgcctggccaaggagaatgcacctgccatcatcttcatagacgagattgatgccatcgccaccaagagattcgatgctcagacaggggccgacagggaggttcagaggatcctgctggagctgctgaatcagatggatggatttgatcagaatgtcaatgtcaaggtaatcatggccacaaacagagcagacaccctggatccggccctgctacggccaggacggctggaccgtaaaattgaatttccacttcctgaccgccgccagaagagattgattttctccactatcactagcaagatgaacctctctgaggaggttgacttggaagactatgtggcccggccagataagatttcaggagctgatattaactccatctgtcaggagagtggaatgttggctgtccgtgaaaaccgctacattgtcctggccaaggacttcgagaaagcatacaagactgtcatcaagaaggacgagcaggagcatgagttttacaagtgacccttcccttccctccaccacaccactcaggggctggggcttctctcgcacccccagcacctctgtcccaaaacctcattcccttttttctttacccaggattggtttcttcaataaatagataagatcgaatccnnnnnnnnnnnnnnnnnnnnnnnnnnnnnnnnnnnnnnnnnnnnnnnnnnnnnnnnnnnnnnnnngaggggggcgcgcgccgccacaaaaagatatcttccccgcnnnnnnnnncccacgcaactatcacgcgcccgcctcccccacggtattttgtagcgaaacacgaagggggccctcccctattatgaggggaagtcgcctcatatataaacgccgctggacagacagcggcgccgcagcgctataatacacgacggcctcgtgatcagtggggaaacacaccgcgccagccacgccgtgaggagacactccttggcggagacaagcagcacctaccacaacctcgcgtgggggggagggcagcgccaacaatgggtggggcgcacccaccactccacctcagacggagcagagcttatacaacacgccccccgagaaggagcaaataacaataagaccacctccccacggcgcgcgcacatatcgggcggcctcaccaccaaccacgcccgcaacacacatcagccaccggccgtgccgcaccagcagcaacagctctctgcggccccaccccgccagcaagcactatgccacatcggcgacacacacaaactatctattccaccccgcggggcgcgcgctgtcgtcagtaaagaaaaaactggcgccgcccaactnnnnnnnnnnnnnnnnnnnnnnnnnnnnnnnnnnnntagactacagaccctcacgtcgctagctctaccatcaatgaacaacgagcgcacccacctacggccgcctgcagccaccctgcacactccacatagaccacgcatcccgtgactcactacgacgacccgaccctgcagactgacccgaaccgacccacgcgacgaccatccacgtcacacccggccactagaccagcacacgaccacccatcgagcagccaactgacggacaccaccgacgcccgcgcgata

SEQ ID NO: 14931 - DNA, 1619 bp, Homo Sapiens
  misc_feature (1547)..(1569): n is a, c, g, or t
gggctgggcacccggggaagtggaagcgccgggccctgctgcgggggggagagccactgacgccgggaccgggaccgccgccgccgccgccaccatgagtgatcagcagctggactgtgccttggacctaatgaggcgcctgcctccccagcaaatcgagaaaaacctcagcgacctgatcgacctggtccccagtctatgtgaggatctcctgtcttctgttgaccagccactgaaaattgccagagacaaggtggtgggaaaggattaccttttgtgtgactacaacagagatggggactcctataggtcaccatggagtaacaagtatgaccctcccttggaggatggggccatgccgtcagctcggctgagaaagctggaggtggaagccaacaatgcctttgaccagtatcgagacctgtattttgaaggtggcgtctcatctgtctacctctgggatctggatcatggctttgctggagtgatcctcataaagaaggctggagatggatcaaagaagatcaaaggctgctgggattccatccacgtggtagaagtgcaggagaaatccagcggtcgcaccgcccattacaagttgacctccacggtgatgctgtggctgcagaccaacaaatctggctctggcaccatgaacctcggaggcagccttaccagacagatggagaaggatgaaactgtgagtgactgctccccacacatagccaacatcgggcgcctggtagaggacatggaaaataaaatcagaagtacgctgaacgagatctactttggaaaaacaaaggatatcgtcaatgggctgaggtctgtgcagacttttgcagacaaatcaaaacaagaagctctgaagaatgacctggtggaggctttgaagagaaagcagcaatgctaaacctctgtttcatgctaaccagacacgccgtgcactcgttagattcctttcttagaaaactcgttttctgctcccttccctcgtcccttccctccccgacaggtcacataacagctgcatcattgaccgcacagcgccatctctccctgagaataaagccgatagccaccctcctccggctccgagcctgcttctgccacacctcgctctcagttctctccacatttccatagagaccgtgtggtttttgttcacccgggccccccgtcttcctccctgtccccccatttataggcataaaatccactgtctgccagcctcccttccctcccacctttttggtacattggtgtaaaaaatgtaaaacaaaaaaattttatgaactaactgtggtgtgtgaaagacacaagaaaaactggaaatcttattccgtgtgtgtttgagagttgcttggggttgggcgtcatggggacaggggacagctctgggagcagaggtggccctcggtgccgtcctgcgcagactcgcccgtcccacggaggccgcggggtgggaactggggaggggccgccgaccgttccgctcttccggccaggtgcttttctgtcaatttctatggaatgcaaaaggaggnnnnnnnnnnnnnnnnnnnnnnngtaaagcttaagaaaaaaatctacatcttatacttgagcctccatactta

SEQ ID NO: 14932 - DNA, 809 bp, Homo Sapiens
  misc_feature (115)..(123): n is a, c, g, or t
  misc_feature (147)..(381): n is a, c, g, or t
tgaatagagagtttgccttatacaatttcctgttacaaagctctccctctcatgcaaagtagggaacaccttttgagcatctttgaatttgacaaatggtgctgttgcaaacacnnnnnnnnngagatgaagtctcgcggttgtcannnnnnnnnnnnnnnnnnnnnnnnnnnnnnnnnnnnnnnnnnnnnnnnnnnnnnnnnnnnnnnnnnnnnnnnnnnnnnnnnnnnnnnnnnnnnnnnnnnnnnnnnnnnnnnnnnnnnnnnnnnnnnnnnnnnnnnnnnnnnnnnnnnnnnnnnnnnnnnnnnnnnnnnnnnnnnnnnnnnnnnnnnnnnnnnnnnnnnnnnnnnnnnnnnnnnnnnnnnnnnnnnnnnnnnnnnngtgtgagccaccgtgcccggcctgcaaacacattttaattgacaacactagggctgttgtacaaaatagtaatgatagccatggaagttttaccttattctgtgagaagtgttcttaaacttattaagtgtctaaactaaggtttagtgcttttttaaaggaaagttgtcccaggattcatcctaaagaaagcaaaagttaattcaactgatccaccaatggaattagatgggtagagttgggttcttgagttttaccaccacttagttcccactgaattttgtaacttcctgtgtttgcatcctctgttcctattctgcccttgctctgtgtcatctcagtcatttgacttagaaagtgcccttcaaaaggaccctgttcactgctgcacttttcaatgaattaaaatttatttctgttctagtggg

SEQ ID NO: 14933 - DNA, 885 bp, Homo Sapiens
cgcgtgagcgcccccctgggaatatttgaacataatcacctctcattccagactatgttaggtcttaatggtgggaggacgcccgagtgctcggcccgtttcaccccgaggaggaaggacactgggtcatgacgccatcagagggcgccagagcagggaccggacgcgagttggagatgttggactcgctgttggccttgggcggcctggtgctgcttcgggattccgtggagtgggaggggcgcagtctcttgaaggcgcttgtcaagaaatctgcactgtgtggggagcaagtgcatatcctgggctgtgaagtgagcgaggaagagtttcgtgaaggttttgactctgatatcaacaatcggctggtttaccatgacttcttcagagaccctctcaactggtcaaaaactgaggaggcctttcctggggggccgctgggagccttgagagccatgtgcaagaggacagatcctgttcctgtcaccattgctctcgattcactcagctggctgctacttcgccttccctgcaccacactctgccaggtcctgcatgctgtgagccatcaggactcttgtcctggtgacagctcctcagtggggaaagtgagtgtgctgggcttgctacatgaagagcttcatggaccaggccctgtgggagctctcagcagccttgctcagactgaggtgaccctgggcggtaccatgggccaggcctcggcccacatcctgtgtcggaggccccgacagcgcccaactgaccagactcagtggttctccatccttcccggacttcagcctggatctccaagagggggccctctgtaaagtcccaccctactccgatctcatataccccgggatctaagatgccaaggccgaa

SEQ ID NO: 14934 - DNA, 932 bp, Homo Sapiens
gccaagctcccttatgtatcattctcctccaccttgccatattaaccccaggagagagggggttgagttgaaagatgacctggagccgcaatagggtagtcccctgtggaaaaaggttcagagccaaaggatggaagggggtcaggctggaactgaggagcagtggagggcacttctccctctacactctcccctgttgaagctctttgtgacgggcgagctcaggccctgatgggtgacttcgcaggcgtagactttgtgtttctcgtagtctgctttgctcagcgtcagggtgctgctgaggctgtaggtgctgtccttgctgtcctgctctgtgacactctcctgggagttacccgattggagggcgttatccaccttccactgtactttggcctctctgggatagaagttattcagcaggcacacaacagaggcagttccagatttcaactgctcatcagatggcgggaagatgaagacagatggtgcagccacagttcgtttgatctccaccttggtcccttggccgaaagtccacggtgagctaccatactgctgacagtaatacactgcaaaatcttcaggctccagtctgctgatggtgagagtgaagtctgtcccagacccactgccactgaacctgtctgggatgccagtggccctgctggatgcaccatagatgaggagcctgggagcctggccaggtttctgctggtaccaggctaagtagttgctggtaacactctgactggccctgcaggagagggtggctctttcccctggagacaaagacagggtgcctggagactgcgtcaacacaatttctccggtggtatctgggagccagagtagcaggaggaagagaagctgcgctggggtttccatggttccctctgggtcctatccctaacactccggaccgtaccagc

SEQ ID NO: 14935 - DNA, 1752 bp, Homo Sapiens
cctagaggaccccggatggcgaccatttcaaggggcttacctggaaatcaacaagaaccccaagtataagaaactcaaagatgccattgaagaaaagatcatcattgctgaagtcgtgaacaaaattaaccgtgctaatgggaagagtacatctcggattttcctcttaacaaacaataatctccttcttgctgaccaaaagtctggacaaatcaagtcagaggttccactggtggatgtgaccaaggtatcaatgagctcacaaaatgatggcttcttcgccgtccacctcaaagagggctcagaagcagctagtaaaggagactttctcttcagcagtgatcacctgattgaaatggccaccaagctctatcgcacaactctcagccaaaccaaacagaagctcaatattgagatttccgatgagttcctggtacagttcagacaggacaaagtatgtgtgaagtttattcagggaaaccagaaaaatgggagtgtcccaacatgtaaacgaaaaaacaaccgtctccttgaagttgctgtcccttaactggcgcctcctctctactttcatggacttgttcctttgtaatagtgcaatttggttttgttttatttggggttcattgtatgtttgggaatcaccaaaggcttttagagttctttggcaaaataaaaatatttgactaatcaatttttattattggaatagttttaacctttcaaatacatgttctgtcctggagcaggattgtagaaactaacagtgtctattttcatgtctgatgtgttcttcctttagtcatcatgttaggtctgtgtaccctaaatcagcatattactcataaatcattaattaatataagcataggaaatggtcttaaaagatactgcattcattcatcagatatttattccatgcctactctatgctaggcactgtgctagatggtatgaaaacttattaggaacctttttgtttttgagaccattgcattctggctggtttgtgctggtttaacgacatctaagaaggtttagaaatggtgagaccaaaacaataactggtaatgatggacagcattattaggaaccctgtagtatgatatttaacaatataggcttcaagaagggctgggccctaagaaggggcagaaatgaatggaccaggttaaatccctctacatgtggtttctgtttgaaaaaaagaaaactgacatttgaacaggacttttaatttgtttaaaactctggtaattacttgtaacagtagaaaatagaagtcattcttattttagaaaaagtgacagaagcagtccagtaagattatatgtttctgtttctggtaaataccatatatgatcctcgaaatgataatatctccagaatattgttttcacccaaatttgagtagatattttaaacacctaacaaagtaaagggctaaaagccattcagatagcagtaaaacattctgtatgatgtgcaataaaacatccaagatcttttttgaaagttttatttataatatacatttttgtatgagaaaggtgattggtacagggtgcctattttagtcatggatcaaaatttgtgtaacttgcagggctttctttctttttcttcaaatttacaagggttcattttggaaactacattttaaactttggaatcaaattgtttcttatttgggaggataatgtatatacattggtattatgttaaataataaaattgttctaatttggtgcc

SEQ ID NO: 14936 - DNA, 843 bp, Homo Sapiens
ggggcgagacggctgggcgccgagtgggacagcgctggtgcggagactgcttccggactccaggtaccgcgcttggcggcagctggccccagacttctgtcttttcagctgcagtgaaggctcggggctgcagaattgcaaccttgccaatggacctgatcggttttggttatgcagccctcgtgacatttggaagcatttttggatataagcggagaggtggtgttccgtctttgattgctggtctttttgttggatgtttggccggctatggagcttaccgtgtctccaatgacaaacgagatgtaaaagtgtcactgtttacagctttcttcctggctaccataatgggtgtgagatttaagaggtccaagaaaataatgcctgctggtttggttgcaggtttaagcctcatgatgatcctgagacttgtcttgttgctgctctgagcatctggaggaacagaaaactaagttcatgtcatcctgctgtaatgggcagagcatattttttttgtatttaaaagataaacttcaatatggaatgctagaaacacaaatagcactgtcacctctaatatgaacattagtttgaggtaagtttttttctaaagcaaaaattttaactggttttctaattgtcaagcactattttcattaaaagtgtctaatgaatcatgatatactcttccaatttgttgggggcaatttttcaaaaaattgggggaatttttttggaaaatccccaaatactcatggtcctcaagaaggccttaaccctacaacttgtccacttaaagggaagttcttaaaggggaaggtctcccgaaatgttataatggtt

SEQ ID NO: 14937 - DNA, 765 bp, Homo Sapiens
  misc_feature (58)..(58): n is a, c, g, or t
  misc_feature (120)..(120): n is a, c, g, or t
gccccccttggtcggcagatttgtgcctttgcagcagtgccagctgccaactgcatcnacatccccctgatgaggcagagagagctgcaggtgggcatcccggtggctgatgagcaggtncagaggcttggctactcggtgactgcagccaagcagggaatcttccaggtggtgatttcaagaatctgcatggcgattcctgccatggccatcccaccactgatcatggacactctggagaagaaagacttcctgaagcctcgcctgattctctaagacttgccagcccttctcctgacccctgcaccgcctcctccaccttcgttcattcagcaagaatgaactgggctggggtgaaggaactctgcaggggcaggaggagaggacaaaaggaaggaaaacccaacttcatcagtgttactcccagtggcttctgacacacagaaggggactgtcatagtcatgcttgatctcatgctcattcttttaccccctagtgcctccatactgagaggtacacacgggtgaacacgcacacacagacatgaacaggacacgaaagcaaagcacaggaacaagctctggctcattcacagaatcatttattcaccaaatgtattgagtgccatgcaccaggcatgttttagggctgaggagatggcactgaacacaatggttatggcccctgtcctcatgaagtttatagtctgatgcagaaaccaataaacaaggaggcacccaataaatacattcttagaaagtgta

SEQ ID NO: 14938 - DNA, 832 bp, Homo Sapiens
ggagacacttgaaactacaggagaaagaaggatctagcgaaatatggctacagagagccctgctacgcgtcgggtccaggtggcagaacatcctaggttactgaagctaaaggagatgtttaactccaagtttggatctattcccaagttttatgttcgagcaccaggaagagtcaacataataggagagcatatagattattgtggatattctgttcttcctatggctgtagaacaagatgtgctaatagctgtagaacctgtgaaaacgtacgctctccaactggccaatacaaatcccttgtatccggacttcagtactagtgctaataacatccagattgataaaaccaagcctttgtggcacaactatttcttatgtggacttaaaggaattcaggaacactttggtcttagtaacctgactggaatgaactgcctggtagatggaaatatcccaccaagttctggcctctccagctccagtgctttggcctgttgtgctggcttggtgacgctcacagtgctgggaaagaatctatccaaggtggaacttgcagaaatctgtgccaagagtgagcgttacattggcactgaaggaagaagcatggaccagtccatatcatctcttgcagaagaaaaaactgccaagtggatagaattaagccccctgagggcaaccgatgtaaaactcccaagtggagcagtgttgtgattgccaacagttgtgtggagatgaataaggcagcaacttcccatttcatatcagggtgattggagtgtcggctggcttgcgaagctcctgggtaaatacaaaagcttgcatgggaaa

SEQ ID NO: 14939 - DNA, 594 bp, Homo Sapiens
cacgagtcggagtttacagtgtcaatcatagacagaaggtctgttcgaagttgacatttcagaagcaagggcttgctcagaaaagaccatttgatggtgaagacggtgttctggggcagcagcagtacctcactcggcttcgagagcttcaaagtgcatcagagaccagcctcgtcaatttcccaaaatccataccagtatcaggtacttccattcaaccaacccttggtgccaatggtgtgatattagacaaccagcctatagtcaaaaaaaggcgaggaaggaggaagaatgtagaaggtgttgacatcttctttttttaacagaaataaaccacctaatcatgtttctttaggcttaacctcctcacagatttccacagggataaatccagcactatcctatactcaacctcaaggaattcctgatacagaaagtccagttccagttattaatcttaaagatggaacgagacttgcaggagatgatgcaccaaagagaaaggatttggaaaaatggcttaaggagcacccgggttatgtggaagatttgggagcttttattcctagaatgcagcttcatgataaagaccga

SEQ ID NO: 14940 - DNA, 1368 bp, Homo Sapiens
  misc_feature (35)..(35): n is a, c, g, or t
ggcatcaggtctgatattatatctagaatgagatnatccagagtagttatgctcattattttttcttcatattcaaaatatacatccaattttcttgcctttatatgttctaaaacagcagtggcaacattggtatggagatcaataagtctttttttctcaaggagttctggcaaagaactaacagctgatgttagcttagcggtatcgtcagaaagcatacttatggctccttcatcttccccttctagtcccataatgcttttaagtcgtttgacctcatcttcctgtgctctgtaagattctagttcttgctgaactgattctgcaacttctgggaatggacgtcctttatgtttttgccaaaatttatcaaccggagttaaatcataagacttctggttttttctctttggtctagcaccagctggagagttttccactcctgaagattcttccaaattaaccctgtttaaatggaaatccagtacatcgtgcaccaatgcttgatatgtccaagtatgatgtaaaggagttgccaaatctatgtttctgtcaacaaggactaataagggcctctggaagctgaattggccagctccaagtgtatcacctgtaaaaagactgtttcttgcatctcttagattttctcgaagtttcttgtctagtttcactgctaccatttctgctgctgttcctcttgaacatctgattataggaacagcacccagagtaacaaaaaagcagaagaggctgtcaactatagtgtccataacagtttccatttccgtgtctgtgatatctggcctgttaatggcacgatatgaaacaagctccttattttgattacataatacaaacatatcatcttccaaagtaataaaattgagatattggtcaaaaaccttggctacttgtgttactgcactagctgctaacgctgcatttgcaatatcttccagtttacttcttgaaatagcagaaataaaatttaaataatatgattcatatagttgatttcgaagatcctggcacattctgtcaatattttcttcagttggcattacaaagtatactgcaggaacatctggaataggatctcgatcagagtgtaaaagcagatgcagagtgattcccatgtctcttagctccttcacagatagcagaggagagattatatcttggccaaatctgtcataaatgagtaccttccatactggttctcctgtgctgtttttaatatgaggcacattgaaattcaacatacgcttcaaagccactgtctgcctttcccgaatactggctgctgctgctgctgtcgctgccgccgccgccgccatcttatcccgggaattccggaccggtcca

SEQ ID NO: 14941 - DNA, 955 bp, Homo Sapiens
  misc_feature (137)..(137): n is a, c, g, or t
  misc_feature (195)..(195): n is a, c, g, or t
  misc_feature (202)..(203): n is a, c, g, or t
  misc_feature (206)..(213): n is a, c, g, or t
  misc_feature (713)..(731): n is a, c, g, or t
ggggggaatccaagccctggtcaggcccaggttttcctgggaaacagctaagcccccgtttccctttcccccgggggccccggccccaaacgaaggttttagaaagcttttggggggccggggccggccaccaaagntttttttctcgtcccgtgtgtttttttccccccgccgggttgttttgcggttcgtttncttcccnntcnnnnnnnnggtatttcaaccaggtattttattggtctggcaactgcaaaatatacaaatttctgaaaggcatctcctgtttgaaagctagcatagctttatatcccaggtcattaattcagacaaatacacagaacacagagaagtcataagtcacacataggaggctcccaaaccaattaacaatgaaacccaatctctacagctttctattgtttaggctccttatacatattaaataaataaatagcacatctgctatcaaaataataaaaaaataaatttcaagtattacaaagaaaaatatcattggtgtggttccaaacagtttttcttctctctcaaaatgaagagctttgcccgtggtctcaggacagaataaggaggggggaaactcacccaaaaacaaataggcaaagttaaaaatattggtccccgttattttgtggggtggagagttggaggaatcagtagacgccaaaagttcatgactgtagctcaaacccaannnnnnnnnnnnnnnnnnntccaatgtcccctcaaaaggcaggtcactggcttgcaaagtaggcagtgttctcctttctatagtatctccctccctgtccagattcatgttacctctctccctatctaggcccttcgcaaactaaaagtcccgtgttagaccaaggcttctgtatttaggtattgattttaggtagtcagaggggagaggggaccacagctatcaagcccctatctgtatccc

SEQ ID NO: 14942 - DNA, 1002 bp, Homo Sapiens
  misc_feature (322)..(333): n is a, c, g, or t
ggggcagtcagtaggaactgtaactatgtctctgatgcaccacgtgtttagacacagcacagtcctttttttctgttcctactgtggaagtagtttctctttgggcatgctgacagcagtttttcatagcctcacggatgagccctttctacgggagtgactccatgcttgtatacagagtatttatacaaatgttttagcatcttcatatgcggtgttaacccctagttctgtacagcatattctgttcaagtatttttttacaagcttgtgctgtaggcacatgccttctgctgcagaagtggacgcccgtggcacactnnnnnnnnnnnngtggggtgccacgccttcatgggacattgccacttctgccctggaactcgtgcaggtacgtagtagctgctactgccacaacggcaacaccaagcaagagatggtccatgcttttctgacgttctcagaatagtggctagcttcaaacctgacaagcgctgcttgaagccggaacactagagaatgttgctgaaagcagaaacggccacgcgggtcacgactatgcgtgggaaagtctcaagcttccctcctgccagcaacaagaaggctttggagtaggcatgatgttttcacgtgtgcgtgccgtttctccaagcactgcaggttccaccgtgtgtcagaggctgcaagtttaacatcctcctgcctgaaaacaaataggtcctttgctgaaaagagggtaaaaaaagagctttgatcttctcagccaggagaagagggtggtgttttcacgcgggcaactgctcgccggcctacatggggttaattcaagtctgctgcgagcacgactccgcccttggcactggcctccagcaagccctgttctctttggggtacaggggaacgggatggtttagactttcctgctcagtgtgtaaaaaatgtagctaaagccactatttttgctctccttaagctgttcaataaaccggttcctcattttaaaaa

SEQ ID NO: 14943 - DNA, 825 bp, Homo Sapiens
  misc_feature (179)..(299): n is a, c, g, or t
  misc_feature (357)..(407): n is a, c, g, or t
  misc_feature (430)..(441): n is a, c, g, or t
tttgagcctagaatgatggttagacttgtagtcactgggcttttgttttgctttatggaaatcattgaaggtctggatccctttctctgaatggagagattgagagggatgtcgggcagttcccattagatttagtggccttcatgttattcagaattgttttggtgatacctcacccnnnnnnnnnnnnnnnnnnnnnnnnnnnnnnnnnnnnnnnnnnnnnnnnnnnnnnnnnnnnnnnnnnnnnnnnnnnnnnnnnnnnnnnnnnnnnnnnnnnnnnnnnnnnnnnnnnnnnnnnntgtgatggcacatacctgtaatcccagctacttggaattggaaatcgcctgaacccannnnnnnnnnnnnnnnnnnnnnnnnnnnnnnnnnnnnnnnnnnnnnnnnnntgacagagggagactctgtcttnnnnnnnnnnnntcatctgtaaaataaattccgggatagtcgttttgttcaaggaaatgttttgtaaattgagctcacactatataatctttattgtcctatcctcatgtataatacagcaggtataattacaccaagcgctatagttataaatatggcatgaagtgaactatggccttttatttccttccagtgtgaacacagcaggtgtgagatgtcatcttggaagacaggccttgcagaaataggcctacatccaaaatattatcttgtgactccatgaaccattcattaaccctttgtatctttgagtgaaaattttactcaaaagttgcatctggaagttcgaagaaattacttgaaataaaaataaagatttctatatagataaaacct

SEQ ID NO: 14944 - DNA, 1058 bp, Homo Sapiens
ggataagaccaaaatggaaaaccagagggcctggttatactcagtatggagtttcaatgcactgtgtgagggaagaacattccgctgtcaatatgaacctccactacttggaaaatggcacagttatgttgaactttatttaccgaaaagaactgttctttcttcctttgggatttgcacttaaggcacttgtcagcttttctgattatcagatctttcaggagctcatcaaaggaaaagaggatgattctttccttaggaactctgtttctcagatgttaaggattgtaatggaagagggttgtttgacacaaaaacaggtccttaactacctaggtgaatgcttcagagtaaaactcaatgttcctgactggtacccaaatgagcaagctgcggagttcctgtttaaccagtgcatctgtatccacttgaaatccaatactgaaaagttttatatgctttgtctcatgacgcgaaagctctttgctttagccaaaggagagtgcatggaggacaatcctgatagtttggtgaaccaggaagtcctcacaccgggtcagctcttccttatgttcctgaaggaaaaactggaaggtaggttagtggctattaaaatagcttatgataagaaagctcagaagaccagtgtttccatgaacactgacaatttgatgaggatttttacaatgggcatagaccttacaaaaccatttgaatacctttttgctactgggaatctgcgttctaaaacaggtcttggcctcctacaagattctggactttgtgttgtggatgacaagctgaacttcatacgctacctctcccatttccgctgcgtgcacagaggggctgattttgccaaaatgaggaccaccacagtacgcaggctgctggcagagtcctggggcttcctttgtcccgtgcataccccagacggggagccctgtggcctgatgaaccacctaactgccgtatgtgaggttgtcacacagtttgtgtatacgggctctattccagctttactgtgcaactgggggtcatcccattgatggagctcc

SEQ ID NO: 14945 - DNA, 571 bp, Homo Sapiens
tcattgggatttctacatggatgctggggtgaaaagctctgactttctgtgtgattggtatggctggatgaacccggatcccacctgctaagctgttgcatattaatctccaggacccatgccacctcagggagcaggaagacactgcctcacattcacacctttgtgcaataccaagatcaggcccttctagggaagtaagctttgagaggcagaatggcactgggaattcacaaggttgagaagaaaaaggggcaccatactagttaggacttcctgatttcaaattatgggaaacccaacacaaactaactttagcacaaactaactaatgtaagctaggaggatggaatgaagagctgcaggaggaaagtttggactctatattgtgctttgtaggcagtctgtctatctgaaatctctgctggtctctacttagcgtccttctcgcagaccggctctctccatgtggtacaaaaatggctgccatcagccctagattaaatattctcagtgtagcagctccaggagaaagtacagagcttttcaccccagcatccaccgtaggatc

SEQ ID NO: 14946 - DNA, 944 bp, Homo Sapiens
tcgaaagaggagggtgctcgtggttggtggtggtggcagtggtgtctgtaagggttggggacttaaagccggctctggctgctgggtgaaatgctgctgggaagtctatagtgttcagtcaggagctaggatgtcaggctagaccagcttggccttgatcagccctcctccttcctcaacatgccctacaggggagatatatcaaacaactgaaaacatcaaagacatctgtagggtgtccagcctcttgttattgtcctgcttgaatctcacccccggaagccccagagatcctttcttggcaaatgtgtatgatgtctagataggactgtcgcctccccatgtccagctgctggaggtatataggttatgtagctacagatgctacttggattgggaggtatggggaatttatcagaagagaggaagagttaattattgtgaatctcattctttctaaagattgtgaatcttaactaagacctggcacctgacggaaaataaaagggtggcacgctttgtcaggattctctgggattgcagatttagagctcagtgagatcatcgctggaaataaccttgaagctgatgtggccttgcttgactttggcagttggaccacccttcttacgcaggtacagagacttcagatcacggcagtcgctggggtcagcatccagagtaacctgccccaagaactgatcacagaattttcggctgttccagacctgtactataataggaatgtcagtggtccttctgtagaaaatggcctgggtgtcaaaaatggcatgaactgtattcttctggacaggagaacggacttcctcctttccacatttgatgaccaaatatgggtttacagtttcattggcatacttcttctccaggtcctcagcactgtgaacagtgatctgagtaactactttcgggtagccccggga

SEQ ID NO: 14947 - DNA, 1117 bp, Homo Sapiens
  misc_feature (145)..(145): n is a, c, g, or t
agctgttgtgcatccagaggtggaattggggcccggcattccctcctcgtcccgggctggcccttgcccccaccctgcaactcctggttgagatgggctcagccaagagcgtcccagtcacaccagacgcggcctccgccgcacnaacaagcatctggctcgagtggcggacccccgttcacctagtgctggcatcctgcgcactcccatccaggtggagagctctccacagccaggcctaccagcaggggagcaactggagggtcttaaacatgcccaggactcagatccccgctctcctactcttggtattgcacggacacctatgaagaccagcagtggagaccccccaagcccactggtgaaacagctgagtgaagtatttgaaactgaagactctaaatcaaatcttcccccagagcctgttctgcccccagaggcacctttatcttctgaatgggactggcctgctgggtacccagttatgctgttgaggaacagatgccaccttggaaccagactgagttcccctccaaacaggtgttttccaaggaggaagcaagacagcccacagaaacccctgtggccagccagagctccgacaagccctcaagggaccctgagactcccagatcttcaggttctatgcgcaatagatggaaaccaaacagcagcaaggtactagggagatcccccctcaccatcctgcaggatgacaactcccctggcaccctgacactacgacagggtaagcggccttcacccctaagtgaaaatgttagtgaactaaaggaaggagccattcttggaactggacgacttctgaaaactggaggacgagcatgggagcaaggccaggaccatgacaaggaaaatcagcactttcccttggtggagagctaggccctgcatggccccagcaatgcagtcacccagggcctggtgatatctgtgtcctctcaccccttctttcccagggatactgaggaatggcttgttttcttagactcctcctcagctaccaaactgggactcacagctttattgggctttctttgtgtcttgtgtgtttcttttatattaaaggaagtaattttaaatgttactttaaaaaggt

SEQ ID NO: 14948 - DNA, 551 bp, Homo Sapiens
cccatcactctcatttctggtcagcacaggccaacaccgattgtctgataaccccgctgaatgtgttgtctagcatttgtcagccaagagggaaagaagagtcaagagttttcccctaaaataatcaacacaacattctggtcttcctaattgattgatgattcctaggatgttttccccaaaagagagagcttagcctaacaccatgctgattgttgaagtttgtaaaatctgtctccttctccagtgctataataactcattgttctaacatttccagagatcgttcttctgtccctgcttgctgacaaattttgtatattcacgtcctgtctccaccagtgcatgtacttgttgagcagtgatcaattcaatgtttgatgggttgtatctttctttttcatttaagtgagataaaaccatcataagaatcttaaaacagtaattcttaatgcattgtaacgttaaagcatctttgaaaatgtaaaattcttacaatcaagaaagtaatagcactggtaaagcccagaaatatcacgggggatcctcta

SEQ ID NO: 14949 - DNA, 657 bp, Homo Sapiens
tgcagggaggtatttaacagctgagcaaaaacattgagtcgctctcaaaggacacgaggcccttggcagggaatatttaaagcaacttcaagtttaaaatgcagctgttgattctaccaaacaacagtccaagattaccatttcccatgagccaactgggaaacatggtatatcatgaagtaatcttgtcaaggcatctggagagtccaggagagaagactcacctctgtcgcttgggttaaacaagagacaggttttgtagaatattgattggtaatagtaaatcgttctccttacaatcaagttcttgaccctattcggccttatacatctggtcttacaaagaccaaagggatcctgcgcttgatcaactgaaccagtatgccaaaaccaggcatccaatttgtaaaccaattatgataaaggacaaaataagctgtttgccacctcaaaactttatgaacttcaccaccactagtgtctgtccatggagttagaggggacatcacttagaagttcttatagaaaggacacaagtttgtttcctggctttaccttgggaaaatgctagcaacattatagaaattttgccttgttgccttatcttcttccaaatgtactgttaaataaaaataaagggttaccccatgcaatcac

SEQ ID NO: 14950 - DNA, 792 bp, Homo Sapiens
  misc_feature (703)..(703): n is a, c, g, or t
gggagacagcggcgggaagatgagcacggaaggtggtggccgtcgctgccaggcacaagtgtcccgccgcatctccttcagcgcgagccaccgattgtacagtaaatttctaagtgatgaagaaaacttgaaactgtttgggaaatgcaacaatccaaatggccatgggcacaattataaagattgaccctgctacgggaatggttatgaatctggctgatctcaaaaaatatatggaggaggcgattatgcagcccctggaccataagaatctggatatggatgtgccatactttgcagatgtggtgagcacgactgaaaatgtagctgtttatatctgggacaacctccagaaagttcttcctgtaggagttctttataaagtaaaagtatacgaaactgacaataatattgtggtttataaaggagaatagctattggggttagcattgcacaaagcccagtttctttctgtgtttgaaaaagattttgatccccttggaatattaagaggtcaacacgtgattgttgtacgtacacattgtgctctggagtgcctatttattgaaatcattgtaagacctgttataaatttaagtctatttaaaactaaacttgtaatatacatcctgaaaatcatttagagagtcttttatttataaattaaaaatcacttcattttcaccaaatgttttggtgtggngattatttgaaagcaaaagaaatctaattttggttttctccattacctcattttagtatttaatttttacttggtataatatacatggg

SEQ ID NO: 14951 - DNA, 1434 bp, Homo Sapiens
  misc_feature (851)..(876): n is a, c, g, or t
  misc_feature (1057)..(1057): n is a, c, g, or t
  misc_feature (1285)..(1285): n is a, c, g, or t
ctatggagaacctgctggccttgtagacagcattgggcctttgccagacagcaagaggtgaagcgaagccactcttacctctcccttcccctcccacctgccccctgcgtaggcacccagacttggagagacccgtctgctgttaatacttccatcctcttccttcccaaagagcagatcccaaggcatttactccttggtctgtctcgcttttctgtcgcccctcccagcgctgagagcctccccctggctgtcagcagcactgtgtccaggctcttgtctgaacaccgcagcccctccttcgctccttccagagctcagcatgtcacagcaaggactgccgcattggtgatggagggccagctgaggggaagttgctggtgagtttccttttctccatttctagcatatggacacctggcctctgcttgagcacttaggtgacaggaacttccgcacctcctgaggccctggatgattctaattgttagaaattctaattgttagaaatccttccttataatgaatgaattctgctttcctataatttctacctattgggccttgttctgttctctggaactaaacagaacaaccatttacccctccttttcaaactagagaataaagatttggttttagaaaaccgaaaccccatatgaaaacaacagaacaagaataaacgcccgcagatctaaacaaaaaaaacatagaggattgactcgtccggcgccctcactttttgacatcgcttttttgggccctctgccccccccaccaaacctcaacccgggttgaagtgcgggtgtccaagggacgatccactatcataaactcgggccctaggcctnnnnnnnnnnnnnnnnnnnnnnnnnngggaaaaatcctctggggcccccacaccccacatgccccgagggacagatcccgaagggcgatctccccgagagatcatcataaaccggggatttctagagacccagacgccctggtattgttaactgtaccggctgctgcaattatggcgcccccccagtcaaagcgaaccggatggggnaatatcattttagctgccccactggccgccaaactggatagcccctattattgggaacctcctctcatacccaacttccacatctgccgctaaccgtgaaacaccaccacccgtggttcgccccagttcgccacctcccgcccttttgcctccacgcgctgtacccacgccgtgtggcggaacaaacctcgccgacattgacacaaagtgcctccctcttgttgatcnctcccacgcgccggacaaactagcctcgcccccagtgaacatccaggccccgcagggcggatcatggaccatataccttctctgcatcaccggcctccctatagacacacactcccgctctgctgagtgatatacacgcccgccagggc

SEQ ID NO: 14952 - DNA, 1555 bp, Homo Sapiens
tactggtcctgctgttctctcctcgcggggtcttgggcatgaccccaccagcagcatgttgttgctgctttgctgcagtctactgtgaagctgctcttctggcctacgtaggccttgctcagccccaggcccttggccaccaccttgctggcgtcagcaggcccaggacccggggccccatgctgtggggcacaggtggccttggtcagagagtctacaaacactgatgatgtctcgtggaggctgtggttgctgacgagacgggggcctgtgactttggccttgaaggggctgcccccaatgtggtaggggccgccgtacttgatggagatgaggtagctgccaggtgccatgggggtataggtgacgcggtagccctcagggcactcctggcaatccatcttcaccttggaggggccgtcaatggtcaccgacagggcaccagctcccgcattgctcgtgttcacgacgaactcagctgggttccctgtgacaccgccttccagacctgctccgtaagcagacaccaagcctgggtcccctccatgcccaggctccccaactcggatcttgaaggggcttccagggatgtgggtgccgttgaacttgacgtcaatcaggtaaacgccattctcccgagggatgaagcgcacagcatacttatcttggtcaatttctgtgacatagcactcctccagggctcctgaggggctgtgcaccttggcatcgatcgcccccttggccccgttcaggctgactgcaaaagaggctggctggttgacctttagccctgactcctgaaggctagaaacagtgaggcggcgggcgtcgccagacggagaagccacaggcaccacgaaggggctgtcgggaatgtgttcctcgttgaacttgactgagacttcgtagtcacctggctcctggaccacataagccacaccacaggagccgtccttgcggtcctcaaaagagatctcagccttgctggggccctcgacagcaatggccaggcctccagcaccagcttcccgggtccagatactgaattcggctggcactccagcttcagctctctccaggccagggcccccagctcggaccttgtgggctcccccttcccctaggggccccacggtgaactggaaggggctcccaggcacgtgctggcccttgtacttcacgctgactgtgtgtgtgcccatctcagcgggaacaaagcggatgcagtaggtgtggttctccccttccacgatctcggcctcatgggtcttgcccgatgggctggtcacctgggctgtcatatcctggatgctaatttcagggattttcaggctgaggtcacaatgactaccaacgttggccactgaaggagcccgacgcctgcgggtgatgctctctttcacccggccctcgcctgtcaccttcacagagaaggggctgccaggcacgtgctggtcggcaaacttgatgttgatgatgtagttgcctggctctgtggggcagtaggtgaccctgcacgtcccgtcctccaggtcctctgtgttcggacgcgtgg

SEQ ID NO: 14953 - DNA, 608 bp, Homo Sapiens
agcggccgccaggtgcccctcgaaggccaggatctcctgcttctcccgctgggcggtctgcagctcacggttcagcatctccgtccgggtctcctcatccgtcaggatgcacggatgggtaggagtagttgttggtcatcaccatctccatgagcatcttcagggtcgggtactcctcccacgcagccaggccgatgttctctgggttgaatgcggcgacgaccagcaggaggggccaggccttccagtagagggtagagatggcgaggttcggaggctggtaccccggtgggagctggatgttttcagggtgatggtaggtgcacagattcagaacggcgtcgatcagctgggtcctccccaccttcagcacctccacatcatccgcctgcacggcagccgcccgcttcaccaggtggtcaacaagctccatggcgtctcgcaggcccgagcgggaagctcccgggacatgcccgatgaccaagggatgcgcatcagcgttgacctcaagaatgggcacctcggagcacagacgcaggaagaagttgcggtcactctcgggtgccatttccccacttgtagtggatctcaggatgcacaaaccggaa

SEQ ID NO: 14954 - DNA, 817 bp, Homo Sapiens
ccacgcgtccgcggacgcgtgggggagccgacttcattctacttaacttttcctttaaagataactttccctttgacccaccatttgtcagggttgtgtctccagtcctctctggagggtatgttctgggcggaggggccatctgcatggaacttctcaccaaacagggctggagcagtgcctactccatagagtcagtgatcatgcagatcagtgccacactggtgaaggggaaagcacgagtgcagtttggagccaacaaatctcaatacagtctgacaagagcacagcagtcctacaagtccttggtgcagatccacgaaaaaaacggctggtacacacccccaaaagaagacggctaaccctggagtatcacccttcctccctccccaggcaccactggaccaattacctttgaatgctgtatttggatctcacgctgcctctgtggttccctccctcatttttcctggacgtgatagctctgcctattgcaggacaatgatggctattctaaacgctaaggaaaaaaaacaaacacagaactgtttcaagtactcaagactgacttacagaccaaccaaccaccttgctggaacccttgctagcaggcattcttataaaagaaactttcgagcctccttatattgctggaaactcagctgtgctccagactagagcctccttacctatgctatggatttttaatttattttctcttatttcatgtacactgctttttttggttacagtgtatgatggatgtgtatgaaaaaaatgtatctttgggaaaacaattacagtttgttaatttgaa

SEQ ID NO: 14955 - DNA, 505 bp, Homo Sapiens
cagttaaaactgttcaaataaagcatgataagtactgtggtaaggggaaagtgccatgagtgtatttaacccagactggagaaggggagaggctttgggtgggagaaggttatctagaaaggctatctagaggaagtaatgtttaaactggaccagcagggtagagagggtgaatgagggatggattctagacaaagggaatggcatgtctgaagacctgcaggtgagaaagagcatggtgcatgcagacagctgaggaaagcttgtgagagttgggaggaggtctggggatgagaaagatggctggggcaatcagcaggaaccactggcatgtaaagcaccctgcttcaggagttggactttatttggagggcatggaagctcctggagggtttgtaacaggtgagtggcatggttgggtttgtgttttagttttctgggggcattgtggaagaaaggaactgtagacagtcctatgatgacagggtactcatttaacggctac

SEQ ID NO: 14956 - DNA, 890 bp, Homo Sapiens
  misc_feature (512)..(512): n is a, c, g, or t
ctcgcgaacgtgttatccggccgcagccggtcgtaaccaagttgtgtcctgtcagccgctgtccccttcgccgcgatgccgctggagaacctggaggaggagggtctgcccaagaaccccgacttgcgtatcgcgcagctgcgcttcctgctcagcctgcccgagcaccgcggagacgctgccgtgcgcgacgagctgatggcggccgtccgcgataacaacatggctccttactatgaagccttgtgcaaatccctcgactggcagatagacgtggacctactcaataaaatgaagaaggcaaatgaagatgagttgaagcgtttggatgaggagctggaagatgcagagaagaatctaggagagagcgaaattcgcgatgcaatgatggcaaaggccgagtacctctgccggataggtgacaaagagggagctctgacagcctttcgcaagacatatgacaaaactgtggccctgggtcaccgattggatattgtattctatctccttangattggcttattttatatggataatgatctcatcacacgaaacacagaaaaggccaaaagcttaatagaagaaggaggagactgggacaggagaaaccgcctaaaagtgtatcaggggtcctttattgtgtgggctattcgtggatttcaaacaggccagcttgaactccttccttgaacactggttttcaacattttacaatcctatgaaacttattggaattataaaaaccttttgtggacctattacctggtcttatgggccaagaaatggaattggccctttagaaaaagaaaccaggattccttcctggggaaaaaaggggctctctttaaaaaggaaggccacgaagaatttctctttggaaaatgtggttt

SEQ ID NO: 14957 - DNA, 777 bp, Homo Sapiens
  misc_feature (655)..(683): n is a, c, g, or t
ggggccgcggcggggaaaatggcggacgggaaggcgggagacgagaagcctgaaaagtcgcagcgagctggagccgccggaggacctgaagaagaagcagaaaaacctgtgaaaactaagactgtttcttccagtaatggaggggaaagttccagtcgcagcgctgagaagcgatcagctgaagaagaagctgccgacctcccaacaaagcctacaaagatctccaagtttggatttgccataggtagtcagacgacaaagaaagcatcagccatatccatcaaacttggatcaagtaagcctaaagaaactgttccaactcttgctccaaaaactctttcagtagcagcagcttttaatgaagatgaagatagtgaaccagaggaaatgcctccagaagcaaagatgaggatgaagaatattggaagggatacaccaacatcagctggaccaaactccttcaataaaggaaagcatgggttttctgataaccagaagctgtgggagcgaaatataaaatctcatcttggaaatgtccatgaccaagacaattaaatgatgttttgaaattggggtgtggggtgggtgtaaagttaaaaggaacagtttcctttttttaaagaagggcgataagactatcttttgggagccggcnnnnnnnnnnnnnnnnnnnnnnnnnnnnnaaaaaaattgaagtgggtaccacctaaattccattggacaaattttggacaaatttaagcgcaacaacgcgacagggtcctgcgccaaacccct

SEQ ID NO: 14958 - DNA, 1000 bp, Homo Sapiens
agggatcccggctgcacaaaggatgctggaactctcttctacgggcacccctcagccacagctgtggggccagcgaagtgagagcctgcccagaggggccaagtccctgtcaggttacaaaattgttaagccaacccctcaccaaacacagggcattattagtaaacaggtgaggaaaatcctctaggtcggctagctggacgtgcaggactgagggttcaacttcacagcctgtctacagcaccagccctaccatcactgtggattaatcacccaccaaatcctacccatcccaactatgaaaaaaatgacgagcgtccagtgcaatgcccatctccaacctctgtgcagaggaagcctggcctctccctggagcaggtccttgttcagaggattgctccaggagaacctcgtccctcacccaggtcagcatttcagaaggagacacctgatctgcctctatcgctgccacacaccatgctatgcaggcttggactgctcagaaatctcttgtgggagccacattatttttcctgcagaacagaattatctagaagggggtaaataatagtttctaaggtggtatctgatcacagaataaaatatgaagtgagatgaagtatacagacgggctcagagacagcctgtattcactgcagcactggctctgaaggctgctgggtaggaacgtgagcaggagctggggtcccctgtgctgtttctgcctctgctcatgattctctttgggaggttcagctggtaatgtcatctctgctcactcaggtccttgatctagagaactatttcagtatttgccacccaccacaagcccacatcctggggatgctgtgaacattcctgaacctgtgaagtttcccaaatctctcagaactagagggcctacacagggaggggccatatgccttttcctggtagacagaataaacaactgttaagaggcatcctttgtgcatgcacgggatccatctagaacgccgca

SEQ ID NO: 14959 - DNA, 755 bp, Homo Sapiens
gggtttccggaacttcgcccgcgtctctgggcttttgctctgtcaggctggtggcgttttggtgtcttcgtttgttatggccgctgctgtcgctatggagacagatgatgctggaaatcgacttcggtttcagttggagttggaatttgtgcaatgtttagccaacccaaattaccttaattgtaccctcagtgtttacacatgttagagctgctccaatatgaacacttccgaaaggagctggtgaatgctcagtgtgcgaaatttattgatgaacagcagattctacattggcagcactattcccggaagcggatgccgccttcagcaagccttggcagagcagcaacagcaaaataacacatcgggaaaatgaaaaactggatacaaacgaggcacttaatacatgcatataatgcatgtccttttgtacagtgaagacaaaaaaaatgaaaactcttcctatctacctttattatggtagccccctacaacctttagtgtgctttttcatccaacttttttattgttaataagactatttctggcgaacctttgcctaactaattcgccaacaccataattccctatgtgcgggccgccttcgggccttcgaaaaaaacttttccaaaccccatttcgttttgggcgccgcggggcccccactaaggtaaagggcaacctgggcccataacctgttttcccagagaagaatcctggcccagggacctaggggctgggaattccccacccat

SEQ ID NO: 14960 - DNA, 514 bp, Homo Sapiens
  misc_feature (360)..(360): n is a, c, g, or t
  misc_feature (488)..(489): n is a, c, g, or t
tcaccaggaatgttaaagtcagtgggaacgtgactgccccaactcctggaagctgtgtccttgcacctgcatccgtagttccctgaaaacccagagaggaatcagacttcacactgcaagagccttggtgtccacctggccccatgtctctcagaattcttcaggtggaaaaacatctgaaagccacgttccttactgcagaatagcatatatatcgcttaatcttaaatttattagatatgagttgttttcagactcagactccatttgtattatagtctaatatacagggtagcaggtaccactgatttggagatatttatgggggggagaacttacatttgtgaaacttctgtacanttaattattattgctggtggttattttacaaagggtctaggggagagaccccttgtttggattttaagctgcaaaacgtattttggtccaagcttggctcttccagtggggaaggaaaacacctgggnnaggtttggctaaaccgcagggttca

SEQ ID NO: 14961 - DNA, 700 bp, Homo Sapiens
  misc_feature (457)..(546): n is a, c, g, or t
ctaataatactattagcaatgacaccagccgagcagttgcagatccctctcgtatagaatctgaaatgtggatgatgctgttataaatagcaaagttagccatagcaacataggcactggtaatactgtgggtgggtctaagggtaacactgttccctgatcttactgtcatcatctgcaatctaagtaatgcagataataatggtgccccttggacttgacgccaatctcttggtcctattagaaccatgtaggcagagctattccaataggtgggggaatacctgacaggatatggaaatacctgggagagggaattcccaggcccctggcagtgctaggaaggaatgcaatagtggtaaccgaattccagctaatagttactgatgtctacctgagccagttctcctaaatgcttcctgtggataacctcaactgtgagaaaaagattgtttannnnnnnnnnnnnnnnnnnnnnnnnnnnnnnnnnnnnnnnnnnnnnnnnnnnnnnnnnnnnnnnnnnnnnnnnnnnnnnnnnnnnnnnnntccagccgaaatgggcactccgaccaccccctagagcggctctgatcggctgtcctgccggactacagtaaggtgtccccagaagggttgctggccgctgctcctggagctgcctgtgcgtgggggcacggaggcaaggactgatccggaacgc

SEQ ID NO: 14962 - DNA, 350 bp, Homo Sapiens
gctctatgatggatcccaccaacattggctcgacctacttcaacatgcgcaagacgacgatctacggcggcagcaacgaagtgcaacgcaacatcgtcgctcagatgaccctgggggtgtgagatggacttcgacttcaccgacgaacaggaacagctgcgcgacgcggtgcgcaagtgggtcgacaaggcctatggcttcgagcgccggcgcggcatcgtcaaggaaggtggctactccaaggaggcctggggcgagatggctgagctgggtctcatgggcctggccgtgccagaggagcacggcggcatgggcttcggacccgtcgagggcattgttggtgggtaccg

SEQ ID NO: 14963 - DNA, 1086 bp, Homo Sapiens
  misc_feature (261)..(292): n is a, c, g, or t
  misc_feature (908)..(926): n is a, c, g, or t
tgttcattaatcattgtgaaaaatacagaaaccaaaaccaatatggctggtttctttcccacacccctccaccctgttcaggatagtcatttgttctcacaaccggcagaggcagaagagggttggaatgaagactccgaagccaccaggatgggaaacatgaggctgctgttgtccgaggcataggggttgggtgtgcgggggcctgactgcacccggttcttattggtctgttttttgagattagacccttcatcatannnnnnnnnnnnnnnnnnnnnnnnnnnnnnnnccaatcccggatgaggctgaagctttggtacatcatccactgtcccagccatgatgtagagtgcacagaccttgggattgtcatagtaccccttgacaaactcaatgtagagtttccctgtgaaggtggacacctccccctggacactcagcttcccctttctgatgctcataggtataatttcatcgtgagctgtgctatgcccaacacgatcaaagatatccaagtccttcaccacgacgtggccattcaatcgtacatcaaataccttttgctgggactgtgcaaagtagacctctgcaaatttcaagaccagcacgtagtccccctcctctttgatgggcacttcgtagccaaaggtctcctcattgtaccgctcagtttgatacaggatctggtcctcagggttggaacgcaggattggcagtttcatgccatagtctgaggctcggcccacccggccttccaaagggtccttgcggaagtggatcccgtgcacgtccacatgcgcctctccacccgcgttgaccgcccaaatgacgctctcgggcagcccggcccccgccgcgccggccacgccggccacgccgagcccgggtccccggatcgccggcgnnnnnnnnnnnnnnnnnnntcgcaggagcgccacagcggttccctcaaccgcccaggctcccagcatggcggccaccaccacgggggcagcccccgccgaccctcgtcctcggccggctgccaggccaccccggactcagaaaaacagcgccacggccgctccgcctgagccgccgggg

SEQ ID NO: 14964 - DNA, 1375 bp, Homo Sapiens
  misc_feature (734)..(746): n is a, c, g, or t
  misc_feature (1175)..(1175): n is a, c, g, or t
  misc_feature (1183)..(1183): n is a, c, g, or t
  misc_feature (1216)..(1216): n is a, c, g, or t
  misc_feature (1248)..(1261): n is a, c, g, or t
gggagacggtctagcgctgcgtgggccatggtgcagctccgaccgcgagcgtctcgcgccccggcgtcggcggaggcgatggtggacgagggccagctggcctcggaggaggaggaggcggagcacgggctgttgctcgggcagcccagcagcggcgcggccgccgagcccctggaggaagacgaggaaggggacgatgagtttgacgatgaggccccggaggagctgactttcgccagcgcccaggcggaagcgagagaagaggagcggcgagtgcgggagaccgtgcgcagggataaaacgctcctgaaggagaagaggaagcgacgcgaggagctgttcatcgaacagaagaaaagaaaactccttccagacactattttggagaagttaaccacagcttcacagactaacatcaagaaatcgccaggaaaggtgaaagaagttaatttgcaaaagaaaaatgaagactgtgaaaaaggaaatgactccaagaaagttaaagtacaaaaagtacagtctgtcagccagaataaaagctacttggccgtaaggctaaaagaccaagatctgagagattcaaggcaacaagcagcacaagccttcatacataattcattatatgggccaggaaccaacaggactactgtaaataagttcctgtctcttgccaacaagaggttaccagtgaaaagagctgctgtccagtttttgaataatgcttggggaatccnnnnnnnnnnnnntgccaagaggtttaaaagacggtggatggtcagaaagatgaaaactaagaagtaaatcaatgctaaatgaagaatctgtactttgtatgtatagaatttatctaataaatcattcatagatcattttaaaggatcattataaaaatcataaacctaatttgaggaagtgctcaaccacatttcattcttctggagtagaactgtgccttgcaatcctagaggaaaaagcggtttaagaaggaattgttttcttcttaatatatttaactgaaattcagccatacccgcatccagcacagcacctcttctctcctccccgtttaaagggtcgccaaaatgcccggactacaaggaaccgcaatcccggaggtctactgagcggaacattgtataacgaacctattaccgccgccgtaaatgtacgcacgngagccatnctgagctggcgccggccgccccgcgctcgtgtngaacctcgaaccatcgccgcgccccaccaaannnnnnnnnnnnnngcgccgtcacgacttctacactgtcggaagggtgggtgggggcaacttccgccctcgccctgcgcagaccgccgggtcgttgcccctccgctcgcggctctgcgccgaccggcc

SEQ ID NO: 14965 - DNA, 1288 bp, Homo Sapiens
gggtcggcaagatggctgccctgacagcggagcattttgcagcactccagagcctgctcaaggcctcctcgaaagatgttgtcagacagctgtgtcaagaaagcttttccagttcagcccttggcttgaaaaaactcttggatgttacatgttccagcttgtctgtgacccaggaggaggcagaggaactgctccaggctctgcaccgcctcactaggctggtggcattccgtgacctgtcctctgccgaggcaattctggctctctttccagaaaatttccaccaaaacctcaaaaacctgctgacaaagatcatcctagaacatgtgtctacttggagaaccgaagcccaggcaaatcagatctctctgccacgcctggtcgatctggactggagagtggatatcaaaacctcctcagacagcatcagccgcatggccgtccccacctgcctgctccagatgaagatccaagaagatcccagcctatgcggagacaaaccctccatctcagctgtcaccgtggagctgagcaaagaaacactggacaccatgttagatggcctgggccgcatccgagaccaactctctgccgtggccagtaaatgatccagccagctgccagggccactgccatgacccagctgctcatgagtgataaatgtctccccatatgcaggctgcccttgcagctgcagctgacaacaggcaggatggtggggacagcagggggctactgccatccagaagttacagttggattgggaagaagcagccagatcccccgctgttctcactcatcttctttctctttctgaagctggagagcagaagcccccatctttgaaaagctcctgagtgcaacttaattaccaccatggcagggtgagggaacatttgcatcgtcagctgcctctgcatagctgtttgagaaattcaggcccaaatcatgcagcctatccaataagtaagtttatttccaacattagctctaattagttcatttccaatcccagaacacatggagggaatcggacaggtgatgccagcagttcctgctcctctgtcagggaagccaggcagagcccacagagcatggtccatccagagtgttccctgagccccctccaccatactggaacccctcttcagtgtaggaagtctgaaatgggtgctaattcccttcttcatgaaaccagggccctcttccttcatctaatgcagccactcctaggtgaagaagtggggaaataattgggaaataaacaacagtttctaaaacttccatg

SEQ ID NO: 14966 - DNA, 776 bp, Homo Sapiens
ccacgcgtccgcggacgcgtgggtggttatagaattaccacaacccctacaaacggccagcagggaaattctttggaagaagtggtccatgctgatcagagctcctgcacttttgataacctgagtcccggcctggagtacaatgtcagtgtttacactgtcaaggatgacaaggaaagtgtccctatctctgataccatcatcccagaggtgccccaactcactgacctaagctttgttgatataaccgattcaagcatcggcctgaggtggaccccgctaaactcttccaccattattgggtaccgcatcacagtagttgcggcaggagaaggtatccctatttttgaagattttgtggactcctcagtaggatactacacagtcacaggactggagccggacaatgactatgatatcagcgttatcactctcattaatggcggcgagagtgcccctactacactgacacaacaaacggctgtacctcctcccactgacctgcgattcaccaacataggtccagacaccatgcgtgtcacctgggctccacccccatccattgatttaaccaacttcctggtgcgtcactcacctgtgaaaaatgaggaagatgttgcagagttgtcaatttctccttcagcacaatgcagtggtcttaacaaatctcctgcctggtacagaatatgtagtgagtgtctccagtgtctacgaacaacatgagagcacacctcttagaggaagacagaacacaggtcttgattccccaactggca

SEQ ID NO: 14967 - DNA, 1276 bp, Homo Sapiens
ccggtgagaggtccaagatagagagagcgctgtacagcatggaaggtggcgttccaccccctggtgcagtctcaccagtggggcctgccggctggattaccgcagacccgagaacaggagcttctacctggccctctacaagcagatgagcttcctggagaagcgaggctgcccgcgcacggcgctggagtactgcaagctcatcctgagtctcgagccggatgaggaccccctctgcatgctgctgctcatcgaccacctggccttgcgggcccggaactacgagtacctgatccgcctcttccaggagtgggaggctcatcggaacctgtcccagctccctaattttgccttctctgttccactggcgtatttcctgctgagccagcagacagacctccctgagtgtgagcagagctctgccaggcagaaggcctctctcctgatacagcaggcgctcaccatgttccctggagtcctcctgcccctgctcgagtcttgcagtgtgcggcccgacgccagcgtttccagtcaccgcttctttggacccaatgctgaaataagccagccccctgccctgagccagctggtgaacctgtaccttgggaggtcacactttctctggaaagagcccgccaccatgagctggctggaggagaacgtccactgaggttctgcaagcagtggacgccggggaccgcagccgtgacagcctgtgagaaccggcggaaggtgctctaccagcgtgcacccaggaatatccaccgccatgtgatcctctctgagatcaaggaagccgtcgctgccctgcccccggacgtgaccacgcagtctgtgatggggtttgatcctctgcctccttcggacacaatctactcctacgtcaggccagagaggctaagtcctatcagccatggaaacaccattgctctcttcttccggtcactgttgccaaactataccatggagggggagaggcccgaggaaggagtggctgggggtctgaaccgcaaccagggcctgaacaggctgatgctggctgtgcgcgacatgatggccaacttccacctcaacgacctggaggcgccgcacgaggacgacgctgagggggagggggagtgggactgagcgtccgcagaggtgaccgaaaagccgtatgatgatgttcccgatttctctgttggtcggagtcggccagttgcctgaagtagggaagctgagtgtgtcgctccctggtccactgtttctcctataaatgtaaatgggtcacgctcaa

SEQ ID NO: 14968 - DNA, 3349 bp, Homo Sapiens
gggccggggcagccgggaagcgggtggggtggtgtgttacccagtagctcctgggacatcgctcgggtacgctccacgccgtcgcagccactgctgtggtcgccggtcggccgaggggccgcgatactggttgcccgcggtgtaagcagaattcgacgtgtatcgctgccgtcaagatggaggggcctttgtccgtgttcggtgaccgcagcactggggaaacgatccgctcccaaaacgttatggctgcagcttcgattgccaatattgtaaaaagttctcttggtccagttggcttggataaaatgttggtggatgatattggtgatgtaaccattactaacgatggtgcaaccatcctgaagttactggaggtagaacatcctgcagctaaagttctttgtgagctggctgatctgcaagacaaagaagttggagatggaactacttcagtggttattattgcagcagaactcctaaaaaatgcagatgaattagtcaaacagaaaattcatcccacatcagttattagtggctatcgacttgcttgcaaggaagcagtgcgttatatcaatgaaaacctaattgttaacacagatgaactgggaagagattgcctgattaatgctgctaagacatccatgtcttccaaaatcattgggaataaatggtgatttctttgctaacatggtagtagatgctgtacttgctattaaatacacagacataagaggccagccacgctatccagtcaactctggttaatattttgaaagccccatggggagaagtcaaatggagagtatgctcatcagtggctatgcactcaactgtgtggtgggatcccagggcatgcccaagagaatcgtaaatgcaaaaattgcttgccttgacttcagcctgcaaaaaacaaaaatgaagcttggtgtacaggtggtcattacagaccctgaaaaactggaccaaattagacagagagaatcagatatcaccaaggagagaattcagaagatcctggcaactggtgccaatgttattctaaccactggtggaattgatgatatgtgtctgaagtattttgtggaggctggtgctatggcagttagaagagttttaaaaagggaccttaaacgcattgccaaagcttctggagcaactattctgtcaaccctggccaatttggaaggtgaagaaacttttgaagctgcaatgttgggacaggcagaagaagtggtacaggagagaatttgtgatgatgagctgatcttaatcaaaaatactaaggctcgtacgtctgcatcgattatcttacgtggggcaaatgatttcatgtgtgatgagatggagcgctctttacatgatgcactttgtgtagtgaagagagttttggagtcaaaatctgtggttcccggtgggggtgctgtagaagcagccctttccatataccttgaaaactatgcaaccagcatggggtctcgggaacagcttgcgattgcagagtttgcaagatcacttcttgttattcccaatacactagcagttaatgctgcccaggactccacagatctggttgcaaaattaagagcttttcataatgaggcccaggttaacccagaacgtaaaaatctaaaatggattggtcttgatttgagcaatggtaaacctcgagacaacaaacaagcaggggtgtttgaaccaaccatagttaaagttaagagtttgaaatttgcaacagaagctgcaatcaccattcttcgaattgatgatcttattaaattacatccagaaagtaaagatgataaacatggaagttatgaagatgctgttcactctggagcccttaatgattgatctgatgttccttttatttataacaatgttaaatgcaattgtcttgtaccttgagttgagtattacacattaaagtaaagtacaagctgtaaacttgggtttttgtgatgtaggaaatggtttccatctgtactttggtcctctgatttcacatattgcaacctagtactttattagtttaaaaagaaattgaggttgttcaaagtttaagcaattcattctctctgaacacacattgctattcccatcccacccccaatgcacagggctgcaacaccacgacttctgcccattctctccagtgtgtgtaacagggtcacaagaattcgacagccagatgctccaagagggtggcccaaggctatagcccctccttcaatattgaccttctctgggtttaatccaagttctttaactattgcagcagagacagctgcaaaggcttcattgatttcaaatatgtcaacatcttccagtgaccaacctgcttttgtaacagcttgctttatggctggaattggtcctattcccataatggaaggcttcacacccacttgggaccaggaaactatccgtgctaaaggtgtaagtccacgtttatcagcttctgacttcttcataagaacgacagctgcagcaccatcatttattcctgaattattggctggggtgactgttcccgttccatcagtaagaaagtaaggcttttagcttggaccatggcttctatgttgctcccatggcgaggaaactcatctgttttaacttcaataagaccttttctagttgacaccaaaactggtacaatctctttgtcaaaatggccagctttctgtgcattctctgtcctgttctgggacagaactgcaaccttgtcctgatcttctctactcacttgccattttttggctacattttcagctgtaatacccatatgacagttgtgaaatgcatctgtaagaccatcacagagtatactgtcagtcagtggcatctcacctatctttactcctgttctcaagtaagccaagtgaggagccttgctcatattttccatgcctcctgcaaccacaatgctggagtctcctatccctattgactggactgcaaggcacacagcttttaggcctgacccacagatcatctggcagctccatgctggaacagagtagggaattcctgcacccacactggcttgtctaacaggattctgcccacagcctgctgccaagacatgtccaaagatgacctcagacacatcttccggagccacagtggccctcttcaagacttctttgatgacagtggagcccaggtcctggacaggaacagcagctaaggcaccattgaaggaacctatgatggtccgcgccgccgagacgatgaccacaggatctgagcctgcattcatcttgcttctcctgccgccgtctgccctgcgctgcctgcaagctaggcaaagctcctcctcgcagcccacaggcctgccgcgggcccc

SEQ ID NO: 14969 - DNA, 808 bp, Homo Sapiens
  misc_feature (592)..(592): n is a, c, g, or t
ttaacagtcatgggtcggtgtcccgtaggctggtaatgactggcaagccatgaactgatagtgcatcagccgacccagataatttaaaatattcttcatccagagatagaggtggttcttcctcttatggactgcaaccttcaaattcagctgtggtgtctcggcaaaggcacgatgataccagagtccacgctgacatacagaatgacgaaaagggtggctacagtgtcaatggaggatctggggaaaatacttatggtcggaagtcgttggggcaagagctgagggttaacaatgtgaccagccctgagttcaccagtgttcagcatggcagtcgtgctttagccaccaaagacatgaggaaatcacaggagagatcgatgtcttattctgatgagtctcgactgtcaaatcttcttcggaggaatcaacccgggaagacgacagagaccgaagattggccactgtaaagcagttgaaagaatttattcagcaaccagaaaataagctggtactagttaaaacaaattggataaatatcttggctgctgtacatgacgtgcttaatgaaagtagcaaattgcttcaggantttgagacaggagggagcttgctgtcttggccttctttgtgcttctctgagctatgaggctgaaaagatcttcaagtggagttttagcaaatttagctcatctgccaaagatgaagtttaagtcctctacttatgtgcacctacaaaggactagagactggtgggggaaaggaaagccttttcatctgtaatgcagctggtaatgaccagcctgcg

SEQ ID NO: 14970 - DNA, 335 bp, Homo Sapiens
gctcagaggatccccatcaaccctaaatttattatgtaaatgcctttatttgaactactacatgctaccagattacatcacttttcagagttagagtaacataataccttggaaactatagcaaacagctgacaaagcaagagtacattaattcctacatatatacttttatttttagtgaccacatttctttgtttcaggtgtaaaattaaaaaatatattgtacacttagcatacttggcctaccaaatcccgtctaagttctgagcacactctctcctcaaaagtatcatattcaacagcataataaatttagggttgatggggaacctcta

SEQ ID NO: 14971 - DNA, 552 bp, Homo Sapiens
gagggctggaagctgcagctggaggctgaaaactagagggccacaccaacttccacgtgcccgtaatcacaaaagatgtggagatggtccggctgctccgagatgctgaagctgaccttgacaaacgagagcccacgtcgggccggagcccccttcatttggcagtggaggcccaggcagccgatgtgctggagcttctcctgagggcaggcgcgaaccctgctgcccgcatgtacggtggccgcaccccactcggcagtgccatgctccggcccaaccccatcctcgcccgcctcctccgtgcacacggagcccctgagcccgagggcgaggacgagaaatccggcccctgcagcagcagtagcgacagcgacagcggagacgagggcgatgaatacgacgacattgtggttcacagcagccgcagccaaacccggctgcctcccaccccagcctcaaaacctcttcctgacgacccccgccccgtgtgatttgtttcattgttaatataatttccagtttaataaacaaaaccctagttctgacaaccag

SEQ ID NO: 14972 - DNA, 1860 bp, Homo Sapiens
  misc_feature (1330)..(1353): n is a, c, g, or t
ggaggccctccaacctctgatgacatttttgaaagggaatataagtatggtgcacacaactaccatcctttacctgtagccctggagagaggaaaaggtatttacttatgggatgtagaaggcagaaaatattttgacttcctgagttcttacagtggtgtcaaccaagggcattgtcaccccaagattgtgaatgctctgaagagtcaagtggacaaattgaccttaacatctagagctttctataataacgtacttggtgaatatgaggagtatattactaaacttttcaactaccacaaagttcttcctatgaatacaggagtggaggctggagagactgcctgtaaactagctcgtaagtggggctataccgtgaagggcattcagaaatacaaagcaaagattgtttttgcagctgggaacttctggggtaggacgttgtctgctatctccagttccacagacccaaccagttacgatggttttggaccatttatgccgggattcgacatcattccctataatgatctgcccgcactggagcgtgctcttcaggatccaaatgtggctgcgttcatggtagaaccaattcagggtgaagcaggcgttgttgttccggatccaggttacctaatgggagtgcgagagctctgcaccaggcaccaggttctctttattgctgatgaaatacagacaggattggccagaactggtagatggctggctgttgattatgaaaatgtcagacctgatatagtcctccttggaaaggccctttctgggggcttataccctgtgtctgcagtgctgtgtgatgatgacatcatgctgaccattaagccagggggagcatgggtccacatacggtggcaatccactaggctgccgagtggccatcgcagcccttgaggttttagaagaagaaaaccttgctgaaaatgcagacaaattgggcattatcttgagaaatgaactcatgaagctaccttctgatgttgtaactgccgtaagaggaaaaggattattaaatgctattgtcattaaagaaaccaaagattgggatgcttggaaggtgtgtctacgacttcgagataatggacttctggccaagccaacccatggcgacattatcaggtttgcgcctccgctggtgatcaaggaggatgagcttcgagagtccattgaaattattaacaagaccatcttgtctttctgagggtagccagctgttttcagtggtccctgggagccagctggagacaggtggtcctgtaaaagctttattcctaatgtgggcacattccactcccatgagtcttcaaaaacnnnnnnnnnnnnnnnnnnnnnnnncagttgatacataatagaacaacgtttatgaacctgccgtttgctttgtaacgtaactaaataatgtaatggcatctatattcagttgaagtgttttgatgtgcatgtgtacttcctaaggtgaaatgcatctatatacagacagcctctaaatcaagtccttcagtataattgatatatgtttttataatttcctcactggtataagtgtttcatatttgaaaaagttatctctgggtattgcataaaaggcttcatcttataaagtgaaatcattgttattgaattttaggaaggattaatggttaagtgtatataaaatactaatattaagtaaacttcatattggccaacaccagggttgtattctatggatgtcattattttgaattaagaattagtgtttaacattcctaaattgttttgagtgcttgattataatttgtaaaaaatgtttattttcaatacttctttaaatttaaaataaagcttatatttcaaatgtca

SEQ ID NO: 14973 - DNA, 946 bp, Homo Sapiens
  misc_feature (625)..(667): n is a, c, g, or t
  misc_feature (786)..(786): n is a, c, g, or t
ggactggaaggcggggctaatccagatgctaaggaccattatgaggctacagcaatgcaccgggcagcagccaaggacacttagcctgtgatgaggagagagtggaagaagcaaaactgctggtgtcccaaggagcaagtatttacattgagaataaagaagaaaagacacccctgcaagtggccaaaggtggcctgggtttaatactcaagagaatggtggaaggttaaacagcttggatttattcttactttgtatgttgtgttgctgtccccagtgtcctacaaactaatgtatttgcgcacaagacatcatctatgaatgatgaagtcctctcaccttcagagccttagaaaaatgcccactcttgctcctgctcgcgccactcgctcaaacctcccgctccagttcctccccccggtcccttacgcggccaccattcctccccggcattgtgtcctcatacacataccacaggttcttaccgcctcgttttccccgtccccttcccgcttgccttgtcgccccccgtttttccctcttcctacacccccctttcccgcccctgttctacgtcgcacctgaccttctgtcccccagacatgggccccgtcggttccgcacnnnnnnnnnnnnnnnnnnnnnnnnnnnnnnnnnnnnnnnnnnntgttgccacgtaccaccactttttagcagagaacaacgcccctgcttgaaccccactccacaacgtcccacccttcgaacctatcgcctgaacacttccatcagcccctctttatcccnccgtgtctccggcgcgctgttccccccagtagtttcatgtatcacctcacccttcccggtcgcacccccgcgatcatttaatttagagccactacgccactcaccgttcgctccagactcgctttctccctgcgactgtggtcaagcagtcccttgttcg

SEQ ID NO: 14974 - DNA, 394 bp, Homo Sapiens
cctagttttagaagtttcaatagcagaaatcatgctccatagcctaagatgaaaacatgtgaaagtcaaagggttgacaccacctgaggagggtctaccctgggtgctggaagggcattgtgttttatcatctttcttcggggcactgtgcaagtctcactcttctagagctaaagaaagccatttccttcctctcatgctggcaatgtggcttttactctaatagggaatccagggtccctttgggtatggggcttgtagagaggggcctgcagtgattgcactgtgttgcaaatgcctggttactttgccacctcccttttgggccattgtgtgtaaaggcaggtgctggctgtgtgtccatcacagtgctattgaaacttctaaaactagg

SEQ ID NO: 14975 - DNA, 545 bp, Homo Sapiens
  misc_feature (22)..(22): n is a, c, g, or t
tggtgtaggggtgaggatgaanagagtgtaagcacatgttctgggtgctctgggaatgtacttggcaaacagaagctgcttaataaataccaacgtaaaatcaaaaggctttctggaagatgtgccttctactgctcagcatagctgccccctgcaggccttacctggctggggcgcgctgtacagatcttcctgcaggaagggcatggaactgaccacagagggggctcgggcagggtacacaaactctgtggctgcaaaatccccagaggagctgctgaggatgaacaggcggggcgcgaagttaaaacttccaggatctttgaaagaaaagagaacaaagctgaagatatcatgtgcatcaaagtaaattccagatgaagaatgaacgtaaaatatgaaataattcaaagcactgtggaaacacaggtaggatttatctgagcttcaaggtggagaaagccttttcaagtgcaatagtaaaagaaccaatcaaaagggaaaataatgcattaattatataaaaatgaaaaacaatgaaaaat

SEQ ID NO: 14976 - DNA, 949 bp, Homo Sapiens
gggactgcgaagcccagctgcgcgcgccttgggattgactgtccacgctcgcccggctcgtccgacgcgccctccgccagccgacagacacagccgcacgcactgccgtgttctccctgcggctcggacacatagtatgaccattaggtgtttcgtctcccacccattttctatggaaaaccaaggggatcgggccatgatagccactggcagctttgaagaacgggacacctttagagaagcttgatcttggaggcctcaccgtgagaccttacaaagccggattccggcagagttcctctatctcgtcttgttgctgattaaaggtgcccctgtctccagtttttctccatctcctgggacgtagcaggaaatcagcatcatggttgggttcaaggccacagatgtgccccctactgccactgtgaagtttcttggggctggcacagctgcctgcatcgcagatctcatcacctttcctctggatactgctaaagtccggttacagatccaaggagaaagtcaggggccagtgcgcgctacagtcagcgcccagtaccgcggtgtgatgggcaccattctgaccatggtgcgtactgagggcccccgaagcctctacaatgggctggttgccggcctgcagcgccaaatgagctttgcctctgtccgcatcggcctgtatgattctgtcaaacagttctacaccaagggctctgagcatgccagcattgggaagccgcctcctagcaggcagcaccacaggtgacctggctgtggctgtggcccagcccacggatgtggtaaaggtccgattccaagctcaggcccgggctggaggtggtcggagataccaaagcaccgtcccttggaaagttcagccagaatcttcgtcctgcccccgacagcccagcctagcccacttgtcatccataaagcaagctcaaccttg

SEQ ID NO: 14977 - DNA, 588 bp, Homo Sapiens
gggggagtagcaagtccgcggtaagcgctgacgcatgcgcatagctaaccgcacccggttcagctcgcctttcttggccagaggcgccggttggactcacgggcggggcatgatggtggtgggtacgggcacctcgctggcgctctcctccctcctgtccctgctgctctttgctgggatgcagatgtacagccgtcagctggcctccaccgagtggctcaccatccagggcggcctgcttggttcgggtctcttcgtgttctcgctcactgccttcaataatctggagaatcttgtctttggcaaaggattccaagcaaagatcttccctgagattctcctgtgcctcctgttggctctctttgcatctggcctcatccaccgagtctgtgtcaccacctgcttcatcttctccatggttggtctgtactacatcaacaagatctcctccaccctgtaccaggcagcagctccagtcctcacaccagccaaggtcacaggcaagagcaagaagagaaactgaccctgaatgttcaataaagttgattctttgtaaaaaaggaggaaactccaggaactccaacatgt

SEQ ID NO: 14978 - DNA, 871 bp, Homo Sapiens
ggggttcttgttctgcaggtctcgcgtctgccaggagctacggccggaagatggcggcggccgcagagttgtcgctactggagaagtccctgggactgagtaaggggaataaatacagtgctcagggcgagcgacagattccagttcttcagacaaacaatggtccaagtctaacaggattgactactatagcagctcatctagtcaagcaagccaacaaagaatatttgctggggagtactgcagaagaaaaagcaatcgttcagcagtggttagaatacagggtcactcaagtagatgggcactccagtaaaaatgacatccacacactgttgaaggatcttaattcatatcttgaagataaagtctaccttacagggtataactttacattagcagatatactattgtactatggacttcatcgctttatagttgacctgacagttcaagaaaaggagaaatatcttaatgtgtctcgctggttttgtcacattcagcattatccaggcatcaggcaacatctgtctagtgttgtcttcatcaagaacagactatatactaattcccactagaagctgtccatgccatacagaagatctattaaaaatgttttaaatggaaaatgtactctagaccacaggactaatgtaaattaatatacagtcattcattatttgttgaagttgatagaatttttgaagtgtaaacttgtgtctgaatgttttatttgttctttacctgaagttttggcaatttttatgtcaaaattcaatttgctattaaacaagttgagatccagttataaattaaccttgtttttagtagatgacatttatttcaataaaagttgcaaatcgggcttaatcta

SEQ ID NO: 14979 - DNA, 1296 bp, Homo Sapiens
  misc_feature (554)..(572): n is a, c, g, or t
  misc_feature (963)..(985): n is a, c, g, or t
ccggaattcccgggatgcccggtgccaagcgcagctagctcagcaggcggcagcggcggcctgagcttcagggcagccagctccctcccggtctcgccttccctcgcggtcagcatgaaagccttcagtcccgtgaggtccgttaggaaaaacagcctgtcggaccacagcctgggcatctcccggagcaaaacccctgtggacgacccgatgagcctgctatacaacatgaacgactgctactccaagctcaaggagctggtgcccagcatcccccagaacaagaaggtgagcaagatggaaatcctgcagcacgtcatcgactacatcttggacctgcagatcgccctggactcgcatcccactattgtcagcctgcatcaccagagacccgggcagaaccaggcgtccaggacgccgctgaccaccctcaacacggatatcagcatcctgtccttgcaggcttctgaattcccttctgagttaatgtcaaatgacagcaaagcactgtgtggctgaataagcggtgttcatgatttcttttattctttgcnnnnnnnnnnnnnnnnnnnattcacggaatcttttaagtgctgaacttatttttcaaccatttcacaaggaggacaagttgaatggacctttttaaacaagaaaaaaccatggaaggaaaactaagaatgatcatcttcccagggtgttctcttacttggactgtgatattcgttatttatgaaaaagacttttaaatgccctttctgcagttggaaggttttctttatatactattcccaccatggggagcgaaaacgttaaaatcacaaggaattgcccaatctaagcagactttgccttttttcaaaggtggagcgtgaataccagaaggatccagtattcagtcacttaaatgaagtcttttggtcagaaattacctttttgacacaagcctactgaatgctgtgnnnnnnnnnnnnnnnnnnnnnnnctatttgagtgaaaccttgtgaactctttaattagagttttcttgtatagtggcagagatgtctatttctgcattcaaaagtgtaatgatgtacttattcatgctaaactttttataaaagtttagttgtaaacttaacccttttatacaaaataaatcaagtgtgtttattgaatggtgattgcctgctttatttcagaggaccagtgctttgatttttattatgctatgttataactgaacccaaataaatacaagttcaaatttatgtagactgtataagattataataaaacatgtaaaaagtcaaa

SEQ ID NO: 14980 - DNA, 460 bp, Homo Sapiens
gagatcagcccagggccgtggccagagaggggctcgccagagaaggaggacacctcggcccctgaccagtgcccgagcaaaggcggccaatgtccaggagccggagaagaagaagaaacgcagggagtgatgtggccgggccaaggacaggcagggagggaggccaggcctcgcttgcaccgcgggacgaggctgaccgggctgttctgtagactcaggaccgtggctccagaactcctgtgccaggcgggagggaagggcggcactggagagatgggcccatcattaggggccagcatcccaggaactggacctttccccagagcctccccctgtggctgtgatgaccttgggccagaaggtcaaactccgaagactgaaactctgcctgcagcaggactggccgcccctgctgtggggggttcagaaaataaaatgccgcgcagcccttgcaaaaaaa

SEQ ID NO: 14981 - DNA, 1431 bp, Homo Sapiens
  misc_feature (1107)..(1119): n is a, c, g, or t
  misc_feature (1335)..(1368): n is a, c, g, or t
ggggagtcacgcgcgccggacgccacccgacaggaggggaaacggggcagctctcaaaaccctggaggcgcagaccgtccacacgagacagggacgcccgctcggctccgctccgcgctgatcctcaaggtctcgcggtttccccgccgcccacccggacgccgacgaaagccagcgagctcctcagcctcaggcatctgcatctgggaccgacctcctgggctggctgatcaaagaggaagcagcagcaatgtctgctgtggggactgcaactccatacctgcatcatcctggtgatagtcacagtggccgagtgagtttcttgggggcccagcttcctccagaggtggcagcaatggcccggctactaggggacctagacaggagcacgttcagaaagttgctgaagtttgtggtcagcagcctgcagggggaggactgccgagaggctgtgcagcgtcttggggtcagcgccaacctgccggaggagcagctgggtgccctgctggcaggcatgcacacactgctccagcaggccctccgtctgccccccaccagcctgaagcctgacaccttcagggaccagctccaggagctctgcatcccccaagacctggtcggggacttggccagcgtggtatttgggagccagcggcccctccttgattctgtggcccagcagcagggggcctggctgccgcatgttgctgactttcgggggcgggtggatgtagcaatctccaccagtgccctggctcgctccctgcagccgagcgtcctgatgcagctgaagctttcagatgggtcagcatacccgctttgaggtccccacagccaagttccaggagctgcggtacagcgtggccctggtccctaaaggagatggcagatctgggagaaaaaggtgtggaccgcaaactgcaggactggacccctcactttgaccagtcccattcagatccggcttggacaggcacctgagatggtgccaaagtgcagctgactcttcccacgacagccctgcccttcccatgaggcaggctcttcagtgagtgtttgaacgtaattatgtagttttctgtttaattgaaaaagagagctatgccnnnnnnnnnnnnnggaagtaaagcagctaaaaacatgtttctctaggtgagtgttggacctcacaccctccccttccctgtacatttgtctttggtgctggacgtggccatgtgaggccaggttgaggccctttgtagacaacatacagttgctcagcctggccccatgtagccaggtgcttttgtagatcttgtgttttaggttgggcattttcactcttctgccttnnnnnnnnnnnnnnnnnnnnnnnnnnnnnnnnnncggctgaggggaggggaaacattgtaaaataaatcataaaaattaactggaataactcatcaa

SEQ ID NO: 14982 - DNA, 1528 bp, Homo Sapiens
gcggcccgtgtgcaatgtgagtaattgggcgtttctctctgtgcggctagtgtgactcggaatgcaagcgatcgctcgatctttcgcgcggatatttatgggtttggaagaataagggcccacagtgcctttccaggggggaaacctcgaaaattacttccttctaactgagggaattcctctgaacttcgtggtagggacccgccaggttaacctggtaaggcagcattttctttcccacagggtagttttctggtactggaaggttacttgtttccattttccaaaatccttgtaaagattccctttaaaatggataagaaatgaattccaagttccaaaaaggccccactaagtaatacacggtgcaggatgtcattaaggcaacagtctcaccaagtccatgcacagggctcggatctcaccattcccctccccttgccctccaagactgcttagttctgcttactactccttctcctcaacgacagcttccagcatccagaagtgaacttgagcagccttcagcctcacaagttgggggtggcccaattaaggaacttcatggcaacttcaaagccaaggaaacaggccgcattggctgggaaggctcggatcatcactgcattgaaccctttgtacaaggatgtgactccttcatcccggatcagctccctcagcacatctctgaaaccattaggatatttcccaggaggtgcagtctggaatcgagacttgagcacatctggggggattgccacagcccagttgaagatccctgcaatgcccccagccaccaagatccgaggggcactgagctcactgaccctctttcctccggagtgaagagtatttgtcagccattcatatgtcatgaaatacattccactagtctgggacatctcgcataagggtaagcacagtcccattgtagatgcctcggatcccaaactcctggtacaagcttctttgcacagtccaaggtaccaggtgtacttgctttctccttgaagaagcctgaatctgtaataagcactgcgatccgttctccaggagtcatgattcctgtggtgaatacgccagataacatcccagctgcaaaaagctggggatagctgagcacatcttctgggtgtttctgttgtagtttcttccccaaaccaaacccaaagaagcacacggcaaacatgggagtgaccccgatgataggggcagccattccccgatatagccaccgtgatgccctctctaataaagagtcttccggaaacagtcaaaggtcccagagtacatgggaggttgtccaggcaaactcggtggctgtgtctgcagtcggaccttgaccgtgtccagagggtgaccgacgaacaccaggcacacgccgccaaagccgccggccagcaggttcattgagcgggactgatgggttttggctggtcggaccatggtcagtccgtctgtcactccgtctgtcagttctcggccgtcatggcttctcagccccagctgcagtgccggcgccgccgac

SEQ ID NO: 14983 - DNA, 1387 bp, Homo Sapiens
  misc_feature (1098)..(1098): n is a, c, g, or t
  misc_feature (1254)..(1262): n is a, c, g, or t
ggcttagccgccaccgcgcgcttcggaaggccagagggagggggaggcctgtcagtctcgcgcgttgcctgggcgaagggggcggagctttggcgtggggcggccaatagtgggggtggctgcgtgggtcgccatggggacggggctgttcccggggaggctgtgatgggttgacaggtgcgtgacagtgggagctgctctcggcacaagcatgtacggcaaaggcaagagtaacagcagcgccgtcccgtccgacagccaggcccgggagaagttagcactctacgtatatgaatatctgctccatgtaggagctcagaaatcagctcaaacatttttatcagagataagatgggaaaaaaacatcacattgggggaaccaccaggattcttacattcttggtggtgtgtattttgggatctctactgtgcagctccagagagacgtgaaacatgtgaacactcaagtgaagcaaaagccttccatgattacagtgctgcagcagctcccagtccagtgctaggaaacattcccccaggagatggcatgccagtaggtcctgtaccaccagggttctttcagccttttatgtcacctcggtaccctggaggtccaaggcccccattgaggatacctaatcaggcacttggaggtgtcccaggaagtcagccattactccccagtggaatggatccaactcgacaacaaggacatccaaatatgggtgggccaatgcagagaatgactcctccaagaggaatggtgcccttaggaccacagaactatggaggtgcaatgagacccccactgaatgctttaggtggccctggaatgcctggaatgaacatgggtccaggtggtggtagaccttggccaaacccaacaaatgccaattcaataccatactcctcagcatctcctgggaattatgtaggtcctccaggaggtggagggccaccaggaacacccatcatgcctagtccagcagattcaaaccacctctggtgataacatgtatactttaatgaatgcagtacctccctggacctaacagacctaattttccaatgggtcctggggtcagatggtcccatggngtggattaggaggaaatggagtcccatcacatggaatggctcctttgggctcagggagataatggacaagtattttccaagaaatccctcccattaatattgagccctggagtaattcacccggggcacttcccaggggaatgatgggcgcaaatnnnnnnnnnaaaattcctttaaaatccttttttcccaaaggaagaggtttacctcccctctaaaccttgcaacaagtgaagcgcggggggaatcccacttttaacaagaggccctcccctctttggaaaaaaat

SEQ ID NO: 14984 - DNA, 416 bp, Homo Sapiens
  misc_feature (130)..(130): n is a, c, g, or t
  misc_feature (362)..(362): n is a, c, g, or t
ttaatgaggaacgtcactgggatgaggaacgtcactgggatgaggaacgtcactgggatgaggaacgtcactcaagctagtgagcacaatgaaggcaagtgggactttgccttctcatgccaaagtcagncgaaaacttgaaagccatttgatgtcccctgctgagattccaggccagcctgtccctaagaacatcctgcaggaacttctgggtcaaaccagttcagagacctgcttcttccaatcttctgagtagccttatggggagcttggagcctacaacatctttactggccaaagaccaccctctcctcccttgtcacagtgtttcatactcgagcaccctcagctactaccttccncaagatacatcacaatgttcacaccagaccacatcatcacaggatcctctagat

SEQ ID NO: 14985 - DNA, 1000 bp, Homo Sapiens
  misc_feature (97)..(149): n is a, c, g, or t
  misc_feature (304)..(305): n is a, c, g, or t
  misc_feature (635)..(778): n is a, c, g, or t
  misc_feature (789)..(831): n is a, c, g, or t
  misc_feature (888)..(915): n is a, c, g, or t
  misc_feature (936)..(948): n is a, c, g, or t
gggctctaaggtcgcccgggtcccaccgccgccaccatgcctcggggaagccgcagcgcggcctcccggccagccagccgcccagccgcgccctctnnnnnnnnnnnnnnnnnnnnnnnnnnnnnnnnnnnnnnnnnnnnnnnnnnnnnttcgggccagccggggctcatggctcagatggcgaccacggccgcaggggtagccgtgggctcggctgtgggacacgtcatgggcagcgccctgaccggagccttcagcggggggagctcggagccctcccagcctgctgtccagcaggcccccnnacccccgctgccccccagcccctgcagatggggccctgcgcctatgagatcaggcagttcctggactgttccaccactcagagtgacctgtccctgtgtgagggcttcagcgaggccctgaagcagtgcaagtactaccatggtctgagctccctgccctgaagaggtcggtgcagactcgggggccagtcctgcacccacctctacccctcgccgacagccagaccacaacaccagattgtacccagatagctgggattggaagtgaggaggtttctcaccccacagataacccaagacacaaatgtgcaattaaaagtttattttagnnnnnnnnnnnnnnnnnnnnnnnnnnnnnnnnnnnnnnnnnnnnnnnnnnnnnnnnnnnnnnnnnnnnnnnnnnnnnnnnnnnnnnnnnnnnnnnnnnnnnnnnnnnnnnnnnnnnnnnnnnnnnnnnnnnnnnnnnnnnnnnnaatgtgggggnnnnnnnnnnnnnnnnnnnnnnnnnnnnnnnnnnnnnnnnnnngggggcgcggggccccaaaaggaaaaggaaaaaatggggcaatatttgttttccccnnnnnnnnnnnnnnnnnnnnnnnnnnnngggtttgggattccccccccnnnnnnnnnnnnnccccccccggcggggaaacacggagggtttttttaaacaaaaatccccccaa

SEQ ID NO: 14986 - DNA, 1412 bp, Homo Sapiens
  misc_feature (688)..(778): n is a, c, g, or t
  misc_feature (1396)..(1396): n is a, c, g, or t
aggagttgtccttgcctctgtgctgtgtgtgacgtgaccggacttttctgcaaacaccaacatgttgggaaacttggctcgaatctctgtgccttcgtctttcccatggggagggattctggttccagggtccctctgtgtatttgcttttttgttttggctgaaattctcctggaggtcggtaggttcagccaaggttttataaggctgatgtcaatttctgtgttgccaagctccaagccccatcttctaaatggcaaaggaaggtggatggccccagcacagcttgacctgaggctgtggtcacagcggaggtgtggagccgaggcctaccccgcagacaccttggacatcctcctcccacccggctgcagaggccagaggcccccagcccagggctcctgcacttacttgcttatttgacaacgtttcagcgactccgttggccactccgagaggtgggccagtctgtggatcagagatgcaccaccaagccaagggaacctgtgtccggtattcgatactgcgactttctgcctggagtgtatgactgcacatgactcgggggtggggaaaggggtcggctgaccatgctcatctgctggtccgtgggacggtgcccaagccagaggctgggttcatttgtgtaacgacaataaacggtacttgtcatttcgggcaacggcannnnnnnnnnnnnnnnnnnnnnnnnnnnnnnnnnnnnnnnnnnnnnnnnnnnnnnnnnnnnnnnnnnnnnnnnnnnnnnnnnnnnnnnnnnccaaccacacctccccccacaaacccaccatagccctccacctgtctcctccgcggcgcccatcggcgcttcgttgaatgcttcggactacaaaaccccgctaaacatcgctaccaaggcccccaaccccgccaacttcccaaaccctcacctccacagacctgctccctccccgacacgcaacctttggctgtgagaatatatacgacatatttgaaacaccccctcccgccgcggagaatgactccacaaccgaatacccacacaccagtgatgcaacccgcccaataccctcggggaatcggcgcgccgaccaccacatcctcacagctcacgcctgtgacacaccactcgcgcaccgaggtctcctcctccaccgcctgctccgctcgctccggaacagtctggtgatccacctcactcaacacgttctccaccacagaacgtccacataatcctcagacgtagccaaaatatatttgatacccccttctccaccactcggcgtccgcgccacacacacggtggaagttctctctctccacaccaactctcctgcgctccactactgagatatcacatgcactcgtcgcgacgatcacgcgcgcaactctcaanacgcaacctgatgatt

SEQ ID NO: 14987 - DNA, 1059 bp, Homo Sapiens
ggggcctgggccgcccgtcgtacctgatggtaggaggcagtagttccccgcttcccttccgcgggagggagagttagctagccatccaagaaaacaccatgaaagataacgatatcaagagactactgtatacccatcttttatgcatattttcaattatcctaagtgtcttcattccatcactcttcttggaggaacttcacaatattgaaaacacacttgacaatggttgtgcatctggtctgggttttgtaactgctgtcaatctagtactatatttagtagtgaaaccaaatacatcctctaaaagaagttcattatcacacaaggtaactgggatttttgaaatgctgtatctactttcttatgtcttgtttctcctttcatgtaatttttgttctgtatggagcaccactgatagagttggcattggaaacatttttatttgcagttattttgtctacttttactactgtgccttgcttatgtttgttaggaccaaacctcaaagcatggctaagagtgttcagtagaaatggagttacatccatatgggagaatagtctccagatcactacaatttctagctttgtaggagcatgccttggagcacttcctattccactggattgggaaagaccatggcagatgacagtagaaagaaaacgtagcactaatagatctctccatgtaccctgcagggggcttggtactgggaaatgagtaacttaatcctgacaaccgtagtgcaaggtatggcccatctcctgtacgcttggagcgacctttggctacgtggctggccttgttatttcaccactctggatatactggaatagaaagcaacttacatacaagaacaattaactggagcaaagggagatatttctttgtgcagattctgtaagggctgggcagaaatgtgtatggtcaaagccaagcagttccatttacagctctgttttttacgtagttacaacatgatgtgattgtagctttttaaactatgaaacccctgagagattgtaccttctagttgaaataaagtatttataatag

SEQ ID NO: 14988 - DNA, 989 bp, Homo Sapiens
tctggtgccagtactatacccgctcctattgtagcgaggctgggtggcgaattcggcacgaggggaagagcagtgtcgtggccatggccaggccgcgcaggctggagctggccgaggccctggcgctgtggccaggctagaggcatgcctgctatgcgctcctgcacgcgccggaccctggaattctctctggccgcctccctctgcgctacgccgatactggtgaggagggcgcgcgcccggccactctccgttctggccttgcgaccttccttgcggcgctactctcgggtgtccctgccaatcccagcttcctcctctctcagatgcagatgcgctttgatgggcgcctgggcttccctggcaggattcgtggactacgcaagacagcagcctggaggacgggctgaaccgtggtctgctggaactgctgggcgaggcggcggccgctaccgcgtggagcgccctgactaccgcagctctcacgccggatcaaggccacgtgttgtggcccacttctatgccaaatctctgacgctcgagcagctgttggctgtggaggccagcgcaacaggggccaaggaccacgggctggaggtgctgggcctggtgtgagtgcccctgtaccctgcatgatggtgtgggaggcctgcccatctttctggagaattgctttattggtgctgcctgggagcagttactggataccctccaggacttgggagtggtggaagctggtgctttctcaggacttcagatcccagttcgtctgaggcaaccctctgtggactcagggaacctgagctgaggactttggtacaaggaagggaatgttttctcttccggacctaaagacgataccaaattaaaagaagacatgtatatcatatgttttgagcagaggaccctccaattcatgggagcaggggcaaaaatccacagctcatcccaggggccctggcaggttctcagagcctacatcttccttg

SEQ ID NO: 14989 - DNA, 358 bp, Homo Sapiens
gggattttcagtggctgggagccatggacatgagataggatctgaggctttatctatattttgggttgttgaagattctgccggtggagacagataaaaagcctcaggggaagcagctacagacccgagcggattacttgttgaagctgctcagaaagggtctggagaagaagggggctgtgacaggtggggaaaaggccaaattaaaaaagcggaagcctcgggtaaagaaggaaaacaaagtgcccaggctgaaaaaggagcatggaattgagctttcatctcctaggcattcagataattccattcagaagagggaggaagtgaaagatgatgggcttgggaaaaaagtccaatg

SEQ ID NO: 14990 - DNA, 645 bp, Homo Sapiens
gcggccgccgcgccgcgcacccatggacggcccggccatcatcacccaggtgaccaaccccaaggaggacgagggccggttgccgggcgcgggcgagaaagcctcccagtgcaacgtcagcttaaagaagcagaggagccgcagcatccttagctccttcttctgctgcttccgtgattacaatgtggaggcccctccacccagcagccccagtgtgcttccgccactggtggaggagaatggtgggcttcagaagggtgaccagaggcaggtcattcccataccaagtccaccagctaagtaccttcttccagaggtgacggtgcttgactatggaaagaaatgtgtggtcattgatttagatgaaacattggtgcacagttcgtttaagcctattagtaatgctgattttattgttccggttgaaatcgatggaactatacatcaggtgtatgtgctgaagcggccacatgtggacgagttcctccagaggatggggcagctttttgaatgtgtgctctttactgccagcttggccaagtatgcagaccctgtggctgacctcctagaccgctggggtgtgttccggcccggctcttcagagaatcatgtgttttccatcgtgggaactacgtgaaggacctg

SEQ ID NO: 14991 - DNA, 1870 bp, Homo Sapiens
  misc_feature (1023)..(1111): n is a, c, g, or t
  misc_feature (1738)..(1738): n is a, c, g, or t
ggacctggacctctaccttattcactggccgactggctttaagcctgggaaggaatttttcccattggatgagtcgggcaatgtggttcccagtggacaccagacattctggacaccgtgggcggccatggaagagctggtggatgaagggctggtgaaagctattggcatctccaacttcaaccatctccaggtggagatgatcttaaacaaacctggcttgaagtataagcctgcagttaaccagattgagtgccacccatatctcactcaggagaagttaatccagtactgccagtccaaaggcatcgtggtgaccgcctacagccccctcggctctcctgacaggccctgggccaagcccgaggacccttctctcctggaggatcccaggatcaaggcgatcgcagccaagcacaataaaactacagcccaggtcctgatccggttccccatgcagaggaacttggtggtgatccccaagtctgtgacaccagaacgcattgctgagaactttaaggtctttgactttgaactgagcagccaggatatgaccaccttactcagctacaacaggaactggagggtctgtgccttgttgagctgtacctcccacaaggattaccccttccatgaagagttttgaagctgtggttgcctgctcgtccccaagtgacctatacctgtgtttcttgcctcatttttttccttgcaaatgtagtatggcctgtgtcactcagcagtgggacagcaacctgtagagtggccagcgagggcgtgtctagcttgatgttggatctcaagagccctgtcagtagagtagaagtctcttccagtttgctttgcccttctttctaccctgctggggaaagtacaacctgaatacccttttctgaccaaagagaagcaaaatctaccaggtcaaaatagtgccactaacggttgagttttgactgcttggaactggaatcctttcagcaagacttctctttgcctcaaataaaaagtgcttttgtgagcccnnnnnnnnnnnnnnnnnnnnnnnnnnnnnnnnnnnnnnnnnnnnnnnnnnnnnnnnnnnnnnnnnnnnnnnnnnnnnnnnnnnnnnnnnggaacaacagagcaaaatacaataaaggcgcagacaacccaagggcacacacccgcacgacaatgacagaacacatccacaccccatacccctccagcattgcagactacctcctgtcccccgaggagcacagaggcgcatcaaaacagccgaaacgcaggcaagggtctggcacgcgacgagaagagcgcgccgggacagtacattcccccacgaagccgcgacagattgagcggacccgaactgacgaaaccgacgccaccggcaaacccatggacaccaacaccaagacagccgtaagaacaccactaaaaaaactaaccgagcgacaaccaatacaatgactcacgacacgcaactatgcaatcagtccgcggcattagtgcgccagatatacccgtaccccactcaaacggatattctccgccactcaacgacgcacacccgcgcaccacggagaagtgtcgagcagagaggaacccatctctgcgcagaaaccgggacgcacaccgaggcggcgataacccctatgcgctaccccatagtataaggcaccagctacgtcaagcgaccacagctgcgctagagagtgctccatctcaacagacgccacatcgatgcaggccnccaagccacgaatcccgctcgggtcgaatggagtccacgccccatccgcacgctacactataagacctacctggactcggtcacaagacacgaacaccgtagcacatagcacaaccagccaatccaccaaaa

SEQ ID NO: 14992 - DNA, 876 bp, Homo Sapiens
aaaattaaagtcttcagtctccacattccctactttccaaattcagctttcccgggaggtctggagcagctgcctctctggggagatgctggaggtctcggaatcacctcacacggcctcagggcccagttggagccaccccaagtgacaccagcaggcagatgaccagagagcctgagcctccggccccgagtctgtgaagcctagccgctgggctggagaagccactgtgggcaccaccgtgggggaaacaggcccgttgccctggcctctttgccctgggccagcctttgtgaagtgggcccctcttctgggccccttgagtaggttccatggcattttctgaactcctggacctcgtgggtggcctgggcaggttccaggttctccagacgatggctctgatggtctccatcatgtggctgtgtacccagagcatgctggagaacttctcggccgccgtgcccagccaccgctgctgggcacccctcctggacaacagcacggctcaggccagcatcctagggagcttgagtcctgaggccctcctggctatttccatcccgccgggccccaaccagaggccccatcagtgccgccgcttccgccagccacagtggcagctcttggaccccaatgccacggccaccagctggagcgaggccgacacggaagccgtgtgtggatggctgggtctatgaccgcagcatcttcacctccacaatcgtggccaagtggaacctcgtgtgtgactctcacgctctgaaagcccatggccagtccatctacctggctcggatcctggctgggacgcctgtgcgtgcgggcctgcctcagacaggtttggggcgccgctgggtctaccctggacgctcc

SEQ ID NO: 14993 - DNA, 449 bp, Homo Sapiens
cagctccctcaccccccccgggaacttaagaatgttctggccgcgacctagacctccatgagtggagggaagagtgatctatgtctcttcccccagcagctcggaccatccaaggccccccatccccccgtccccaaagggaagctggggaattcctgccaagcaccttgaatgggaggggcctcacagagggcagggccagggtccagcaggggtggggggttcctgctctgcccctgcccgtccccacccagtcttgccctcccatcctctcatctattcccccgctggagacggaagatcttttattttctattatttataacttcagacttgggccccctgttctttctttcccattaacttgagtgacctgtgtgagagacagacagatgccccacgaggatggctggacaaggacttttactttttattacataaaaatatta

SEQ ID NO: 14994 - DNA, 695 bp, Homo Sapiens
tgaggtgcccaaatacagatttcattgagctgtcagagcgattgcatcatcacgttattcagcctctagaaaactataccacatacttgtgaaagagtgggagttaaaagggcagacaatgtcttagtattataaaaataactttgaccccacaggtcccctaaaagggtctcagagattccccccagtggtcccttgatcttaccttgagaacctctgccatatactaaataaacttattactgtcttcagttagaagaaactctaagactaaaattgaagatctagaattgaatatttcaatggaattcttaggtttcaataacaatgcttattaagggttatctaaatgtattagatactttcagggatgcagagatgaaacaaatacaacttcttttctccaagagctttcttgttacgaaatgtggcatttacacatcgagttgaaatagagtgaaaaggggtgacatgtttgttgtcacagtaaacaaactacataccactagactcacctttgcaatttataaactaagttacataattctataaaatatttttgactattgatgattctcttgacatgtgattaactataaacaaaaatgacagcaatctttagagatcattgcattttgctttaggctagtatatttaataacttgctctgaaagaattgggcacttcgggctggg

SEQ ID NO: 14995 - DNA, 312 bp, Homo Sapiens
gggtcgtctagacgatccttgcgcgagttcatcaataaaacgtacctagatctggaagggacctgttacgctgtttgttgaagggggaatgtgggaatggcaacccccaagaatgaggaccactatctccatcaatatcacatcatacggagatcatacaagatgctcccaaccaaattcctgcctgtacttaatttattattccattgacccagaagtggcagacacctctcagctaatgccatactgccataactgcccaaagctgctgtgaacctgagttggcaaaggtttgatggaagcgtcgcgcat

SEQ ID NO: 14996 - DNA, 1180 bp, Homo Sapiens
ggatagctgccatgttggtttggcagaaaaactactgaaaggtggttcagaatctggggaggcttatattccaggtgtctttttcagacagtttctacctgtatcacccaaggtgcagttgatgtagtagtgtcagctttttccttaagtgaactgcccagcaaggctgaccgcactgaggtagttcaaaccttatggcgtaagacaggtcatttcctggtactggtggagaatggaacaaaagctgggcacagccttctcatggatgccaggatctggtccttaagggaaaagagaagtcaccttggaccctcgacctggttgtgtctttgccccgtgtccccatgaactcccttgtccccagttgaccaacctggcctgtagcttctcacaggcgtaccatcccatccccttcagctggaacaagaaaccaaaggaagaaaagttctctatggtgatccttgctcgggggtctccagaggaggctcatcgctggccccgtatcactcagcctgtccttaaacggcctcgccatgtgcattgtcacttgtgctgtccagatgggcacatgcagcatgctgtgctcacagcccgccggcacggcagggatttgtatcgttgtgcccgtgtcagctcctggggagatcttttacctgtgcttactccgtctgcgtttcctccatctacggctcaggatccctctgagagttgatgaggatgtgtaacaagtattttcttctatcgtgcctgccagggctgaagctgcctggtatccaggaggggaatgctggtatccccatatgtctgtgtttgtttgagatttttaataataaataataaatttttgcagaaccccccgcaacccctccccgcctacccacgacaccgatacaacatacgcttccccacccggcgcgaccctcgcatccgatgccctaatacccgcccgtttgtcctgttcccctcgcccccccgaattattttccccccttttcttccttgtgcgtgcgccccccctatggttttgcttcgtgtgccccgcgcgggccgcgataaaatgccgccgcggcgcggccccacgcttttttgcccccaccacacccaaaaacacgccccccggcgcgcaaacaacccggcggcgggtggttcgagcgccacacccccctaggcgcggcgctcc

SEQ ID NO: 14997 - DNA, 2176 bp, Homo Sapiens
  misc_feature (1639)..(1689): n is a, c, g, or t
  misc_feature (1819)..(1881): n is a, c, g, or t
aaaaccaatacgtgtcaggtagcgaggctccgtggtgaattcggcacgagggcgtgcgcgcgacggggtacggtgtgagagcggtaagatggctggcgtgcgtgtggtggtggagttccagagagcccagtctctactcaggcacctgacctgggaggcctccatcgacatcctccactccatctgtgaatgctgtgacattcatgtgaaaacgatgaagatggcatgtgcaatgtcaaatgatgcagatgcatcctggaacttgggatctctcctgtgcaaatgactggacaatgctgcagagcttggaggactcctgaagtatgtactgacccttcttgaattccatcagcaatggctaaagcagctcgcctggtccgatctcttcttgatctgtttcttgatatggaagcagctacatgtggcagtgagtgtcgagctgtgtttagatgtgcatctgaatgtggccaagtcagagaaaagaactttcttacgccaagctttggaggcaagactggtgtctttgtacttttgataccaagaggtaccaggaagcattgcatttgggttctcagctgctgcgggagttgaaaaagatggacgacaaagctcttttggtggaagtacagcttttagaaagcaaaacataccatgccctgagcaacctgccgaaagcccgagctgccataacttctgctcgaaccacagcaaatgccatctactgaccccctaaattgcaggccaccttggacatgcagtcgggtattatccatgcagcagaagagaaggactggaaaactgcgtactcatacttctatgaggcatttgagggttatgactccatcgacagccccaaggccatcacatctctgaagtacatgttgctgtgcaaaatcatgctcaacaccccagaagatgtccaggctttggtgagcgggaagcttgcacttcggtatgcagggaggcagacagaagcattaaaatgcgtggctcaggctagcaagaacagatcactggcagattttgaaaaggctctgacagattaccgggcagagctccgggatgacccaatcatcagcacacacttggccaagttgtatgataacttactagaacagaatctgatccgagtcattgagcctttttccagagtacagattgaacacatatctagtctcatcaaactctccaaggccgacgtggaaaggaaattatcacagatgattcttgacaagaaatttcatgggattttggaccagggggagggtgtcctgattattttcgatgaacccccagtagataaaacttacgaagctgctctggaaacaattcagaacatgagcaaagtagtggattccctctacaacaaagccaagaaactgacatagagttggatctgtagcggtcctttggagagtgtgtgtggcgggagagtgaaaccttgggggaaaatgctaggagattcttttttctttttgttctacttttcgctcggaaagtttttaaatcctcatttggtgcatctgtattccagccaataggtgtgccagttttcatgtaatctttactggcccaacttgggagtggggaaattgcttaccaaacaagaacaagaacaaaaaaaagattattctaaatnnnnnnnnnnnnnnnnnnnnnnnnnnnnnnnnnnnnnnnnnnnnnnnnnnntcgcccctccagaagctttccccgcaccattcctttggggcggggggcccggccgggaaaggggaccacgcgccatatgctgccttcctccggaaattctgggtctatggactaccggtttgggattccnnnnnnnnnnnnnnnnnnnnnnnnnnnnnnnnnnnnnnnnnnnnnnnnnnnnnnnnnnnnnnnacgaggggagtctcccggagggccccctcccgcggaatttacccacccgggaggtccccagcggggcggtcccattatcccaatttaaggccccccggaccggggcagaattaacgtgcaaagaaatgggttggtgaagttttctttacaggccctttccggggcggcccgctggaagaccccttccgccaacacgggctcttcaacggaagcccgggaaatcgcccgcgggcgcattaccacacgcccgccgccgcgcgcatccgcatatataaatactctggcccccagaggg

SEQ ID NO: 14998 - DNA, 828 bp, Homo Sapiens
gctcctgcagagatgctgggtccccaagtctggtcttctgtgaggcaggtgctaagcaggagcttgtccaggaatgtgggggtctgggcctcaggggaggggaagaaggtggacattgcgggtatctacccccctgtgaccacccccttcactgccactgcagaggtggactatgggaaactggaggagaatctgcacaaactgggcaccttccccttccgaggagctgtggggggcgtctgcgccctggccaatgtcctgggggctcaggtgtgccagctggagcgactgtgctgcacggggcaatgggaagatgcccagaaactgcagcaccgcctcattgagccaaacgctgcggtgacccggcgctttgggatcccagggctgaagaaaatcatggactggtttggctactatggaggcccctgccgcgcacccttgcaggagctgagccccgcatgaggaggaggcactgcgcatggatttcaccagcaacggctggctctgagggcaggcagggtccatggctggcctgagcccatctcagcctcctgccttgcacttgcagcctgaagcggagagcacagggggatgagggtggcaaggcagcggggagccgatagaggctcctttgcctgctgtggtcctccaggcagcctttcacaggcacgcccatgcatatctcctattctaacggtccctgacctctaccttaggatcctaaactgtgtctctggtctgaagactgggaaggagcaatatctcaatttatctaactactgtggatgcttaactacgccctgaggcacatgaaagtcagaaagaagg

SEQ ID NO: 14999 - DNA, 463 bp, Homo Sapiens
ccccaggaaccacataggattacttctgccagcctgacccatagccataatatgatttatctcaaccctagcagaaacaaaccgggcccccttcgacctgacagaaggagaatcagaattagtatcagggtttaacgtagaatacgcagccggcccattcgcgttattctttatagcagagtacactaacattattctaataaacgccctaacaactattatcttcctaggacccctatactatatcaatttaccagaactctactcaactaacttcataatagaagctctactactatcatcaacattcctatggatccgagcatcttatccacgcttccgttacgatcaacttatacatcttctatgaaaaaactttctacccctaacactagcattatgtatgtgacatatttctttaccaatttttacagcgggagtaccaccatacatataaaaaaaa

SEQ ID NO: 15000 - DNA, 1726 bp, Homo Sapiens
  misc_feature (770)..(817): n is a, c, g, or t
  misc_feature (825)..(846): n is a, c, g, or t
  misc_feature (869)..(907): n is a, c, g, or t
  misc_feature (961)..(971): n is a, c, g, or t
  misc_feature (1022)..(1039): n is a, c, g, or t
  misc_feature (1171)..(1184): n is a, c, g, or t
  misc_feature (1204)..(1204): n is a, c, g, or t
  misc_feature (1302)..(1302): n is a, c, g, or t
  misc_feature (1379)..(1379): n is a, c, g, or t
  misc_feature (1383)..(1383): n is a, c, g, or t
  misc_feature (1505)..(1505): n is a, c, g, or t
  misc_feature (1553)..(1553): n is a, c, g, or t
  misc_feature (1648)..(1648): n is a, c, g, or t
gggccctgacgcgacccgcgccgcgtccgcggcggggagttgttgctgccgcgatgctggtggcggcggccgcggagcggaacaaggatcccatcttgcacgtgctgcggcagtacctggatccggcccagcgtggcgtccgcgtcctcgaggtggcctcgggctccggccagcacgcagcgcacttcgcgcgggccttccccctggccgagtggcagccgtcggacgtggaccagcgctgcctggacagcatcgcggccaccacgcaagcccagggcctgaccaacgtgaaggccccgctacacctggacgtgacgtggggctgggagcactggggcgggatcctgccacagtcgctggacctgttgctctgcatcaacatggcccatgtcagccccctgcgctgcacggaggggctcttcagagcagcaggacacctgctcaaacccagggccctgctcatcacctacggggaacccagaatgggggcttcgggacacagccctcctggaggacctgggaaaggccagtggcctgctcctggagaggatggtggacatgccagccaacaacaaatgcctgatcttcccgaaaaactaagccccctccttcacccccgcacacctgcatccctgccggaggctctgtgaggcacgaaacctgcctccctaggccggaacttgtggacgacagccccacccagtctgtgctctcaaccgcctggccgaaagggcccagcctgctcagaataaagcatgtcctgctgccgnnnnnnnnnnnnnnnnnnnnnnnnnnnnnnnnnnnnnnnnnnnnnnnngaacctcnnnnnnnnnnnnnnnnnnnnnncaagggcgttaggtccgccaaannnnnnnnnnnnnnnnnnnnnnnnnnnnnnnnnnnnnnntcttttctcagacacccgccgcaggggaaaaaggacacccgcccttttgggcgnnnnnnnnnnnggcgtttcgaagaaacttttttattaacacccgccttcggttttgtggcgnnnnnnnnnnnnnnnnnntggagttataaggggagacaaccggtggggcgccacatagcggtgtgtgtgtgtccgctataccgaaatacacacctccgcctcagcgccgcaacagaagacacacacagctggcctctgtgcagaatagtnnnnnnnnnnnnnnaccacgtaaaataaataaanaaacacgccccccgccggcgcgcggtgggcggaaacaacaacgcgcaagagtagttttatttttttatgaagcagaatcgacgcccccccgcggccanagtggttagaggcgcccgtcctcgctgagaagtgtatgtgcacagtagacacgggggcggatttctcctcacggccncgcncggcggagggaggtttgtttctatcgcgggccgggctcgtttctatatagtatgacccacactcgttttcactcgcccccgcgcgccccgcgcgatagcaatcctctgcccagcgcgaggcnacaacaagccgtttgtgtggtaagcttatattatcatccatacagcantccgtctccgcgccgccaccacgcgccgcggggcgagatatcatctctaacaaaaacacaatcgcgaggctgtacggagagatagcatgatctangcaccacccgctactccgcgcgcccggtagataatagatatcgcctacgtgcagtattgtagctgagagagacaaaaa

SEQ ID NO: 15001 - DNA, 1052 bp, Homo Sapiens
  misc_feature (832)..(899): n is a, c, g, or t
tcgccggctcctgccatgtgggagaatcagacaccaactcccggaatctcgccgacattcagagtcaatcatccaacatttgaccatgatcatgtagacatcaatggtgcagatggggggctggggcagccgctcccccttttccagcaggtcagggatctcccgggctgggatcccatcgtaaggtttggccccaaaagtcatcagctcccacacagtcacaccataactccacacatcactctggtgggtgaaccgccggcggagaatggactccagcgccatccacttgatgggcaccttgcccccatctgcatggtactctgtctcgtcaatgtccagcagccgagccagcccgaagtctgtaattttgacatggttgggactcttgaccagcacgttccgagcggccaagtccctgtgtacgagccgcacatcctccaggtagctcatccccttggcaatctgcatacaccagttcagcaggtcctgggagcccaggcgtccgcggttttcccggacatggtctaagaggcagccatagggcataagctgtgtcaccagctgcaccgtggatgtcaggcagatgcccagaaggcgggagacatatggggagcccacaccagccatcacgtatgcttcctggggacaagggtacgctgagagggtatgggagaccacacacccccaaacaccacacagcctcccaaccatcacataaccacagccatggcccacagcctgtgaaggctcaaagtaccagcctggacaacatggtgaaaccctgtctctactaaaaatacaaagattaggccgggcatggtggctcgtnnnnnnnnnnnnnnnnnnnnnnnnnnnnnnnnnnnnnnnnnnnnnnnnnnnnnnnnnnnnnnnnnnnngtggtgtgggctaccaggtcccaatgtaaaaactggccctcaaagccagtgtagctgaggagaatgaagcaagcaaggaggtgagtgagactcaatggccttttgcattagagacctcttgactctatcgtttaatgggccatcacgccagag

SEQ ID NO: 15002 - DNA, 882 bp, Homo Sapiens
ggattgaaaatctgagaagagaacgagaacatttggaaatggaactagaaaaggcagagatggaacgatctacctatgttacagaagtcagagagttgaaggcacagttaaatgaaacactcacaaaacttagaactgaacaaaatgaaagacagaaggtagctggtgatttgcataaggctcaacagtcactggagcttatccagtcaaaaatagtaaaagctgctggagacactactgttattgaaaatagtgatgtttccccagaaacggagtcttctgagaaggagacaatgtctgtaagtctaaatcagactgtaacacagttacagcagttgcttcaggcggtaaaccaacagctcacaaaggagaaagagcactaccaggtgttagagtgaagtaattgggaaactgttcatttgaggataaaaaaggcattgtattatattttgccaaattaaagccttatttatgttttcaccctttctactttgtcagaaacactgaacagagttttgtcttttctaatccttgttagactactgatttaaagaaggaacacaaaaagccaactctgtagacaccttcagagtttagttttataataaaaactgtttgaataattagacctttacattcctgaagataaacatgtaatcttttatcttattttgctcaataaaattgttcagaagatcaaagtggtaaagacaatgtaaaatttaacattttaatactgatgttgtacactgttttacttaacattttgggaagtaactgcctctgacttcaactcaagaaaacacttttttgttgctaatgtaatcggtttttgtaatggcgtcagcaaataaaaggatgcttattattcaaacttaaaaa

SEQ ID NO: 15003 - DNA, 550 bp, Homo Sapiens
acgaggatagccggcctcagggtcacagaaagcaaagggcactcagaatcatggcacctaagtctggacactgccatcagggttgcattggctgtcgctgtgctcaaaactgtcattttgggactgctgtgcctcctcctcctgtggtggaggagaaggaaaggtagcagggcgccaagcagtgacttctgaccaacagagtgtggggagaagggatgtgtattagccccggaggacgtgatgtgagacccgcttgtgagtcctccacactcgttccccattggcaagatacatggagagcaccctgaggacctttaaaaggcaaagccgcaaggcagaaggaggctgggtccctgaatcaccgactggaggagagttacctacaagagccttcatccaggagcatccacactgcaatgatataggaatgaggtctgaactccactgaattaaaccactggcatttgggggctgtttattatagcagtgcaaagagttcctttatcctccccaaggatggaaaaatacaatttattttgcttaccataca

SEQ ID NO: 15004 - DNA, 875 bp, Homo Sapiens
  misc_feature (193)..(233): n is a, c, g, or t
  misc_feature (521)..(521): n is a, c, g, or t
  misc_feature (568)..(568): n is a, c, g, or t
  misc_feature (574)..(574): n is a, c, g, or t
  misc_feature (674)..(674): n is a, c, g, or t
  misc_feature (691)..(691): n is a, c, g, or t
ggggcgcggagccctgctctcgcaactcaagatggcggacgagagtgagacagcagtgaagccgccggcacctccgctgccgcagatgatggaagggaacgggaacggccatgagcactgcagcgattgcgagaatgaggaggacaacagctacaaccggggtggtttgagtccagccaatgacactggagcnnnnnnnnnnnnnnnnnnnnnnnnnnnnnnnnnnnnnnnnngcagtgagacagattcagcccaggatcagcctgtgaagatgaactctttgccagcagagaggatccaggaaatacagaaggccattgagctgttctcagtgggtcagggacctgccaaaaccatggaggaggctagcaagcgaagctaccagttctgggatacgcagcccgtccccaagctgggcgaagtggtgaacacccatggccccgtggagcctgacaaggacaatatccgccaggagccctacaccctgccccagggcttcacctgggatgctttggacctgngccgatcgtggtgtgctaaaagaactgtacaccctcctgaatgaganctatgntggaagatgatgacaacatgttccgatttgttatttccccggagtttcttttgtgggctctccggccacccggctggctccccaggggcactgggggggntcgagtggtctcagtcngaaaaatgggttgggttcattagcgccatcccagcaaacatccatatctatgacacagagaagaaagaatggtaggagatcaaccttcctgtgggtccaaccagaagctgcggtttccaggaggggttggcttccagtttccggatcccgagaggaatccccaggcggggggttccccctgggc

SEQ ID NO: 15005 - DNA, 601 bp, Homo Sapiens
  misc_feature (53)..(54): n is a, c, g, or t
  misc_feature (56)..(56): n is a, c, g, or t
  misc_feature (74)..(74): n is a, c, g, or t
  misc_feature (83)..(83): n is a, c, g, or t
  misc_feature (87)..(88): n is a, c, g, or t
gctttcccctggcccgacattgcttgagtgcgaccggtttcccccaggacaanngnacctttgatccccctcgntagcagcgnaccnncttctgccagccaacgaagaagctccaaaggtatgtgaagcctgcaaaaataaaaatgatgatgacaaagacagcttgcagtgcacctgtgaggagatgaacgacatcaacgcgccctatctggtcatgggacagaaacagggtggggagctggtgatcacctcggtgaagcggtggcagaaggggcagagagagttcaagcgcatctcccgcagcatccgcaagctgcagtgctagtcccggcatcctgatggctccgacaggcctgctccagagcacggctgaccatttctgctccgggatctcagctcccgttccccaagcacactcctagctgctccagtctcagcctgggcagcttccccctgccttttgcacgtttgcatccccagcatttcctgagttataaggccacaggagtggatagctgttttcacctaaaggaaaagcccacccgaatcttgtagaaatattcaaactaataaaatcatgaatatttttatgaagtttaaa

SEQ ID NO: 15006 - DNA, 1697 bp, Homo Sapiens
  misc_feature (1203)..(1240): n is a, c, g, or t
  misc_feature (1460)..(1519): n is a, c, g, or t
  misc_feature (1606)..(1616): n is a, c, g, or t
ggggcagttacagacagctgaccatggaagcgaatgggttgggacctcagggttttccggagctgaagaatgacacattcctgcgagcagcctggggagaggaaacagactacactcccgtttggtgcatgcgccaggcaggccgttacttaccagagtttagggaaacccgggctgcccaggactttttcagcacgtgtcgctctcctgaggcctgctgtgaactgactctgcagccactgcgtcgcttccctctggatgctgccatcattttctccgacatccttgttgtaccccaggcactgggcatggaggtgaccatggtacctggcaaaggacccagcttcccagagccattaagagaagagcaggacctagaacgcctacgggatccagaagtggtagcctctgagctaggctatgtgttccaagccatcacccttacccgacaacgactggctggacgtgtgccgctgattggctttgctggtgccccatggaccctgatgacatacatggttgagggtggtggctcaagcaccatggctcaggccaagcgctggctctatcagagacctcaggctagtcaccagctgcttcgcatcctcactgatgctctggtcccatatctggtaggacaagtggtggctggtgcccaggcattgcagctgtttgagtcccatgcagggcatcttggcccacagctcttcaacaagtttgcactgccttacatccgtgatgtggccaagcaagtgaaggccaggttgcgggaggcaggcctggcaccagtgcccatgatcatctttgctaaggatgggcattttgccctggaggagctggcccaagctggctatgaggtggttgggcttgactggacagtggccccaaagaaagcccgggagtgtgtggggaagacggtgacattgcagggcaacctggacccctgtgccttgtatgcatctgaggaggagatcgggcagttggtgaagcagatgctggatgactttggaccacatcgctacattgccaacctgggccatgggctttatcctgacatggacccagaacatgtgggcgcctttgtggatgctgtgcataaacactcacgtctgcttcgacagaactgagtgtatacctttaccctcaagtaccactaacacagatgattgatcgtttccaggacaataaaagtttcggagttgnnnnnnnnnnnnnnnnnnnnnnnnnnnnnnnnnnnnnntcgccgatttacgacacgtctacctctcttttataaaccccatgtaatacctacacacttcctttgtcgcccgcccctccgccctcgaaaaagttttccaaaccccttctttttgggcgcccgcggccccccccaacgtaaacggaaccctgggccccataaccctgtctctcctaagacaaatcccctggcccatagaaataagcggtttgggatcttnnnnnnnnnnnnnnnnnnnnnnnnnnnnnnnnnnnnnnnnnnnnnnnnnnnnnnnnnnnnacaggcgcttcttccgggggccttcccgtgggttcttacaacccggggaactcccccggggggtctcctcatatccacattttaggnnnnnnnnnnngttgcaactcttattcccaaataatccgggtacattctcctcatacgtcatttcttgccccacaccctgggaaaccccccc

SEQ ID NO: 15007 - DNA, 1383 bp, Homo Sapiens
ctcaacgcttatacttccctgtagcttctgagctacagtctttctcaatcagcctccttttactgatgacatgcttctgaagaggaaaaagttgctttctttttctatgagaattttccagtttttcgttttgttttgtttattatcttcctagcatctctcttcctcatttccaggtgatgctggcaatctattttacagtttagcacaacctttagactctaaagaggtcatttaaaggtgctttccaataagaagcattttagtgtggtctctgaaatgtttttactctccccctgcaccactcagaatttacatagttttggcgtacataaatgtgctctctcctcccccaaatttagtaaaatgtaaaagtctgagttactgtcaattttgagatatttaggaaatttaactcaataccaaaccagccatttctttgaagtataaagcgtggagctcaacgctttatacttccggaaagggcctcatgaaaaagaactattacaatcaaaaacagctttatctagtgtcaaaaccagttcttctcaaggtataataagaaataagactctatcaagatccatagcatctgaagttgtagccaggcctgcttcattgtctaatgataaactgatggaaaagtcagagcccgttgaccagcgaagacatactgcaggaaaagcaattgttgatagtagatcagctcagcccaaagaaacctcggaagagagaaaagctcgtctgagtgagtggaaagctggcaaaggaagagtgctaaaaaggccccctaattcagtagttactcagcatgagcctgcaggacaaaatgaaaaaccagttgggtctttttggactaccatggcagaagaagatgaacaaagattatttactgaaaaagtaaacaacacattttctgaatgcctgaacttgattaatgagggatgtccaaaagaagatatactggtcacactgaatgacctgattaaaaatattccagatgccaaaaagcttgttaagtattggatatgtcttgcacttattgacccatcacagtcctattgaaaatattattgcaatctatgagaaagcccattctggcaggggctcaccctattgaagagatgcgacacacgattgtagatatttctaacatgaagagtcaagaaaagctaatttaagagaaaaatatggaaaagtcttgggcaagcaagggaagaagtcaaaagaagtcagaattgaagatacccgttggttgatgtgagatcccgaaaaaactggaaaagggaaaggtaaacctccttaggaaatttggcttatttcaagaatgggggaaaaaagagcgcaggacccccaaaaccaaaggtccccacccccttgagt

SEQ ID NO: 15008 - DNA, 763 bp, Homo Sapiens
  misc_feature (47)..(72): n is a, c, g, or t
  misc_feature (678)..(693): n is a, c, g, or t
tgtatgccgggggggaagaaaggtttcggtttgggccaaaagtaatnnnnnnnnnnnnnnnnnnnnnnnnnncccaagcaccttttccccggagtcacgggaaacgggaggcttgtttccaaacctcggctggaagggtgttcttggcactcgacgttttagttagtggaattttcgcattaagactgtactggggcctttttcatgatgacttgggtctcaatctttggagcagctgaaagaacagctcgggcccccctgtggaagcacccacaatgaaatcagaggccactgcaaggcagagtggcctgcagttttaactcgggcactatggcaatgcagacccaaaccaattgtgccagttctttgctgggtggcaaagtgttttcaggctttgtggtcactcctgatttctgtttggaagcacagttctctctctaaggagaatggaaacttggaaaggcctgtaaaatcggaaagcctgtaaaaggccgtagagtggagatgtataaaaatgtacggtcacccatgttttaggggttgacaccgtggacttttatctcgctcaccaaattcctcacacatacagctcactccctgtgccctcggccatctcaggcaccacaaaatcctcactgcttgaaattcacttatggagtccaacaaacaactttcttnnnnnnnnnnnnnnnnggcagtaaaatctcagaatttctgtgcaacgcttgcaacctgcccacttattaaataaacagaacacccc

SEQ ID NO: 15009 - DNA, 1079 bp, Homo Sapiens
  misc_feature (461)..(471): n is a, c, g, or t
  misc_feature (585)..(619): n is a, c, g, or t
atccctggcctggaggcccgcgccccccccttattgatgacactgatgccgaagatgatgctcctacaaaacgtaactccagtcctgcaccctcttccaacaaaaataacaatgctgttgacagataaacagtaactcagcgtaagtgacctgtggatcatcagtagtacccaagcatggtcctgaacagtgtattagcagagctttagtttatctcagtcctggatgggagagagagggaggagtaaaactgggcaagacaaagagccctggatcgttgaattgatagtttaatttctgctgttggctgttaataatttggattatttatgtttataaatgatacagatctgtttacaaggtttgtagatactttttttgttcctgttcatagatgggaagcttccttataactgatgcagagaaaaattagtccttcaaatactgctgtattttcaggnnnnnnnnnnngggggtgtttctattgaaactgtactaaatttttgcctacaatttaccttgttaaatattgtagataaattgctaatactaatagccaaatagataacactaatgctttgtttnnnnnnnnnnnnnnnnnnnnnnnnnnnnnnnnnnnatgagcagtggtgttctaatgaagttatgacatctgtcctaattagtttcttaaatacatttactacttaatggttttgaagcaactgtttaatttttaaaatttttgaaaacttgctaataaccttttgttcagaatttagtagattgtttaatgcaggacatcaactacataatgaaagatgcttgaaatgcttttgttatttcaggcaaatcaaattaaatcagactatcaaactacaagagaaccttagtcttttttgtttttgtctaaacatgttagtttagtgatgtcttggtgaactgtgagtgaactgtattgatttttctaatctttagagaccttcacacagcatgagggctgttggcattttgaaaaaggttaataagtagaagcatacatgttttccttttgtttttgaaacttgtttgtaaacataaataaatatgcccttttatta

SEQ ID NO: 15010 - DNA, 876 bp, Homo Sapiens
atcgactctagaggtcccccacgccgcccgccggttcaaagctgcatttgcctagaaagtggattgctgcgtatgaaccaagtgttgggctatataactccactgtcctaagctatttggggttggaaggaagaggggtgaagtagaaaggcaagaagctaatacaagaggagaaaaagtagatgagacacatcaagaaattctcacgagaaacagatgaagaggtggaaatgagtcagtccagcagcttaccaagtatcactgacaagaggagaggatgcatcctgtgtaaatactggggttcttgtctcagaagcacagggtatcatggaaatggagttgaaagctggggaactgatggaacgtctccatgaggagcaactaactggagccatgggttggtaccaagatgttccctctgccttctactttcgatagaaactaagccagtatggcatggggctctgaaaatgggctgaggggaacatcggcagcctccactaaccccctgcccctaccctgttcctgaagtcccaggcagttaagacgtccacagtgaacggcacttaatcaaaacaaaagttcagacacagtgaaaattcaggaatataagacaatgtaaaacactatcagaaaaatgaggcaaagaatgatataaaaaaggtaataggatgttcaagtctttgaggaagatttccaggttgaaaccaagccatagcttttagtatattttcattttaggttaggcaagaaagttagcgaactttgtcctcaaacctaggaccatttaaaaaagtgacaataaagaagactaagaaatcatgaagagagtataaatttatgaaaatataacatttgaaccggcggtgcggcgtg

SEQ ID NO: 15011 - DNA, 880 bp, Homo Sapiens
gacactgggaacgcacacgtggcggccactggggcctcagggcaggggcaggccagggtggtgctgtgatgaggcccagcgtcccctcggagcccacgaagagccccgtgaggttgtagccggcggcactcttcctacgtcccagggacacacaaggtgagtaccaggcctgtgtgatgagggatttctggccagaagccggaagcggaaatgccggcctcggcccgccgtgtgcagcaaccgacccgtcgggcagcaccacctccaggttgagcacgttgtcccgcatggtgccgtagcggaccgcgttggtccccgacgccccggtggccgccatgccacagagagaggcgtccgcgcctgggtccacgggaaaccagaggccgctgtcccgcaggtgggcgttgagggctttgcgggtgacacctggctccaccaccacagagaagtcctcctggttcagctccaggattcggtccatatgcgtcaggttaacgcagacgccgccctgcacagcacagacgccaccctcaagcccggtgccggtgccgaatgggatgatgggcacaccttggcgatagcacagggctgccagccggctgacctgctccacgttctggggccacaccacagcatcaggaggttcgcacctgtgcaccgactcatcgcgcccgtgctgctctcggaccaccgcggcagtggacacgtgggagccgcccaccacggccttcagagcctctacgaagtccctgcagagctctccctttgccttctgggagcagtagcccctccaggggaacagctcccaggttgcagacctgagcagtcgggccatagccaggcactggccaagagggtgtgagcactggtggcagggtac

SEQ ID NO: 15012 - DNA, 1096 bp, Homo Sapiens
  misc_feature (924)..(924): n is a, c, g, or t
ggggcgccgggccgggatggcggccaccgcgctgctggaggccggcctggcgcgggtgctcttctacccgacgctgctctacaccctgttccgcgggaaggtgccgggtcgggcgcaccgggactggtaccaccgcatcgaccccaccgtgctgctgggcgcgctgccgttgcggagcttgacgcgccaggtgagccgggccggggagcccgggcccctgccccgtccccgccgctccgtccctgtcgggccgctggggtctccaccgtctttgctgagccacctctttgcctcggcagctggtacaggacgagaacgtgcgcggggtgatcaccatgaacgaggagtacgagacgaggttcctgtgcaactcttcacaggagtggaagagactaggagtcgagcagctgcggctcagcacagtagacatgactgggatccccaccttggacaacctccagaagggagtccaatttgctctcaagtaccagtcgctgggccagtgtgtttacgtgcattgtaaggctgggcgctccaggagtgccactatggtggcagcatacctgattcaggtgcacaaatggagtccagaggaggctgtaagagccatcgccaagatccggtcatacatccacatcaggcctggccagctggatgttcttaaagagttccacaagcagattactgcacgggcaacaaaggatgggacttttgtcatttcaaagacatgatgtatggggattagaaagaactcaagacactcctgcttgatacagaacaaaaagagcttaacaggaccaacagggcttaagcccagacttgacgtaacagaaatgtgccaataggtaataggtaatttttctttctctgacttgttttgttttcttgaaataacactgttgtgtggctagaaacgatcataanaccttctgcaaaaacgaaaaaccatgtccggccgccctcggccctcgaaaaagctttctaagaccattccgtttgggcgcgcgggccccattagggaaggggaacatgggccatagctggtttcaaaggaaaacctgggtcatgaactaagggcttgggattctcccccatt

SEQ ID NO: 15013 - DNA, 861 bp, Homo Sapiens
  misc_feature (673)..(675): n is a, c, g, or t
gggaatcagcgggggtgcaaatgaaattctggatttacagaggttacagtcttcttcataccttgatgattcgagtccaacaggtttaatgaaagatactcatactgtaaactgcaggagtatgtcaaataaggagttgtttccaccaagtccttctgaaatgggggagctagaggctaccaggcaaaaccagagtactgttgctgtccacagccatgagccactcctcagtgatggtgcacagttggatttcgatgccctatgtgacaatgatgacacagccatggctgcatttatgaattacttagaagcagaggggggcctgggagaccctggggacttcagtgacatccagtggaccctctagcctttgatttttaactccaaaaatgagaaacattttaaagcatttcatttacgaaaaactgtctcaactattcttaagtactgtattgatattgtttgtatcttttattaatgttctaccactttttatagatttgcatcttcctgtcacagggatgtggggaaatacgttttcctcccaagagaaccaagtttattatagactcctttattcagtgaaatggcttataatccactagttgccatatttttgctaaaatatttctaaccaagaatactaccttaaacgaacccagggacggtgggnnngacatggggggcgcccttcgcccccagaaaagctttttaagaccctttccttttgggccgcgggcccccgaaggtaaggggacttgggccatactgtttctccaggaaatcctgggaactgaaaaaaggcttggactccccccacataaaaaacgcccgggggggaacccgaggcgttgtaacaaa

SEQ ID NO: 15014 - DNA, 1295 bp, Homo Sapiens
  misc_feature (452)..(587): n is a, c, g, or t
  misc_feature (742)..(804): n is a, c, g, or t
  misc_feature (898)..(908): n is a, c, g, or t
  misc_feature (1215)..(1225): n is a, c, g, or t
gggcccggaacttcctagacgccgtacgtgccagatggtgttacctggagcttaaaaagctgcacgcaagtgttaaacttctgacaatggccaagaacaaattaagagggccgaagtccaggaatgtatttcacatagccagccaaaaaaactttaaggctaaaaacaaagcaaaaccagttaccactaatcttaagaagataaacattatgaatgaggaaaaagttaacagagtaaataaagcttttgtaaatgtacaaaaggaacttgcacatttcgcaaaaagcatttcacttgaacctctgcagaaagaactgattcctcagcagcgtcatgaaagcaaaccagttaatgttgatgaagctacaagattaatggctctgttgtaatatactggtgatgcatctaattctccacaaagaccaataaattgaatgttttatacaattttnnnnnnnnnnnnnnnnnnnnnnnnnnnnnnnnnnnnnnnnnnnnnnnnnnnnnnnnnnnnnnnnnnnnnnnnnnnnnnnnnnnnnnnnnnnnnnnnnnnnnnnnnnnnnnnnnnnnnnnnnnnnnnnnnnnnnnnnttcttcttgccggccccttcccccccctaaaaaaatttttaaaaccctctttttggggccggggggccacaacgaagaaagtgaaacccggccaaacctctgttctcccagaaaaaccccggcgatatcacaaaggtggtggtgttctcctcccnnnnnnnnnnnnnnnnnnnnnnnnnnnnnnnnnnnnnnnnnnnnnnnnnnnnnnnnnnnnnnntggactttttgcgggggcctctttctcgcggtcttcttcctataggggggggttcccacacgcggagttctccctaatatccataaattaccgnnnnnnnnnnngtcgcgtcctcctttttaccaaagaaccgtggggggtgatacataccacttaacacaccttttcccccgccgcagttggcgaaacccctcctcaccaagtcggtttgtgttagatcatcgcttaccttttcccacgcgcgggtgcctctcacacaacccctgttgcgcgcccttttggcggatacaaatatttatccgccccccccgtggccaaaaaatagccggcggcgcaaacaaaacagtttttccctttcatatccgtggcccaccctctttacaaacacacccgagtcgcgggggcacactnnnnnnnnnnnttggcgccctctgccgccccttcaacaccaacaacatatattttcctctccttacacatatacccctttg

SEQ ID NO: 15015 - DNA, 888 bp, Homo Sapiens
  misc_feature (14)..(14): n is a, c, g, or t
atccatacaccccntgagatataggggcggggagccaggcgccagtctttcagaggtgggcatggtccatggcgtgtgggcatgagcctcgggtgggtgaggggcagatgggcaggtgcctaaaaaaaagatgaaccacacagcaggagtgctgggagctgctccccaccctcaacccatcccaccagtccagcacccagagggacaaccctaacacgaccggcccaggatccacccaggggcagagtaggtgggttggtgccctctgactaggggggcacatgcctgcccagcccaccacggtagaggcagctcagttcaggaaccaggagctctctgggcagggcctgaccggggccccccgactcccaggccgagcccccctactgctggctcagaagccgaaggtttcctgggaggcgtagaccatatagaggaagccgtcctcgtctttctcctgctcgtagatgtccgcgatgggcgtggacacactcaccatgctgtgctggttcaccagcaggaagaaggcctgcgtggggttcagctgcaggcggcgccggatgatcttgaccaactcgctcatgttgacatggtccgggaccaaaaacttggtcttgtccaggacgggcagctgcttctcacccttgtagcgctcgatgatcaccgggattttgctggggtgctggtcgcggatctgctgtacctccttacagcggtcggcgaagctccgccgctgcttgaaaggccggtctgagggcatcgcgcgggcccggctgggcgcgcaggccggggctctggggcgcggggatgtgtctgcggtttgggggctccgggggctccgcgcctcgcgctcaagggctatcccaggaattccggaccggtaccagc

SEQ ID NO: 15016 - DNA, 623 bp, Homo Sapiens
aaaagtaagaaaatagttgctaccgatagggaacttgccaagtccaaatatcttctaggattgaaaggtgcattttccccataaaaaaggcgaggaaaacccatggctgctttgtgtcacctcagtgacttacagtcccccttggcatttagttggtactagagccagtcatccttaacaaatcttttcacattttatttctttcacatgtagtcatcttcaaaaaggaaagatttggaattttagaaaaggggcaactcttctttttagcattctcatcagaaagtcacaaaaatcgatggaatcatttccactgggaagattgaccttttgtatttatttgtggggtaaattaataagcattccagatgcttgcagcttcctgcatccaggagatgctgtgttccccgtgatgcagctggaacccaagctgcagcaggagatgcaagtttcaggatgttccccactgagctggaggaatatctacagcagtgatgcttgaaatttttgtatgaattattttgtcgtcctacccttttcctccaaaacaaaaattagaggattattttaatactttggattcttcccccttttttgagaaataaagttttttatgaaaagcc

SEQ ID NO: 15017 - DNA, 914 bp, Homo Sapiens
  misc_feature (824)..(867): n is a, c, g, or t
tttggggcagaatccactgggctctcttggccatccgctgccttgggtctgttgaggtgggtgcccaaaggctgccttcttgaccagaacctgctgtgcgcttcacagaacctcctcttcattggaaatgctgggcacattgcagtcagtgagctgctgccaaaacggcgttaagtagaacccccagaggccccgccggttggtgatcaccctcaggtccttgccagggaagacacaagtgaggaggttggctaattgctgctttcaggccctggaaatcagtcgccaaggcccaggagaaccccggtgagtccgtccagttgaggcagaggcaataacctcccattgctcggccctgcgcctgccccagtcctggcagggggcaccggctcaggaacatgcggcctcctggcatttctcggtatttaactgtctcgctgtcttatccgagtccctaatgaaacgacttgtgtgacaatctgtctgtgccttacgaaagtgtctgtgcactttttatcctttttaaaagcaacttttaaaagtggatggggaggggggctagcatacgtggtagggttctagaaatctgtggtcatcgctgaaatcctttttgcatcatgttttttgatgttggagtgatgaagtgtacatcccccaccccacacaccactacctgtgtacagaccttttaaaacatgtcttctttttctgattcaatactgtgacctctccgatacagtctaatccttggggatctgtaatcaaggttttaaaacctgggaagtgggttgggaagggtttgcactggtcttgagtgttgtgcnnnnnnnnnnnnnnnnnnnnnnnnnnnnnnnnnnnnnnnnnnnnatattgacataattttcctgtttaaaaaaatacaactttggcttgtt

SEQ ID NO: 15018 - DNA, 441 bp, Homo Sapiens
tcacatgaggagaccgtgacccgtggtcccttggccccacaagtcaaagtagcgcctatagtagtcccctctagcacagaaatagacagcagagtcctcagatgtcagcctagtgagctccatataggctgtgctggaggacttgtctacactcagtgtggccctgcccttgaacttctcattgtattcagtactcccctctccaggaaaaatccatccaatccactcaagtccctgttcaggcgtctgcctcacccagtctatatcataacttgtgaagatgtagccagaagccttgcaggacaacttcactgaagccccaggctttaccacttcagttccttactgctgcagcttcacctgggccatggccggctgggccgcatagaaaggaacactaaaggaattgcgaataatcagtttatcctctagagtcaacta

SEQ ID NO: 15019 - DNA, 693 bp, Homo Sapiens
tcctgggggaaagactgcaaccacagacacaaacattcagaaacactggcggatttgggacaagcagaagggagttgggagcatggaaggaaaataataataattattattattaacaataataacaagataaccagtccaggagagagggagccacaggaagacctaagatcaaacgaaatatcgtaacacaaggcgaggcaggcttgtgggaaccggtccccagccggcgggcggcagagcggggaggattggaggggccagggctgggggtggcacgggctcttgggccgctgggctcctctgggcgggctcagggctggaaggcgctgccagctgtagccaggctcatacttttcaatttgttgtccttcttccacttcatgcgccggttctggaaccagatcttgatctggcgctcggacaggcagagtgcgtgggcgatctcgatgcgccgtcgccgggtcaggtagcggttgaagtggaactccttttccagctccagggtctggtagcgggtatacgcggtccgggcccttttcccgtccggcccggtcatatcatggctgatgtgaagcttcctcatccaggggaatatcttgcggagtctgcccctcggggcgcggctggtgagtggcatgggctctgctgcgcccgagctaggctggggctgcttagctggcttgccgtttc

SEQ ID NO: 15020 - DNA, 1195 bp, Homo Sapiens
  misc_feature (34)..(35): n is a, c, g, or t
  misc_feature (37)..(37): n is a, c, g, or t
acatggtaaactagaggtttaagatgatggcacnncnggttgtggctgagaatgctggagatgctcagttctctccctcacaaggtaggccacaaattcttggtggtgccctcacatctggggtcttcaggcaccagccatgcctgccgaggagtgctgtcaggacagaccatgtccgtgctaggcccaggcacagcccaaccactcctcatccaagtctctcccaggtttctggtcccgatgggcaaggatgacccctccagtggctggtaccccaccatcccactacccctcacatgctctcactctccatcaggtccccaatcctggcttccctcttcacgaactctcaaagaaaaggaaggataaaacctaaataaaccagacagaagcagctctggaacaaaaagtacaaaaagacagccagaggtgtgcggagagggtgaggtggccgcgtggacgtgggtagataatcgcatgcagcactggaactcctgatgaggggtggggtccccacttctcctcaaggtttgagggattgcggggagggggtcagctgactcagagaagtaggatctctgcactggaacttgaggcttcctgtctcctccatgggccccaccagtcacagggacatgaaatccgtggcctggaggagggagagggagagcaggagcagcagcagccacgaggtgttctgagccagcaggctgatgccctcacacttgaccagtttgtctctgagcactgtgacgttctgggaggagatgggtggggaatggccagagtggtggagtgcacacgtgtaggtgccctcgtccttgctagtgaaggcggataagtagaggaccttcatgttgtatttgctggtgaagttggttcgggagcggtatgtgtgctcaggcacccccacagtgccaaagagcacgtgcttctttgtctcacgggtcaggctgaactcgtactggatgggtgaactgctggtattctcatggcggcagtccagacgaaggctctggtccactaggcaggccgttaggctggtcaccttctgccctcgggagacctgcaagactgttagcaggagagcgatgctgatggccaggctcatggttctgggatctcagtcctggatctggactgggtcttccgctgctgcatggcccaccctttccaaacttgccgcgcagcggga

SEQ ID NO: 15021 - DNA, 833 bp, Homo Sapiens
gggcccttccttcctgtacagggcaggttgtgcagctggaggcagagcagtcctctctggggagcctgaagcaaacatggatcaagaaactgtaggcaatgttgtcctgttggccatcgtcaccctcatcagcgtggtccagaatggattctttgcccataaagtggagcacgaaagcaggacccagaatgggaggagcttccagaggaccggaacacttgcctttgagcgggtctacactgccaaccagaactgtgtagatgcgtaccccactttcctcgctgtgctctggtctgcggggctactttgcagccaagttcctgctgcgtttgctggactgatgtacttgtttgtgaggcaaaagtactttgtcggttacctaggagagagaacgcagagcacccctggctacatatttgggaaacgcatcatactcttcctgttcctcatgtccgttgctggcatattcaactattacctcatcttctttttcggaagtgactttgaaaactacataaagacgatctccaccaccatctcccctctacttctcattccctaactctctgctgaatatggggttggtgttctcatctaatcaatacctacaagtcatcatatttcagctcttgagagcattctgctcctctttagatggctgtaaatctattggccatctgggctccacagctgagttaacctgccttttcgggaacaaaatgatgtcatgtcagctccgcccctttgacatgaccgtggccccaaatttgctattcccatgcattttgtttgtttcttcccttatcccggtccctgaagatgttttgtgaacc

SEQ ID NO: 15022 - DNA, 909 bp, Homo Sapiens
  misc_feature (72)..(97): n is a, c, g, or t
gggataacatttagttgaaaatacctaagaaagtgtgtcttctttaaagccttggctttaatcatgggaaannnnnnnnnnnnnnnnnnnnnnnnnnatcctatgtttggtattctgtatgtctgatccataatcattttagatatttgaatgatctctgtggattggtaggtttggccatttgaccattatttattatcaagttggttgtatgctaaggtaagttgacgccatagcattatacagttatcttcattgctcttgaatgatatctgttatataagcaatgtataaataaagtaaaaaggatagaatgaaaaacccattctaatgtcaccactcagagataagtaccgtatttctgtgtatccttctataaactctttacttctgtttcctttattttttaactttaataatgctactaaaagacaatacctaaaagtaactgtactaacaaagtgctaacaatgtgaaaatatatagtcccatagtcatgtccccatatttatactcccacagaagaaaaaattggaaaacaaagtctgatgtccttaatctattaacatatttaaatgatataatggttcagttttccatgaaagtaaatcattatgggaagtaaaatgttttaaccatatttttcttaatacacaaagcaggtgtcagctgttgtattctcacccttcttaagaaaaatcattacattattgatattttttaagtaacagaatagatttgaaagagataatatatctcttaataccaaaggaaaactaaaacataattctagtgtacttttctttgttccctcatgtctttttcaatctgtacactaacatacctagcaaatttgttttactttaacttgaaatatttaagaacattaaacaagacatttctttggca

SEQ ID NO: 15023 - DNA, 876 bp, Homo Sapiens
ctgatcggcgtcccgggagaaacatggccgggagcagcgaggaggcgccagactacgggcgaggcgtcgtgattatggatgattggccagagtatgacttgaatttattcacgtacccacagcactattatggagacttggagtatgtcctcatccctcatggtatcattgtggacagaattgagcggctggccaaggatattatgaaagacataggatatagtgacatcatggtcctgtgtgtgcttaaaggaggttacaaattctgtgctgatctcgtagaacaccttaagaacatcagccgaaattcagatcgatttgtctcaatgaaggttgatttcatcagactaaaaagttacaggaatgaccagtccatgggtgagatgcagataatcggaggcgatgatctttcaacgctggctggaaagaatgttctcattgttgaggatgtagtcggaactgggaggaccatgaaagcactactcagcaatatagagaaatacaagcccaacatgattaaggtagccagttagtaggtgaagagaacatccagaagtgacggctttagacctgactcacatatgcgtcatcaatgagcacggtaaagaaccaatatcgagtctaaagacatgaattctcaccactatagtcccagatagcatcatatttacgcctgtacttgggaagccagctgtcaagttcgtccccccagggcatcctcaaactcaagcaaggactattacatgcagcaacaactggtccaacatgaagaaaaagacatacgttctcttaagcgttacacatatacgaagaatacaaaagggaacccaaggggataggaaaacaccgcaggactacatactaggactgtgccca

SEQ ID NO: 15024 - DNA, 1540 bp, Homo Sapiens
  misc_feature (1359)..(1359): n is a, c, g, or t
gttttctgaaatgtttgaagttaactcattttatttctaggatttggatttcaacattttaatttctttggaatataagtcactttttgcaagctaaaaaatagaatcaaactaaggtgatctagtcctctaggcatccaggctgatccttggaatcatgagcagaatgatgacatactacaaggtgctagcaatacggctataaactctaaataataaccactacatgtttcattaggaaacagccaaaagtccggccgttaaaggaataatctgcagaacatcttgatttacaagggacaaaatgatgcaaattatatgctgtccaacctactggtgaactggatcagaatggtccaaggactgttaaacagaggaagtatttacattttgaaaacttgctctgcaggataaaaaaattcctggttgctgtcagtaagaaagcaagtaaaaaaaatattacagatgaactcactgatctttgattttactaaggtcttccactggaacatgaaggtagggataagtgtacaggataatatactcagatatttttaaaataaactacttaataataagaaattagccataccacattgttccatttgctacaagaacaaattggcaatgaagactatttaaaagaaatgctcagctctacagagggtggtggcaggcaacacttttccattacagaataacctctattcttccatgatacatattcctgtggaaaaacttgtcagggcccagggatgaaaaatagagcttgtcctaattagctaactgtaggttcacttaacatctttgggaaggacccaaaaaatctggccattattttcttaaacatctgcaagctgcagaattccttagtcctcagctatagtttctgctagatatcttaaagctgggacagttccactgtgactcctcctcagctatggggtgggtgctagtcatcaaagtctggaatgtcatcataggagtaaccacggtagcctttggatgcatagtaagcgatgcgcaggtggtaaaatccgggtaggaacaccagaatgccaatgatcagcactggaacggcccggtctgccccccctttgctgatgtagcctgacagcaggagggagcctgaaggtcaatgtagccatcgtctgtgctggagagccttgaatatttcactttactactggggattccagtagccaggttggtacgggacggcatcataacacgctgacacaggttattctcctacccgtcttcagaccttgccagggagagaaataagaaccgacgcgaatttagacgtaaaacaaacaaaacgggcttctggaaagaggccaactgttccaggggggnacgaatgccccacacggatgactcggagcttgatttcggcggggagcgcggtctcggacacgcccagagcccgagaggacggttctgtccccgccctgccgcacacacgccttaccggagcgccgcgccaggccgcccgcacacccagagctcgcccacggttggcagcgcccaaggttgc

SEQ ID NO: 15025 - DNA, 566 bp, Homo Sapiens
cacagactcagagagaacccaccatggtgctgtctcctgccgacaagaccaacgtcaaggccgcctggggtaaggtcggcgcgcacgctggcgagtatggtgcggaggccctggagaggatgttcctgtccttccccaccaccaagacctacttcccgcacttcgacctgagccacggctctgcccaggttaagggccacggcaagaaggtggccgacgcgctgaccaacgccgtggcgcacgtggacgacatgcccaacgcgctgtccgccctgagcgacctgcacgcgcacaagcttcgggtggacccggtcaacttcaagctcctaagccactgcctgctggtgaccctggccgcccacctccccgccgagttcacccctgcggtgcacgcctccctggacaagttcctggcttctgtgagcaccgtgctgacctccaaataccgttaagctggagcctcggtagccgttcctcctgcccgctgggcctcccaacgggccctcctcccctccttgcaccggcccttcctggtctttgaataaagtctgagtggggcgggaaat

SEQ ID NO: 15026 - DNA, 781 bp, Homo Sapiens
gggacgtcactgcaaggcgccgggggacacgttggctgcgttttcggcgggcttcccgggtacaaaaatggctgtggctagcgatttctacctgcgctactacgtagggcacaagggcaagtttgggcacgagtttctggagttcgaatttcggccggacggaaagcttagatatgccaacaacagcaattacaaaaatgatgtgatgatcagaaaagaggcttatgtgcacaagagtgtaatggaagaactgaagagaattattgatgacagtgaaattacaaaagaagatgatgctttgtggcctccccctgatagggttggccgacaggagcttgaaattgtaattggagatgagcacatatcttttaccacatcaaaaataggttctcttattgatgtaaatcagtcaaaggatcctgaaggccttcgagtattttactatttggtacaagacttgaaatgtttagttttcagtcttattggattacacttcaagattaaaccaatttaaattgtatgttttcaggctgtttgtatatttaattaagggatgggaggggttatttgtcatttacagtattggggtttttatgaatgtgaagcaaacaaaaaaaatttgtatgtaaactgaaaataagaaaatacattagcaagcttaatggttatccttacttgagtccacatgggttggacagtccccacacacattaaattctgtaaatgaaagccaccttttgttaaaaatttgctctaataaaacataccaaatcctgaaaaa

SEQ ID NO: 15027 - DNA, 458 bp, Homo Sapiens
gcagaggccttggaggaagaggactggcagttatgacaggaaggctctctatacctggctccccagtgttctgcccctggcactgagcatgaggagccaggctttggggagactttgcaatcacccccccaacctggtccattttccacagctagctttcttgaactcaccttgacccctcctcagccagcagcccccacctccaggggcaaaggagctgaaagacagtcctgaactggggggagctgggatcacatcagccaggccctgtccctcacaggaagtgagatgaggtgataccatggatggtgactaaggccccaaagtccctgcctctctgcctccccagaaacctcacagccaggccagcccccagagcagagcctgtgtaaacatgcccaggaggggaggaggggttgctacatatgagaaacagttaaaaataaatttaaaaagca

SEQ ID NO: 15028 - DNA, 1161 bp, Homo Sapiens
gggggaggagggagcgggagtcgagcgagagcctgtggaggagtccgcctgctgtagcgtgcgtaagcaaggcagctacgccgggcggctacgctgcggaatcggcgtaggcgcctttggagaatcggcgggctgcgctccgctggggctggtcgcggagggggggaggggatgtcggtcagtgcgagatccgctgctgctgaggagaggagcgtcaacagcagcaccatggtagctcaacagaagaaccttgaaggctatgtgggatttgccaatctcccaaatcaagtatacagaaaatcggtgaagagaggttttgaattcacgcttatggtagtgggtgaatctggattgggaaagtcgacattaatcaactcattattcctcacagatttgtattctccagagtatccaggtccttctcatagaattaaaaagactgtacaggtggaacaatccaaagttttaatcaaagaaggtggtgttcagttgctgctcacaatagttgataccccaggatttggagatgcagtggataatagtaattgctggcagcctgttatcgactacattgatagtaaatttgaggactacctaaatgcagaatcacgagtgaacagacgtcagatgcctgataacagggtgcagtgttgtttatacttcattgctccttcaggacatggacttaaaccattggatattgagtttatgaagcgtttgcatgaaaaagtgaatatcatcccacttattgccaaagcagacacactcacaccagaggaatgccaacagtttaaaaaacagataatgaaagaaatccaagaacataaaattaaaatatacgaatttccagaaacagatgatgaagaagaaaataaacttgttaaaaagataaaggaccgtttacctcttgctgtggtaggtagtaatactatcattgaagttaatggcaaaagggtcagaggaaggcagtatccttggggtgttgctgaagttgaaaatggtgaacattgtgattttacaatcctaagaaatatgttgataagaacacacatgcaggacttgaaagatgttactaataatgtccactatgagaactacagaagcagaaaacttgcagctgtgacttataatggagttgataacaaccaaatagtcacagca

SEQ ID NO: 15029 - DNA, 966 bp, Homo Sapiens
gacccgcgagcacctcttcaaggtgctggtgatcggcgagcttggcgtgggcaagaccagcatcatcaagcgctacgtccaccagctcttctcccagcactaccgggccaccatcggggtggacttcgccctcaaggtcctcaactgggacagcaggactctggtgcgcctgcagctgtgggacatcgcggggcaggagcgatttggcaacatgacccgagtatactacaaggaagctgttggtgcttttgtagtctttgatatatcaagaagttccacatttgaggcagtcttaaaatggaaaagtgatctggatagtaaagttcatcttccaaatggcagccctatccctgctgtcctcttggctaacaaatgtgaccagaacaaggacagtagccagagtccttcccaggtggaccaattctgcaaagaacatggctttgccggatggtttgaaacctctgcaaaggataacataaacatagaggaagctgcccggttcctagtggagaagattcttgtaaaccaccaaagctttcctaatgaagaaaacgatgtggacaaaattaagctagatcaagagaccttgagagcagagaacaatcccagtgttgctgatatatggcttctgcttctcttgtgtgtgcctcagctctgaagaagttcctgagaatgggttacagatgtcatgttagctgggagtcttcccacatgtggcacttcaaaaggcagcaccactgggcgcctgcacttatttgaaaatggaactttgggagaagtatccctgctagtggctctgtaacttaacagatgacaattaggcttttgtcattgttgccatcatatggaagataatgtttacatccttttaaacatttttatatgacaattcctcaggatttggtaaggcttccaagttgtagcttttagtgtaagtgctggggtggtaataaaatgttacctcca

SEQ ID NO: 15030 - DNA, 1969 bp, Homo Sapiens
  misc_feature (207)..(256): n is a, c, g, or t
  misc_feature (351)..(368): n is a, c, g, or t
  misc_feature (579)..(579): n is a, c, g, or t
  misc_feature (581)..(593): n is a, c, g, or t
  misc_feature (660)..(711): n is a, c, g, or t
  misc_feature (1307)..(1327): n is a, c, g, or t
  misc_feature (1779)..(1789): n is a, c, g, or t
gtagcctcgtcagcctgcgcagccttttcacttgaggcccagcccgagtgcagtccagaagcccccccagcggaggcggcagagtaaaagagcaagcttttgtgagataatcgaagaacttttctcccccgtttgtttgttggagtggtgccaggtactggttttggagaacttgtctacaaccagggattgattttaaagatgtcnnnnnnnnnnnnnnnnnnnnnnnnnnnnnnnnnnnnnnnnnnnnnnnnnnctcccctccccacagatcccatctcaaatcattctgttaaccaccattccaacaggtcgaggagagcttaccttcttcctctgccttgtttctcnnnnnnnnnnnnnnnnnncgcatcagtattaatgtttttgcatactttgcatctttattcaaaagtgtaaactttctttgtcaatctatggacatgcccatatatgaaggagatgggtgggtcaaaaagggatatcaaatgaagtgataggggtcacaatggggaaattgaagtggtgcataacattgccaaaatagtgtgccactagaaatggtgtaaaggctgtctntnnnnnnnnnnnnnaaagaaaagttattaccatgtattttgtgaggcaggtttacaacactacaagtcttgagttaagaannnnnnnnnnnnnnnnnnnnnnnnnnnnnnnnnnnnnnnnnnnnnnnnnnnncgatcatagtcttaggagttcatttaaaccataggaacttttcacttatctcatgttagctgtaccagtcagtgattaagtagaactacaagttgtataggctttattgtttattgctggtttatgaccttaataaagtgtaattatgtattaccagcagggtgtttttaactgtgactattgtataaaaacaaatcttgatatccagaagcacatgaagtttgcaactttccaccctgcccatttttgtaaaactgcagtcatcttggaccttttaaaacacaaattttaaactcaaccaagctgtgataagtggaatggttactgtttatactgtggtatgtttttgattacagcagataatgctttcttttccagtcgtctttgagaataaaggaaaaaaaatcttcagatgcaatggttttgtgtagcatcttgtctatcatgttttgtaaatactggagaagctttgaccaatttgacttagagatggaatgtaactttgcttacaaaaattgctattaaactcctgcttaaggtgttctaattttctgtgagcacactaaaagcgaaaaataaatgtgaataaaatggtnnnnnnnnnnnnnnnnnnnnnttattcattccgccctacctcccctttcccaccgcgcccccatcacctacccccttttcatacattattcaaattttgtggccgcctcccgcccccctaaagaaaatttttttaaaacaccttctgtgtttgggggcggggggcccccctccaggggcgacggggaaaccagggcgcttatacgcgggttttcctcccaaagaaaaaacacccgggggtaagagaaaaaaaccaaggcgtttggttgttctcctccccccacaataaacacaaaaacaccccgccggcgcggggtacaacacccacggggttctcttttcaaaacaaaactccccaaaagagagaggtcctcctacggagggggtctcctctctcgggcggctactactccacaccgagagggagtgtcttacaaggcggccggcgtgcaaacaaaaaaataatataaccgnnnnnnnnnnntcggtcgcacctatattcgagcaaagaaaagcgtgggtggtaaagtatattctataaacacaatttcctcgcgcccaccacggtggaatacccactccccataaaacggccggtgggagaagactctcgaacaccgcccgcgcggagaacacacgacacccccgtggccgcgcttcgagg

SEQ ID NO: 15031 - DNA, 1059 bp, Homo Sapiens
  misc_feature (61)..(69): n is a, c, g, or t
tcagtcgccagggagggataacccttccgtgggggggccacccgggacagcatgggaacannnnnnnnngttagagccggcggacccaggcccccaacactcggccctggaacccccggacgccaaaacaggccgccagacgagctcgcccagaccaccggccacccgtcacacccaacgagagctacgggagcgggctgggcagcgtcaccgtctcgccatggccgcagtacagtgacccggagctccggctcgatcttctgcttcaggactccatcttctggcctcgccatgcaccagcagcacgctctccggctctgcctggcccaccagctgcatgatgccctggcgtccgcgtgtgcgctgaatgacatgtactccaccgcatcttgacctccagcacctgccgcccctccatctcgagcttccgctgcccgctgaggatcttgtggccgacggtgccctgcacgcagtagccgggcatgatgaccatgttcttttcggtttccggcccatttccggaagatctgcagggactgcccagcgtgcagcattcctggcgtggcaaacacaaccatcggtcctgggttgtcagcaaaagcccggtcgaaggccttgatgtgcttgaactcaaacatgttcctctgcacgaaagtcttgcggatcttctggttggtccaggggatgaacagcttgtagtagtggttggccttctcggtcagccccgtggagaagtagatgggcaccttcaggttcatgcgctcccagaaggtctccaggaggatgcagagctcctgggcgcggcccagcgcgaacacaggtatcagcaccttcccaccacgctccacggtctcgtggactttcttcaggaagtctcgctcccggcagcgcttggagtcacggatggtcgtggcgtacgtggactctgtgatgagcaggttggggcggcacttgtcaatccagacagctcgtgtagaccacagactctgagcccactcttaatctggaacatggctgcccccagcacgtggcctgcatagtaggccttgatctccagct

SEQ ID NO: 15032 - DNA, 464 bp, Homo Sapiens
cggctttaccctgaagtccacaccctgacccaggtcaattatatgcgatctggggtccttaaaccctaatccataatcccatcaagaagtgctctgctgctcttagctctaaataattcagaatctatactcttctctccagtcccgtagttatagtctacactcatagacagcccatctgtatcaccatctcctgttgtatccagctccacaacaaacttctgccttccccaacacctttgtgcctttgcatatagtgtttacttgcccattttctgctcgactcgcccctgattttcaagttcaagaacttaactcagggttcaggtcttccaggaggccttacttatgtcgtcagtctggggaactctccatgtgcttctatcactgtgcggttacctctttcacagcccttttaaagttctatcttccctttcccaccttttttgaccttccgcctcagg

SEQ ID NO: 15033 - DNA, 835 bp, Homo Sapiens
gggcttccagcagggaaaatggcgctggccatgctggtcttggtggtttcgccgtggtctgcggcccggggagtgcttcgaaactactgggagcgactgctacggaagcttccgcagagccggccgggctttcccagtcctccgtggggaccagcattagcagtacagggcccagccatgtttacagagccagcaaatgataccagtggaagtaaagagaattccagccttttggacagtatcttttggatggcagctcccaaaaatagacgcaccattgaagttaaccggtgtaggagaagaaatccgcagaagcttattaaagttaagaacaacatagacgtttgtcctgaatgtggtcacctgaaacagaaacatgtcctttgtgcctactgctatgaaaaggtgtgcaaggagactgcagaaatcagacgacagatagggaagcaagaagggggcccttttaaggctcccaccatagagactgtggtgctgtacacaggagagacaccgtctgaacaagatcagggcaagaggatcattgaacgagacagaaagcgaccatcctggttcacccagaattgacaccaaagatgttaaaaggataacttcacagtaaatcatttctcctgaaatagaggaagattctttacgttgttgtgcttgtttttaaatcatcagtatagtttaacacattctttctaagcagttttgtgtgggataatttgaagaatatattatgagtaaactccgaaaatttgtgtttatccaaaggctcaatggattatgtttccattaaatacaagggtttaagtaaacctaaaatttccaggaa

SEQ ID NO: 15034 - DNA, 969 bp, Homo Sapiens
  misc_feature (55)..(106): n is a, c, g, or t
gggaggaggagcccggagctgcagccaccggggagccagacagggtctctgtcannnnnnnnnnnnnnnnnnnnnnnnnnnnnnnnnnnnnnnnnnnnnnnnnnnnttgggctcaagctatcctcccacctcagcctctcaaatagctgggactacaggcagcaaagcacctgctctgagtggccatggggaagcgatacttctgtgactactgcgaccgctccttccaggacaacctccacaaccgcaagaagcacctgaacgggctgcagcacctcaaggccaagaaggtctggtacgacatgttccgagatgcagctgccatcttgctggatgagcagaacaagcggccctgcaggaagtttctactgacaggccagtgcgactttggctccaactgcagattttcccacatgtcagagcgagacctgcaggagctgagcatcccaggtggaggaggaaaggcgagccaaggagtgggctactagatgctcctgagctccccgagggccatctggaggactggctgaaaaagagagccaagcggctgagctcagccccaagtagcagggctgaacccatcagaaccactgtcttccagtaccccgtgggctggccaccagttcaggagctgcctccatccctgcgggcacccccacctggggggtggcctctgcagcccagagtccagtggggctgagccccttgcccccgactgacccccacgtggtcacttttctcatcagtcacaataggaagccaagcccggttcctgctacgccccatggaggctccgagaccatctgcccagcctcactgaggctcaggacacggccacaccaagtgcagccctcgtcctgggtctgcaccgggcagctctcccctcactctcctccacctgcccccctgcttcttaagaagatgggggagaaaacttccaaatgtttataaagaaagtctgtcaccccg

SEQ ID NO: 15035 - DNA, 1774 bp, Homo Sapiens
ttggtacgctcggatttccgggatatcgtcggaaccacgcgtcgagaaagtacctgcaaaaacctatcactatgttgttggtaactaactcaagaatttctaaactctcccaggtcacactgattcattcttaacaagatatttatatgttattaaacaggtggttctttttattttaaccagttatttttattattgagtctgtccagataagttatttataatgggcattactgaatttttaaaatgccgattacacccaaatattgtgcacatttaataatcagacaccagatttttagctctgtactcctaattaagggacatgtatgtggccttgcctagccctttggtgataagtacttcctctaggaaatgtacgataggtagaattgtggttccctaaagacaagtacataaaggtgaccctgatgaaaccttgaagttctgaaatttaactgcctaaaatgttctccttagatgtgagagaaagagaaatcagaaaaattaattctcttgggggaagggcttgaattgaagctttactttagaatttagccctggtttgaaattttccattacatgatcttggtttatcatcgatgggaagggtagaaaacttcaaggaaaataagtgaaattttaaaagtcagcattttcttagacctcttcagctgattgtttatttttctatgaattcctacacatggttattcccccctacttgagataatctaaatataaaccagctacttgatgtaactgagaatttgtgtggatatttatttaaacaaatgtgtaattttgagtacagaattcaacagttacctccaaaaaagaaacattgttaatataatttaacagaagttgtgaaactaaaattttctaagattaactggtagttcattgtaaatgaacataatgaacagaatttatgactccactgtggaaaatgctatcaaataactaaggaatatatatggaataagtgtacatatgtaaaatattgttactagagttagatatgtgccaaagtccatttatcccaaatcctgtctgaaaaggaggggtacattggtaaacattttggagtgcttaaaaatgccaaaaacaaaatggtaatttctactttgataaagtaaaaaagttaaatgtgtgtaaaaaagtgttctgtgtccttctactccagcatcgtctcatgtaaaataagaaagccctaaaatactattggagagaaaaaattaactaggttgctactttatttgcctaaatacttttttctattttgttagattttgcctttcttttggaaggaaggaggcgatattctggattataaaaatgaattgggaacattatcacaattccagactttctattaatatttatgtgttttaataaacgtttgaaattatttatgactacttaaaatgaatctgaccagtgcttcctggtatatgtaatatgtggagttagcccctgaaatttgctttaagtgtttcagtgttgaatctgtttctaaatattcattattacatggtacacaagtgacactccatatattccacacagacttttaccttgctgtattattatgaaaacaatacattaatttgatttttcagtaattagtaattttaggttgaagattatccaaaagaaacaagcttatcacaagggaccatcatcaatatgatccaaatctggttcaaacattcaaaacttcaaagataattcatctttcgctaatgcttgtggttctgttgttcccttg

SEQ ID NO: 15036 - DNA, 282 bp, Homo Sapiens
cgatccgaggattcgccccaattaacctcactaaagactctcaaaccatacctggtgggggttcttcgctcaacctcttcttccctaggtcaaagccactatcatctgatgtgttagggatgggttctgattggcagaaattaatcagctcccaatgggagcccacggaactaagtagggtcccaagaaaaaaaacgggagctatttcacagagctgagcttctgccaaatcattcactcaaacctttagtgaggtaatttgggcgaaatcctctaacagcc

SEQ ID NO: 15037 - DNA, 1804 bp, Homo Sapiens
  misc_feature (1307)..(1331): n is a, c, g, or t
gggtgcgcgggtcgcggtgctgtgaggtctgcgggcgctggcaaatccggcccaggatgtagagctggcagtgcctgacggcgcgtctgacgcggagttgggtggggtagagagtagggggcggtagtcgggggtggtgggagaaggaggaggcggcgaatcacttataaatggcgccgaagcaggacccgaagcctaaattccaggagggtgagcgagtgctgtgctttcatgggcctcttctttatgaagcaaagtgtgtaaaggttgccataaaggacaaacaagtgaaatacttcatacattacagtggttggaataaaaattgggatgaatgggttccggagagcagagtactcaaatacgtggacaccaatttgcagaaacagcgagaacttcaaaaagccaatcaggagcagtatgcagaggggaagatgagaggggctgccccaggaaagaagacatctggtctgcaacagaaaaatgttgaagtgaaaacgaaaaagaacaaacagaaaacacctggaaatggagatggtggcagtaccagtgagacccctcagcctcctcggaagaaaagggcccgggtagatcctactgttgaaaatgaggaaacattcatgaacagagttgaagttaaagtaaagattcctgaagagctaaaaccgtggcttgttgatgactgggacttaattaccaggcaaaaacagctcttttatcttcctgccaagaagaatgtggattccattcttgaggattatgcaaattacaagaaatctcgtggaaacacagataataaggagtatgcggttaatgaagttgtggcagggataaaagaatacttcaacgtaatgttgggtacccagctactctataaatttgagagaccacagtatgctgaaattcttgcagatcatcccgatgcacccatgtcccaggtgtatggagcgccacatctcctgagattatttgtacgaattggagcaatgttggcttatacacctctggatgagaagagccttgctttattactcaattatcttcacgatttcctaaagtacctggcaaagaattctgcaactttgttcagtgccagcgattatgaagtggctcctcctgagtaccatcggaaagctgtgtgagaggcactctcactcacttatgtttggatctccgtaaacacatttttgttcttagtctatctcttgtacaaacgatgtgctttgaagatgttagtgtataacaattgatgtttgttttctgtttgattttaaacagagaaaaaataaaagggggtaatagctccnnnnnnnnnnnnnnnnnnnnnnnnncatttcaaaattgctgccagtgttttcaatgatggacaacagagggatatgctgtagagtgttttattgcctagttgacaaagctgcttttgaatgctggtggttctattcctttgacactacgcacttttataatacatgttaatgctatatgacaaaatgctctgattcctagtgccaaaggttcaattcagtgtatataactgaacacactcatccatttgtgcttttggttttttttatggtgcttaaagtaaagagcccatcctttgcaagtcatccatgttgttacttaggcattttatcttggctcaaattgttgaagaatggtggcttgtttcatggtttttgtatttgtgtctaatgcacgttttaacatgatagacgcaatgcattgtgtagctagttttctggaaaagtcaatcttttaggaattgtttttcagatcttcaataaattttttctttaaattt

SEQ ID NO: 15038 - DNA, 725 bp, Homo Sapiens
ggggccctggcccggccttgccttgcgctgcgcgctcaccatggtgggccccgcgccgcggcggcggctgcggccgctggcagcgctggccctggtcctggcgctggccccggggctgcccacagcccgggccgggcgagacaccgcgccctgccgagcgggggcccccagtgcggcttttcaccgaggaggagctggcccgctatggcgggaaggaggaagatcagcccatctacttggcagtgaagggagtggtgtttgatgtcacctccggaaaggagttttatggacgaggagccccctacaatgccttgacggggaaggactccactagaggggtagccaagatgtccttggatcctgcagacctcacccatgacactacgggtctcacggccaaggaactggaggccctggatgaggtcttcaccaaagtgtacaaagccaaataccccatcgtcggctacactgcccggagaattctcaatgaggatggcagccctaacctggacttcaagcctgaagaccagccccattttgacatcaaggatgagttctgatgttccccctgcaggagcaggttcttgggagcgtgaggcaggaagacactaggtgctgaatctcctgcaaaactggctgcctggaggccctgaaccacccagatctgaataaaacagatgcttaccctggtaaaaaaacaaagggagataggaagaaaaacctgt

SEQ ID NO: 15039 - DNA, 1600 bp, Homo Sapiens
  misc_feature (306)..(306): n is a, c, g, or t
  misc_feature (915)..(973): n is a, c, g, or t
aaatgggttatccctaaagctttatcttgcttgcgttagctgtgagaagtggttctcttcctctggtcccttctgaggactctgtttccccatttcttgctgctgtgtccctcaccagttccttgcagaattccctcctttttaaatgcccttgaatctagctttgccttggagaccccagtgcgtgctgctcctgccgtaatcttcctgccaagccctgaagtcaatgtttcatctccaaaccctctgccagtttggcccctcagagcttggtggctcaagactgttagcctggcagagccaggngtgaagggagaagctcttggagcaggcaggatgcccaccgctgcttcagtgcctcctcgcccagctaccctttggccccattgggcctcgtctgcctctccaggattgtatgattcaagccttgtcctgtgttcctttgtctgatgctctgtgtattgctctttgaatcgagtttggaggaagagttgagttgtatgagtggcggcatgttggtagtgccggacttcctgtttcaagttttctggggcctcgctaattgaatgtggaaagtagcaccacttgacggctacaagtgccgactcctgaattttcccatggtgttctgacttcaagggctggcagccagggagaatgggcccaggggaagcaaagacctcttccctctgcggtttctgtcccacttaactgacctcactggaggctacgtcacccaaagtagatgttagaaaacctaaattaatgaaccatatttttaaaatcctatttttcccaaacagggccctctgcagcccatcctttccttccgtccttctgaaaccacataccccaggcccaagcgccttgctgtcacgcccaacctctttgggagaagtatgaatgcgtgtgtcnnnnnnnnnnnnnnnnnnnnnnnnnnnnnnnnnnnnnnnnnnnnnnnnnnnnnnnnnnngctaaattgccttttaaattccttcaagcttggttcattgaggtggttaagtataaatgctattaactaggaattagctgtatagttaagttatgcctgtgcaaagaagaggctcaaatgctgtccccggcagctttcctgggggactagagctccttctggccatgttatacgaaatgtaattcttattttataaataatgtgatgtagatgtaaccggtgccccctccccgttgtgactgagggcgagtgttatacctggctgcgtgtgcagctgaggagggagtgaacctcaagcctaaatacctgttaggattggagggtctgggtgggcctgggcctagcaatcaagcttctacctgtaccttatgtaaggtagaccctcctagtgtcagtacctgagcttgtttacctcagttccgcaggcaggacagccggtccgggaaccctgagtgagagtgagtgtggatgtgtacagtacacacactggacggcagcgggaggctgggactttccattacaaatagagacttcattcctgttgagtctagttggaatttttagtatgaatgtgagatttttctcctgcttgtgacattaagaataaaaaactgtgatctatctaaa

SEQ ID NO: 15040 - DNA, 894 bp, Homo Sapiens
ggggcctcgattggtcgatcctgggccagcatggcggcgcccatgtaacccggtccgtgccgcaaagcgaacggcggccgcggcgcgggccccgcgggggttagaggtcaccatgctgagggtcgcgtggaggacgctgagtttgattcggacccgggcagttacccaggtcctagtacccgggctgccgggcggtgggagcgccaagtttcctttcaaccagtggggcctgcagcctcgaagtctcctcctccaggccgcgcgcggatatgtcgtccggaaaccagcccagtctaggctggatgatgacccacctccttctacgctgctcaaagactaccagaatgtccctggaattgagaaggttgatgatgtcgtgaaaagactcttgtctttggaaatggccaacaagaaggagatgctaaaaatcaagcaagaacagtttatgaagaagattgttgcaaacccagaggacaccagatccctggaggctcgaattattgccttgtctgtcaagatccgcagttatgaagaacacttggagaaacatcgaaaggacaaagcccacaaacgctatctgctaatgagcattgaccagaggaaaaagatgctcaaaaacctccgtaacaccaactatgatgtctttgagaagatatgctgggggctgggaattgagtacaccttcccccctctgtattaccgaagagcccaccgccgattcgtgaccaagaaggctctgtgcattcgggttttccagaagactcaaaagctgaagaagcgaagaagagccttaaaggctgcagcagcagcccaaaaacaagcaagggggaaggaccccagaccgccctggcccaagcccatacaaagacccttcaagacagcccaataaattct

SEQ ID NO: 15041 - DNA, 665 bp, Homo Sapiens
agaggatcccccagtacagcagtagcagcagtaatctgtcccggtccaacgcagcttcagaccttacatcctcaggctcttctgttgctttgggagtagttgcttgttgaggctcagcatgaggatagggatctgacccccacagcatacgaggctcagaaagggaaattgcgtgatctcttgcagatcgagctatatgctcaaatgactcagaactgttcggtgacccttccatctggtctcttctcattaatggtttaggaggaatcattccaggatgaatgggtggaatatccatagcaggtcttcctgacatcattcgaggatccatgtaggactgcatcatgagccaccttggatcaaaacccatagaagccaaatgctgaggatgaggctgcataggctgataaagaggtctgtgtggtggaggagggacagtactactggacggttgtgaaggaacagtctgaggaagtacaccttgctgttgctgctgctgccactgctgctgtttcatctgttcctgctgccgctggaatcgtggaggtaaagacttctgaaactgtttgaaatagccagataatacagccggccgaggttgagaccctgattctggttctgtttcatgcaccactggtgttggcttcagaatggtggggtcctct

SEQ ID NO: 15042 - DNA, 605 bp, Homo Sapiens
gggaagcacatgaacatgaagccggccactgcctctgctctgctcctgctcctgctgggcctggcctggacccaggggagccacggctggggtgcggacgcgtcatcactgcagaaacgtgcaggcagagccgatcagaactacaattacaaccagcatgcgtatcccactgcctatggtgggaagtactcagtcaagacccctgcaaaggggggagtctcaccttcttcctcggcttcccgggtgcaacctggcctgctgcagtgggtgaagttttggtaggcaatttcttgcaaccaccaccgaggccccgaaaagcactggtcgtcagggagctcctccccttggcccccagcctgtgccagccctggcccggctgccacacctctgtttcctaggctggggacccagcttgtctctccttgtttcttcccactgcactgtggtgcttcagtggccaccagcctcgtcacatacaccagcatctttctgtacctcctccctttggtgacctgaagtcactgtgacagttctccaggaaggaggagcttcctacttttgagtttctctgtggaaataaaacatgaatcttgtttccctaaaaa

SEQ ID NO: 15043 - DNA, 667 bp, Homo Sapiens
ttgttgttgtcattgatggtggtgacatggacttgtttatagaggacaggtcagctgtctggctcagtggtctacattctgaagttgtctgaaaatgtcttcatgattaaattcagcctaaacgttttgccgggaacactgcagagacaatgctgtgagtttccaacctcagcccatctgcgggcagagaaggtctagtttgtccatcagcattatcatgatatcaggactggttacttggttaaggaggggtctaggagatctgtcccttttagagacaccttacttataatgaagtatttgggagagtggttttcaaaagtagaaatatcctgtattccaatgatcatcctctaaacattttatcatttattaatcctccctgcctgtgtctattattatattcatatctctacgctgcaaactttgggtctcaatttttactgtgcctttgtttttactagtgtctgctgttgcaaaaagaagaaaacattctctgcctgagttttaatttttgtccaaagttaattttaatctatacaattaaaaccttttgcctatcactctggacttttggattgttttttacattcagtgttataatatttgattatgctgattggttttggtgggtactgatgtgaattaataaaaacatttcatttcc

SEQ ID NO: 15044 - DNA, 1677 bp, Homo Sapiens
  misc_feature (1622)..(1630): n is a, c, g, or t
cgacttcggagaggcagcgcggttcctctgggtgcttcctgcctccccttctcctgcttctccagcctcttcggcctcctcgcccgcgcgggaacccgagaccccagtgtatgccccacccctgaccccgctcgcgacatgtccaccccggctcggcggcgcctcatgcgggacttcaagaggttgcaggaggatcctccagccggagtcagcggggctccgtccgagaacaacataatggtgtggaacgcggtcattttcgggcctgaagggaccccgtttgaggatgtctatgcagatggtagtatatgtctggacatacttcagaaccgttggagtccaacctatgatgtgtcttccattctaacatccatacagtctctgttggatgaacccaatcccaatagtccagcaaacagccaggctgctcagctgtaccaggagaacaaacgggaatatgaaaagcgtgtttctgcaatagtagaacaaagctggcgtgattgttgaccccgggtacagtttaacagaagctggccataagaaaaatatatattgatgtgttggtcacctccctactcctgtcattacatttactttattaaaagcaaaataactgttgtgctgtttccatcttccttgccaagttttcctaccccttctaccctctccttaaacatcagaaaacaccctctatgaaatcaaatgtactgtacctgggtgacttgcaaaaattactaatgcttcagtttttctgttgtatttcatttccagttttcaggcagttatttttattattgtactttaagcttttaagatgaattgttatacaagaggtgcttatgcttagcttgatgaccaggatgttatttttaacaaaatgattgctgaagtgtttcatcctggctggtccttcacttgtgttggatttagaagtgaatgtgtttggaatatggcctacagagaatagaaacaaatccatgtaaacaattttgaaggaggcatgggagctaaaaatcctgtgatactaagatctcagtcatatgaattacaacgtagtatttactggcaagaaggagaaagttgaaggactcagctaaaggagtacagcaattgtagtaactgacacatcctctctttgcaagctgctgactgggcacactcatgccaagtttcagaattattggtcttctgggtttttgctttttaaaagaggtgtgggagcagaggaatggaaacaatcgtgagtttttgagctagggaaagttggagctcctttaatctttttaaaggatcagtgctgccctaagtgaataaactcaattgtccatctttattttagagttttaatgaattcaaggaagggagcatagcatatctgtggcaaactattttccactcaaatcctgagttattgctgcatgctttaatttcttccctttcagcatctgagaaccttaaagccaatgtctgcgatctttttttggatatttatacttttagatatatagtacctttaagtagcagtatgggacaaggcttgtaaatgttttgtctaatgttctattgtcaccttttatgcatttatcacttccaaatctaactttgcacaagtaacccatgtnnnnnnnnntgtacatttttcaaaagttgtaaataaaaataaccttaaaatttcat

SEQ ID NO: 15045 - DNA, 924 bp, Homo Sapiens
  misc_feature (140)..(277): n is a, c, g, or t
catctttgaatttggctttatttatgttccctcattattaggcatcacataagggaaataagtatgctaagagagatgacagaaggactaattttgatggttaacttaggaagtttcttggtatgagaaaacaaaaatannnnnnnnnnnnnnnnnnnnnnnnnnnnnnnnnnnnnnnnnnnnnnnnnnnnnnnnnnnnnnnnnnnnnnnnnnnnnnnnnnnnnnnnnnnnnnnnnnnnnnnnnnnnnnnnnnnnnnnnnnnnnnnnnnnnnnnnnnaaggaggaaaacctaaaactctctccatcagatagagcaaaaaagaagagtgtcacaaggtcagcaagatgaaacaacagtttctgatggctccaacactaactgtctctcccaagtattttaaagaaaaaaagcattctacaaacaaagatataaccaacaagttatattattttttattcatgttagaatttctatcagtgtttgaacattaattatttagagagtttgtacattttcaccttccaaggtttgaaatgagaagcatgctaggtcgccaatggtaactaataaacacttcataatcgcatgaatatccactctgctctgactctcttaacactgttaaacattttctttccttgctgtaatttacaatgaaaactgtgcccactcatgtctcagcaaagttccagacattatggattcatcacatataaattctttaaaaatatacttctgtcaaaaaacttgatgactactatgtacactacaaaaataaatcttcatataaataaattatatggcatacttttatctttgtaattgaaatgacacaaactcatttccaccaaaattggcaatgagacccagtttgaatatttatttcctttaaactccttaccctaaaacctaccatgagtcct

SEQ ID NO: 15046 - DNA, 1072 bp, Homo Sapiens
tgcacacgcgagcgacatacgcaacaacttctccattgtgatctcacacgcgaatgcccacacttaatattcttttttagaccaatttagctggaaatctattacttaacccacattcattgatatcatagtcttgtcttatatttctttgccctaggcaggatttttctgtgattctggattgggtctgactacaagcctgaagatatccttaattaataacagggcaggaagaattgagtggggaaagaaggccttcggacagtagataagtatccaaagcagtgtgggcaaaaagagtaagccaacatccccttgggatttttcccatgtgggtatcactgagcaaagctgctgtgggaagatatgtagattaatgggaaatgcagggttattatggaggaaataactcacaggatgatttcatagcctggctaaattactacttgattaactcctgataaaactcagagcgcacaaagcgaggcagagaatccttttccatcagggcatggattcttttctgggccatgtcaaagctgctcagggaaggttccaccaggttcttcattgtgatgtccttagtgaagtggtcaatattcacctctttaggagcctccgtttgaatgaattcttcataaatttgctttgccttctcagccatcttggcaggggacttgatcttcttgtaatcctcacaggcaatccagaactcaaggttttcctcactgaattcagacttcaggaaacttttgaaactggcaagtccatagttgttctgcaggagtttgtccagggaatcacgccactgcagggcctcgtccagcgaggttttctgggtcttggctggtttctctggcttctcattgtacggaatgacaaggtcaccaactgagtctggcttctggaggagaattcccaacttgatcttaatctccttggccctttccaggcatgagtggggcaaagctgcaagtcctttgcacattttggcaggtggcttagctcctccgctttaagtacaacttcttaacagcagagccagtctttgaaaacttcaaaactgtctccc

SEQ ID NO: 15047 - DNA, 1656 bp, Homo Sapiens
cctgggcaacttcatcaacagagctgggatgtttgtgtctaagttctttgggggctatgtgcctgagatggtgctcacccctgatgatcagcgcctgctggcccatgtcaccctggagctccagcactatcaccagctacttgagaaggttcggatccgggatgccttgcgcagtatcctcaccatatctcgacatggcaaccaatatattcaggtgaatgagccctggaagcggattaaaggcagtgaggctgacaggcaacgggcaggaacagtgactggcttggcagtgaatatagctgccttgctctctgtcatgcttcagccttacatgcccacggttagtgccacaatccaggcccagctgcagctcccacctccagcctgcagtatcctgctgacaaacttcctgtgtaccttaccagcaggacaccagattggcacagtcagtcccttgttccaaaaattggaaaatgaccagattgaaagtttaaggcagcgctttggagggggccaggcaaaaacgtccccgaagccagcagttgtagagactgttacaacagccaagccacagcagatacaagcgctgatggatgaagtgacaaaacaaggaaacattgtccgagaactgaaagcacaaaaggcagacaagaacgaggttgctgcggaggtggcgaaactcttggatctaaagaaacagttggctgtagctgaggggaaaccccctgaagcccctaaaggcaagaagaaaaagtaaaagaccttggctcatagaaagtcactttaatagatagggacagtaataaataaatgtacaatctctatatacaagctgagacctttccttttgtctactccaagccttccccctgcgtatgtgggattgagggtcacatcattggcactagtgagagggtagtcagtagccacttctgggaaaggtgggtagtgtggcccaagtgggggactgatgctcccaattgttcatgcttggtgcagattcaccattcggtcaatcagagctcggcgagtcgcctctacttccctggtcaggcgctcgatttcctgcttgagccgttcattctcttcagctagctgtgccactttcctttcattctcctgttctttctccttcatgcgctgctttccagcccgggctggggaatgaccactctgtttccgtttcctggttctcccttggtcttcctcctcttcctcctgagccagggagctctgactggaatctggagagtgagggctctgggaggtgcttgtgacctctgctggttctggctcctcctcagtcagccaagccagagaagcagggtcaagagtggtgaagatttttgattcttcctcttcatttccaggaggtgaaacataggtacccccattttcatctgaagacaggacctcttgcaggtcctcataccaggcttccagctcccagctggacagtgtcccgaaggagaaaggcaatgactcagctgccatctctgcagttggatcagtctggaaaagcacatctgctttcaggtgtggtgatgtatgaagatacacttccttcttgaacactctctcctcaggttccagctctgattttggctctgtcgctgccacccgctcatctttaacatgatacgctcagtgccttag

SEQ ID NO: 15048 - DNA, 847 bp, Homo Sapiens
  misc_feature (731)..(735): n is a, c, g, or t
  misc_feature (737)..(745): n is a, c, g, or t
  misc_feature (748)..(751): n is a, c, g, or t
gggggcggcttccgtagcgggagggcgaaagatggcggcggcagtactgggacagttgggtgcgttatggatacataacctgaggagccgggggaagctggccttgggtgttttacctcaatcatatatccacacaagtgcttctcttgacatttctcgaaaatgggagaagaagaataaaattgtttatcctccacaactgcctggagaacctcggagaccagcagaaatctaccactgtcgaagacaaataaaatatagcaaagacaagatgtggtatttggcaaaattgatacgaggaatgtctattgaccaggctttggctcagttggaattcaatgacaaaaaaggggccaaaataattaaagaggttctcttagaagcacaagatatggcagtgagagaccataacgtggaattcaggtccaatttatatatagctgagtccacctcaggacgaggccagtgcctgaaacgcatccgctaccatggcagaggtcgctttgggatcatggagaaggtttattgccattattttgtgaagttggtggaagggcccccacctccacctgagccaccaaagacggcagttgcccatgccaaagagtatattcagcagcttcgcagccggaccatcgttcacactctatgatgaggagattcagactccacagtgtatatattttgccatttattttctaaaaataaacaaaaattgaaggccaaaaaannnnnannnnnnnnnaannnnaaaaaacatggtcgggccgcccctcggcccttcgaggaagcttttcctagaccatttcggtttggcggcgccgggccccacctagggtaaagtgac

SEQ ID NO: 15049 - DNA, 2970 bp, Homo Sapiens
  misc_feature (819)..(828): n is a, c, g, or t
accatgttttctttgtcccttttctccccccctcgggattgttaataaaaacatttattttgcattttatacagaacaacctgaagtctccatcatgacttgacagttacccaggggtttacagtgtgtccaactcaacagtgtggttctgggactgggtatccacacaaacacaggcaggagtttggaggaaagatgggggcacagcaggagtgtatcttaatcctttctcaaagaaaaagaagtagagcattctgagttgctgaaaacctgtgcaaatggggcttctgaaacattgtactgtgagctctcagggaaagggaggaaaaagatgttgataaataaggaggcaatttcttgaggcaggggacgaggagggaggcttactatttttaatgccctcagccccagtacctgataatcagaggagaccatgtccaatcttgaatcaattccctgttcaaaaagaggtgctaataccccggggacaagactctgaaaatatcatgctggtcattccggagttctatgccccacagcatattaaaagatgggggttggtggggggtggggaggtcagaaggtagtggcttgtattctgtggaagtaaaaaacttagttcaccattaagccacctgataaaacccaatgactgggcccacagatctgttgagaggtctctagtagggaccaagagggggaggtccagaacatcctctgcctgaggtgcaacaggtgtagaaagtctgggaggaggtgagtattaaagtaatgggaaacagaacactcccagaccttaattttaattggatagttttnnnnnnnnnntcaaacattgggtgccagtcacaacaaatgccatgcctttatggtcacttggtagtataaaaaaattgccaaagcatgtccagctaaccaacaggtcttgctaggaggtgtttgtgtgcatgggagagggccaaggggcttggtacagctgactatccaacatgattccttatggaaacagaagggggcagagtcctggtttgctggcttattgagggcttggcagagaagctaaagctccaaagtgactacagattctctgcaaccggctttgacccatggaaacaggagccagattctcactctagagatagtgagggggccaaacctactcataccacatgcattagtcctggtcatcctccaggaccatgcgtatgatgggcaactcataccaggcaggggaagggagctgattagggaagaagggaccatttttcatcttttaaagtcttaatttatattttaacctcaaacatattatcagtgcctcagatataatttaatcttaagtctttaaaggccccctgaaacaaaagtatactttttatttaggcttcctcactttctggtagtcactttcacccagtctccagttttaccctgacttagagtccacaaacttcatcagaccctctgtgctcatggacttgggcctttctagagggaagcctaaggctcggctccagatgagctgtgccagtacacccaatgctcgtgacaccccaaacaggaccgtgtagtaattcatctccgtcatgccataatactggagcagcaccccactgtgagcatctacattgggccaaggattcttggctttaccctgctctaagaggacattgggcacaatcttgtacagctgagcaaccaacttaaacatggggtcattaggcaggtgtttcagagcaaactctcgctgacaggtatatcgcggatcagtcttccttagtactgcatggccatagcctggaacaacccgtcctgagttgagtgtgttccagatgtagtctcgtaacttctcatctgacacatctttgccaacttccttctgcagctgtgttagccagacaagcacttcctgatttgccagtccatggagaggccctgccagcccgttcatggctgctgcaaaggacaggtaagggtcggaaagggcactgcccaccaaatggctggtatgggcacttacattgccaccctcatggtcactgtggatggtgaggtacaggcgcgtgagctcagtgaactgatgatcagtatagcctaacatgttggtgaaattgtgagaccagtccaggttagagtcaatggccccaataccgctgccttctctgtagagatttcggtagatctttgctgcaacacaaggtagctttgcgattagatccatagagtcttcataaatcaactcccagtacttggttcggctgataccctgtgcatatgctcgggcaaagttactttcactgttgagggctgtaacagctgcactgagctgagacatggggtgtagattggtgggaaagttgtccagcatggtgaccacatgggaaggcagagctgccctctttgcccactcttttgagagccaagatacctgttcctctgttgggatatgtccagttaccagcagccaaaataagccctcaggcaggggttcttccccacccttagccttgggtagcagtttctggcattcagggatactaaagcctcggaaacggatgccctcatcaggatcaagaactgatgtttcatagaccaatcccttcatgcctctcatgccaccatacatcatgtccacagtgatttggcccaccaccgtcttgccatgttgctgcctgaaagtcttaattctggcctgctccttaggtatcaggtcagccaatatgtctttcaaattcgtggaggaagcactggcatgccgggctgcaagaacaagacaagatgcattcttggttcccaagagccgggcggccgcagtaagtaaagccatggcgggcgatctccgggatctggtggggaggtaagaaagggagagagctgcggcaggaacaggagccgccgccgcacctcgtgccgaattcgccacccaggcctcgctaccgtaagtaccgctttaattatgtgttaagctag

SEQ ID NO: 15050 - DNA, 776 bp, Homo Sapiens
tcttctagctgactctagaggataaaccaaggtaagtcgagaccggcatagtgggcagagctgtttcctgagtgtgaaagagcgcacacacatgcacccagcttgggtagaaaataagcgcgtggtgctactatgggaagtgactttccagttcacttgtgtatcaaatgaacatgatgaaatcaagttgtactagccaatgtttgggagggttctgtattaaagggataaagaaaaacattagaaagagaagttacaaaaatcactgtggggaaaatgaacaccaatgacttggctgctctgaggcttgcagggagtagacagttaggcatcccaggtcatcagagaaccagtggggtcttttcctcaggggccgggttttctacacgcaagtcaaacctcttctcctctgggacacatgtttccaaaggactccagaaacacagcacagctggattcaggtactgtgtcaagatgtgccttcttcttcatctttgacagcaattaatgtactaaatgtcttgatagagaaggtcatatttgggaatattcttgggatcaataggactttggacaataagcttccccctcattgctcctcgatagattacttcaatcaaatctatgaagtcttgtttggttttgaagcttcccaaaaacttagtgtgatctggagatccaaaacccactttcatatgctgcccattgaagaaaaagacagtagatggaatataactgatgtcaaaaaacggggtaaaaactgacatttggcccac

SEQ ID NO: 15051 - DNA, 993 bp, Homo Sapiens
aagtgctctcggcggaagtgatcgctgtgtgaatcgtgggtgggatggccgcgggccgcctctttctaagtcggcttcgagcacccttcagttccatggccaagagcccactcgagggcgtttcctcctccagaggcctgcacgcggggcgcgggccccgaaggctctccatcgaaggcaacattggcctgcactgccccaaagtcttggaaacttgctggatatgatgtaccgggaagccagcacgatggtcctacacattccagacattttcctttttgagccgcctgaaagtacagctggagcccttccctgagaaactcttacaggccaggaagccagtacagatctttgagaggtctgtgtacagtgacaggtatatctttgcaaagaatctttttgaaaatggttccctcagtgacatcgagtggcatatctatcaggactggcattcttttctcctgtgggagtttgccagccggatcacattacatggcttcatctacctccaggcttctccccaggtttgtttgaagagactgtaccagagggccagggaggaggagaaaggaattgagctggcctatctagagcagctgcatggccaacacgaagcctggcttattcacaagacaacgaagctccactttgaggctctgatgaacattccagtgctggtgttggatgtcaatgatgatttttctgaggaagtaaccaaacaagaagacctcatgagagaggtaaacacctttgtaaagaatctgtaaccaataccatgatgttcaggctgtgatctgggctccctgactttctgaagctagaaaaatgttgtgtctcccaaccacctttccatccccagcccctctcatccctggagcactctgccgctcaagagctggtttgttaattattgttagactttgccattgttttcttttgtacctgaagcattttgaaaataaagtttacttaagttatgcttgtttttctaaa

SEQ ID NO: 15052 - DNA, 1149 bp, Homo Sapiens
gttgacaaaaggtagtgtggtcttccaaaatatttcccaaccgtatcttcattggttataaccacaatgttcagggcccaatataacgtgtggagtctccccgccaagttgcttctcataccacatactgcacaggccacggattacaccagccctttgtcagggaggctcgtacccaaaccaaggccctgagaaattgggtacccggaatttggccgggaagggcttcttgttcaattagtccgccgactctgggaagcaggtggagggttatgcgaaggatggtaagtcaactggaaatatcgtcatatgcaccgcgaaaccatagtatacagcgcacacgcgacgagtcttgtctttatcaagtagaggaccatcaggaccagggaggcgacaatagagtccgcattaccgcggctggatactgccataggcatgggggttaagaagccaaaagacacagtagccacaatgcctggcggcgccccagccccttcagcagcagcaggcggtataagatggataagtcggtgaggaggtcgcagctgatgaagagaaactttgccaaagagctcgctgaggtagatgttgggagtgaggagccaacccagcagtcggggtgtatacggtacgtggctctcaggtaaggcgagcgcccctccgtgacgaagcgcgcggcgtcggtgaagacctggtagtcgatgtccgtatacctcatcgtgcagggtccaggtcctggaagactgccatagaaaaccagggcgactctggctagaaaggccacaccaaagacgccggctggagccaccttcaagttcaggagccattcgccccagtgcttggtggagcccatgatctgaccgtgcgacagctgcttagccccagctccaaactgccttcgtacttctaaccttcccttcggttctttgcagcaggtgcacgccgcatctcccacccgccaggctgccaaccgaaacgactgcagactatcacatccggcatgaagccccgcccccgtactgctacctgtctccagccccgcgcggtcttctcagccgcccgagccttaaaacttgccttcctctggatggacggtctcgcttccgcgacgcgtggtcgacgatatcccggaattccgacgcgagacca

SEQ ID NO: 15053 - DNA, 1622 bp, Homo Sapiens
  misc_feature (413)..(415): n is a, c, g, or t
ttggctcagccggaattcctttttcccggtggggaccatggggcaggaagcgttttctggggatttttaagggggggcccccaattttcctcaggaggacaatgttccatgcccttcagggatggcttggttcccccaaaatgggagaaaatggggcccttgaaagaggtagatgtgaaggtggcaggatcccagaggccacaagggaggcaggtattcctgtgcccctggatttaccatcgtctgggggggtaaagagggctggagagctgcaaaccactgggaggcaagggttcagggctggactcagagcagtcagagctgctggatttcagggccccccaaggggaactgctccattcagttgcaaggcagcagcctgggcggcggcgggcggcagcagcagcagcagnnntgcttggcagttggattccagcgccttctgccagttttgccatgagctgaaaacgtccacctgctgatcccagatccagctcctggtccccatcaggaaaagtgatgtctgtgccaccatccagtcgctcagtcacatggccaaccctcataggtcgaccagcaagctcaaacccattcaactgttccagggcccgccgggcacacttcagaatcagagaacgtgatgaaaccataacctttagagcggcctgtatctgagtccttcatcaggacaatattatcaattttaccaaagggctcaaagatgccccggagcatgtcttcagtgatattgaagtgcagggaacccacatagaggcgcattggtccaccattgcccttttgcaggttgttggccatggctgccagtcggtttttctctgcctgtgaagcctgtacaatgataggcactcccagcaaccgctgcccagtcagcccaatggccagtggcacagactggatttcacagaattccacgtaggcaatgcccttagaacgacgtgagttccgatctgaaatgatacgtacatcgcgaaccttgcctacagcagagaaaaagtcctccagatctcgaggccgaattcgggcagctaactgcatacagaaaactgtgcgggcatcacgctcctcaggactcagattatcaactggctccccagtggcaagtggaggactcctgtaatgcacacgatcctcacgacgatggtcccgacttcgcgactcactaccatgtcgacgatcccagctacggctacggtgacgacactgccgacctggacttcggctccgactatttctccgtctataccgatcccgatctcgactacgattgcttgtctccccgatggtgctgcttccactggtctcattgccactgttgctggtgctgctggtggtattgctaggataatcctttttaacttctttcctttgttgctcatcctcttcttttttatagggagcttccagcatggcctcaatcactatgtcaaagtcatcagatgccatcctgtcagatcagttccgggtccccgcaggggggtcccggttctctccgttcctttgagtatgttgtggggagtggagctcggatagttcctagagtctaggcaagaaaagcagcactgcaggtacagcgcctcctcttcccgcaaaatcccggaaat

SEQ ID NO: 15054 - DNA, 1071 bp, Homo Sapiens
  misc_feature (923)..(923): n is a, c, g, or t
ggaattcccgggaagcgatggctgggcccgcgtggatctccaaggtctctcggctgctgggggcattccacaacccaaaacaggtgaccagaggttttactggtggtgttcagacagtaactttaattccaggagatggtattggcccagaaatttcagctgcagttatgaagatttttgatgctgccaaagcacctattcagtgggaggagcggaacgtcactgccattcaaggacctggaggaaagtggatgatcccttcaagaggctaaagagtccatggataagaacaagatgggcttgaaaggccctttggaagaccccaatagcagccggtcacccatctatgaatttactgctgcgcaaaacatttgacctttacgcgaatgtccgaccatgtgtctctatcgaaggctataaaaccccttacaccgatgtaaatattgtgaccattcgagagaacacagaaggagaatacagtggaattgagcatgtgattgttgatggagtcgtgcagagtatcaagctcatcaccgagggggcgagcaagcgcattgctgagtttgcctttgagtatgcccggaacaaccaccggagcaacgtcacggcggtgcacaaagccaacatcatgcggatgtcagatgggctttttctaccaaaatgcagggaagttgcagaaagctgtaaagatattaaatttaatgagatgtaccttgatacagtatgtttgaatatggtacaagatccttcccaatttgatgttcttgttatgccaaatttgtatggagacatccttagtgacttgtgtgcaggattgatcggaggtctccgtgtgacaccaagtggcaacattggagccaatggggtttgcattttttgagtccgggtcatggggaccggctccagaccattgcagggcaaanacaatgccgaaatcccacaggcccctcctgcttaatggcgctgaataatgctgcgccccactgggaacttttttgaccatgcttccaaaaaattgagggctggccgggttttgcctacaaatataaggacgggaaaagagctttggcc

SEQ ID NO: 15055 - DNA, 422 bp, Homo Sapiens
gagacggagtcttgctctgtcgcccaggctggagtgcaaagtagggtggcccacggctagggtgaggaccaaaaagcaggctaatttgagcctcctagacactatctggagctcaaagtcaccctccacccacgtccctgaggcccaggatgttacaaattgctggttagggcaaggatgggggttagtggtaggaggaatatggtgtttcctaaaagggaaaggcagtacctacaacattcccaggagaggctctcagcaaacctaggaccaaaacatcttgatgtcacccacctgggggcatttgtatatgcctactaagcccaggagcttagccctcaaacttagggttggggacctcttttgcaaagtatttccactctaaactttaggaggacaagaaactactctgagtagcagct

SEQ ID NO: 15056 - DNA, 961 bp, Homo Sapiens
  misc_feature (790)..(790): n is a, c, g, or t
  misc_feature (818)..(844): n is a, c, g, or t
caggtccgcacagtcgaagccacacctggtctgttttctgtgcactgtagccttagtgtcacctttcttcttgtgtctccttatggtacactccagcggttgccttttttatcatttctactgaagttgggaaattcaaccccagaaattgacagatgaaaggagacaatggttgtgtagggagatggagaaaatgcttaatctgaggatgagacagggttttttcatttttgtgggggctagaaaaaacataaaatgaggcagttaaataataatagttaatgaaggtgtgctacagaaaataatctggtgttcttgctaactttgcccttcactgttgcttaattgtgaacagccaaaagctatatgttatggcttattgtgtgaaggtaactaagaagtggtgttccatgacttcagagtacatccatgcggagtccattatttgagtttgacatttaataactttgctggaaaatctgtaaaaaagaaaaacaagtttgctagtgactaagccccgcatatgtgagtgaaagtacttcaggcacgctgcctcctggtaacagctatgcagggagggaggacccacactgctacacttctgatcccctttggttttactacccaaatctaaatagatacttttgataatagataactgctcttttactaagacatagtctctacctatagaaatgtattttgaaaacacttattttacacagcaattttgtatccatttaaactaaccttttatcaataaagcactattgttttagatattcaccanacccacaatttttcactggcgcaaactnnnnnnnnnnnnnnnnnnnnnnnnnnntttcccactaatatccgtgttcccccttgtcaccttttcaccccgccataatatcgagtctgccccatacccgccccccggctctatcaatatccccccccttgttgtgcggcgccc

SEQ ID NO: 15057 - DNA, 839 bp, Homo Sapiens
gggcgctcgcgctggaagaagcggaagaagatggcgctcaccagctttttacctgcacctactcagctatctcaggaccagcttgaggctgaagaaaaggcaagatcccagagatcacggcagacctcactggtctcctcccgaagagaacctcccccgtacggataccggaaaggctggatacctcggttattagaggattttggagatggaggtgcttttccagagatccatgtggcccagtatccactggatatgggacgaaagaaaaaaatgtcgaatgcgctggccattcaggtggattctgaaggaaaaattaaatatgatgcaattgctcgacaaggacagtcaaaagacaaggtcatttatagcaaatacactgacctggttccaaaggaggttatgaatgcagatgatccagacctgcaaaggcccgatgaagaagctattaaagagataacagaaaagacaagagtagccttagaaaaatctgtatcacagaaggtcgccgcagccatgccagttcgagcagctgacaaattggctcctgctcagtatatccgatacacaccatctcagcaaggagtggcattcaactctggagctaaacagagggttattcggatggtagaaatgcagaaagatccaatggagccctccaaggttcaagattaataagaaaattccccgggggaccacccttctcctcctgcgccctgtcatgcatttctccctagcccgaaagatgactggtaaagggaacaaccaagagtgggaagaattccctccctgggattttcctaactgggaaaaaatgccaaagggggttattacaaatt

SEQ ID NO: 15058 - DNA, 2095 bp, Homo Sapiens
  misc_feature (127)..(127): n is a, c, g, or t
  misc_feature (355)..(355): n is a, c, g, or t
  misc_feature (491)..(491): n is a, c, g, or t
cgacgtgtaggcgtgataaaccgatgtggtgtaacagcgaattgtgtgattatggcgtaataagaagcgtggagttgtggtaataacggtggtgtgtgaggtaggacgtccggcgttatagaagtcnttacaaatgttccaatcagtaccttgagcgcggttgatgtactattacgggagtcgttcgcatcgcttgtcgcgggcgattgtatgtcggtaaacagtaacgggctcatgtgctacagggtgtgatgactatcaagtacgaagcgcgattagcactgattcggcgcgtgcaggtagagtggagttgggatgtcccggtcgtcatgttttgccacgtgcagagcgacgncgtgggccggcgacggtatctatctacatgaacgatcagcgactatagacgtgtatgcgttaatgccgtacgaggggcgtagcatcggaatatgctggtgagcgtgcggttgctatgtagttggcgggtaacgggnagttaagcgtgtacgagtgtggggattgtggtagcgatcgaacgcgcctcattacacttcgagttcgttcgcgctacggttaggaggcggcgtgtaggatgagaatcgacgagtggcgttatggtattagcatcagtcggtggcgtgcaacgggcttagcggggacgaagaggtgcgagggcgcggtgtgggaacgtgttcgctggtcggagttcattttgagtggaccagaggggtggtcggggcggggggcgtgaggctggggaggatgggtgggtaggttgggtaaggttatgttggtgtgatgcggtagagagtgagacggatggcagggggggagcggtaaggggagggtatgagagggaggaaatgtgaggtgaagggggcgacggggtgatgcgtgagggggtcgtggggagcgtgggcgcgttgttcttgatttagaaggtggttgtcggtggtacagcttataacacaacttttattagaaaagttatacataacatagcatcaactattttcaagaacaatattaaacccgataagcaacaaaaaccagactaacaaaatgtgtaacaagaaactaatgacctttctaaaatcaaacattcaattatctacaatgtctttttacaaacggggaaaactccttggtttacaggcacatcatattgaatataaagctgcaatagcaattttatacaattaccactctgaagaaactgaatcattaaaacagtaattacgagttcacaaatttaaaacatttcacataattttaaattattgggtatacactgaagtctgagtttcaaaagtgatttttttttcccacaaaagtttcaacacttaagctagaactttcagtgttaactttgccctaaaaagttaagacatattctgataatcataacagtcacatgatttctgatgctatctggtctgttaataataaagtctttatttggatgtatttttcttcaattaaattacaggaaactggatataggatttcgttgcaatgctattaaagttccaaaccaggagtgtgcagcactggaaaaggagatcagtactaaaacttacaataaatatcagagaagccgttagtttttacagcatcgtctgcttaaaagctaagttgaccaggtgcataatttcccatcagtctgtccttgtagtaggcagggcaatttctgttttcatgatcggaatactcaaatatatccaaacatctttttaaaactttgatttatagctcctagaaagttatgttttttaatagtcactctactctaatcaggcctagctttgctcattttggagcctcactaaaataacagatttcagtatagccaagttcatcagaaagactcaaatggaatgatttacaaaatagaacactttaaaccaggtcagtcctatctttttgtagctgaaggctatcagtcataacacaatttcgcgtacacctctgctcattatggaattacacttaaaacgaatctcaagagggtgaccattgttgtatcagataccatccctaaggagagtggttaacaggaagattgccagtgttactgatgggacggaagatgcgcgca

SEQ ID NO: 15059 - DNA, 1411 bp, Homo Sapiens
  misc_feature (139)..(166): n is a, c, g, or t
  misc_feature (805)..(996): n is a, c, g, or t
  misc_feature (999)..(1081): n is a, c, g, or t
  misc_feature (1181)..(1191): n is a, c, g, or t
ggacagccggctcggaggacctgggtgggctgggggcctgactggacctggcctggccagcttactggggagcagtgggcctccaggagcagctcctcctccagctcccggagccagtcggcagcggtcaccccgtcannnnnnnnnnnnnnnnnnnnnnnnnnnncagccccttctgctccagcagctgcctcagcaactagcccgagccccgcgcccagttccgggaatggagccagcacagcagccagcccgacccagcccatccagctgagcgacctccagagcatcctggccacgatgaacgtaccagccgggccagcaggcggccagcaagtggacctggccagtgtgctgacgccggagataatggctcccatcctcgccaacgcggatgtccaggagcgcctgcttccctacttgccatctggggagtcgctgccgcagaccgcggatgagatccagaataccctgacctcgccccagttccagcaggccctgggcatgttcagcgcagccttggcctcggggcagctgggccccctcatgtgccagttcggtctgcctgcagaggctgtggaggccgccaacaagggcgatgtggaagcgtttgccaaagccatgcagaacaacgccaagcccgagcagaaagagggcgacacgaaggacaagaaggacgaagaggaggacatgagcctggactgagccacgcgccgtcctccgaggaactgggcgcttgcagtgcgttgcacaccctcacctcccacccactgattattaataaagtcttttcttttacctgccnnnnnnnnnnnnnnnnnnnnnnnnnnnnnnnnnnnnnnnnnnnnnnnnnnnnnnnnnnnnnnnnnnnnnnnnnnnnnnnnnnnnnnnnnnnnnnnnnnnnnnnnnnnnnnnnnnnnnnnnnnnnnnnnnnnnnnnnnnnnnnnnnnnnnnnnnnnnnnnnnnnnnnnnnnnnnnnnnnnnnnnnnnnnnnnnccnnnnnnnnnnnnnnnnnnnnnnnnnnnnnnnnnnnnnnnnnnnnnnnnnnnnnnnnnnnnnnnnnnnnnnnnnnnnnnnnnnnccccgggggaaaaccaaggtttttaaaaaatccaaaaggggtccggggggcttttcgggatttacccaagggggccccaggggccttaaatttaaattannnnnnnnnnnggcccctatggaaaaagggggggaatcctctaaccctttctccccccttggaaccctccccaaacggtttggtaaccttgaattccccgggggttcccaacctttgcccccctgggtaaaaatttttcccccggtaaaaagcggggggcaaaaaaatttcccttattggccccaccttaaaaaccaaaatgggggaaaaccccccccggggttttgcgtg

SEQ ID NO: 15060 - DNA, 539 bp, Homo Sapiens
ggcggaatctgcgatccctttcactcattggtgagcacaccagattaggtacaagaatcaccagagcagcatcgtgaagcaccaggctctccagagattcctgcagcccctcattcccccagaggcgcagctttaccagagtggagggtgagagcacaagaggctgggtctgtcttcaggaagaagagcttttgcagaagactgatgatgagtttcaagttcacccccagtgatagcccttccagtaagcagaagggctgagcgcggagaagcataggcttaccagagttgtaagtactcggctttgatcaccgctctgtaccgctggtagctgttttgtgtcctaaactacaggggagttgaggtgggtagctggttggacaaggtatcctgccaggcaacacacagaatggcctgaagtagccccctcccttcttggggaggggaagaaacgcaagagcgaagtcctgcaggtcgcacagctgggctaaggacttgggtgcatctgacatgaagaagccctgggggcggcagaggga

SEQ ID NO: 15061 - DNA, 1062 bp, Homo Sapiens
  misc_feature (871)..(998): n is a, c, g, or t
  misc_feature (1049)..(1049): n is a, c, g, or t
ttaggcgcgttctgcgtgtaggagggatttcggcctgagagcgggccgaggatgattggcgacggtgtcgcccgtgttttcgttggcgggtgcctgggctggtgggaacagccgcccgaaggaagcaccatgatttcggccgcgcagttgttggatgagttaatgggccgggaccgaaacctagccccggacgagaagcgcagcaacgtgcggtgggaccacgagagcgtttgtaaatattatctctgtggtttttgtcctgcggaattgttcacaaatacacgttctgatcttggtccgtgtgaaaaaattcatgatgaaaatctacgaaaacagtatgagaagagctctcgtttcatgaaagttggctatgagagagattttttgcgatacgtacagagcttacttgcagaagtagaacgtaggatcagacgaggccatgctcgtttggcattatctcaaaaccagcagtcttctggggccgctggcccaacaggcaaaaatgaagaaaaaattcaggttctaacagacaaaattgatgtacttctgcaacagattgaagaattagggtctgaaggaaaagtagaagaagcccaggggatgatgaaattagttgagcaattaaaagaagagagagaactgctaaggtccacaacgtcgacaattgaaagctttgctgcacaagaaaaacaaatggaagtttgtgaagtatgtggagcctttttaatagtaggagatgcccagtcccgggtagatgaccatttgatgggaaaacaacacatgggctatgccaaaattaaagctactgtagaagaattaaaagaaaagttaaggaaaagaaccgaagaacctgatcgtgatgagcgtctannnnnnnnnnnnnnnnnnnnnnnnnnnnnnnnnnnnnnnnnnnnnnnnnnnnnnnnnnnnnnnnnnnnnnnnnnnnnnnnnnnnnnnnnnnnnnnnnnnnnnnnnnnnnnnnnnnnnnnnnnnnnnnnaagagaagtccttccgaagtagacactcacgaacatcagacagaagatcancagtctcgaccat

SEQ ID NO: 15062 - DNA, 741 bp, Homo Sapiens
tttgggtcttatagaaaaaatataacttttataaggaaattcaactaagggtaggagtactccaggaacaatggtaatcccccacaggaggatctgattctcttcggggagcaaaacattgcaaccagacaggatggacaaggcatctaaaaacccagtatccttcaccttccgaaaggagggaggggactgtagagttgcccaggaaaaaggtcaagagtcttccttctcctggaacttgcagttggtacaggtgtagaagacactctgcccttcatcggcggaacgcatctgtccgctgtggtatgccattccttcatgaccacatcgagggcagcgcctgtcaaccacaggtccctggcactcaggcccttcctccaccgacataggcatcgccgtccccagttgctggaacacaaccgaagtcttcacaaccttcccctcaaagtcccgaacgttgatgttgaagccacagcgaatacaggtgaccgtatcctgagccccgggcagaggcaggaccgagccgcaatctgaacagaaatccaggtccgactgaaagctggagcaagtattggcgaggtccatgacagacatgcggtcgggtgcctcctgcctctgcgaccaaggagccgaaacgcccggaattcccagacagcgtcgggtactaaaggacttggaaccctttccaggggccggtgagaggagttaaccaactccgtgggctagagcgccagctctccc

SEQ ID NO: 15063 - DNA, 945 bp, Homo Sapiens
tcaaataacccttctggaatctttagccgctctgcacaaaaatcacaattgtagccattggggaattcataatgaacagttggcatctgtgcagccacttgttcatcataagttgaatctgacacttgaagtaccgaagcttgaaaaccctggataacacaattacacatataattgtgccaagacctcgtaacctgaggcaacttctcttttcttttccagtttgctggagatccttcacgaacagcttcttttgatgcaatcatatatggaggaaccaattcaatattcatttcttggaagagttctctgcactgcatagtaataaagtctccagcaagaggggatttcacaatgccttgttgaaggacatagccatcgtggactggaattgcagtggtatgagtggctccactgtccaaaatcagcccagtagaacgaccattagcaaatgctgtcaaaactgcagttttgcaaaggaagaaggcagggatgttgtagtgttcaaacattaactctgtcagtttctctctctttgctctagtattccacggtgcctctgacatgagaacaggatggagactggcttctgatttgacatgcattttgtaggtatgatccaaaatagcttggaaactatcccagtcttcaaccatcccattttttagaggtgaaatggcctccatattctccctcggaacacgcagagcattagtatctatgtagtaggtgggaccgccttgtttgcctttatcgccatctatttccattaatgtgcttccgtcatctctttctaccaccataccaatagctgtaggaaaatccaccttggggcagtcctcaccagcataaccagctctcacagtataggatccaatgtcaaaaacaagggctccaacttcatctcaggcaacaaagcggcgtccacacaccccggagctcccc

SEQ ID NO: 15064 - DNA, 1662 bp, Homo Sapiens
  misc_feature (12)..(12): n is a, c, g, or t
  misc_feature (920)..(920): n is a, c, g, or t
gggcgcacgcanctcccagccggccgcagcctgacacgccgcgcggccccccagtctcccgcggctgctcccccaggcatggcacagggcctcgcctcactatggcagcagcacggcacagcacgctcgacttcatgctcggcgccaaagctgatggtgagaccattctaaaaggcctccagtccattttccaggagcaggggatggcggagtcggtgcacacctggcaggaccatggctatttagcaacctacacaaacaagaacggcagctttgccaatttgagaatttacccacatggattggtgttgctggaccttcagagttatgatggtgatgcgcaaggcaaagaagagatcgacagtattttgaacaaagtagaggaaagaatgaaagaattgagtcaggacagtactgggcgggtgaaacgattaccacccatagtgcgaggaggagccatcgacagatactggcccaccgccgacgggcgcctggttgaatatgacatagatgaagtggtatatgacgaagattcaccttatcaaaatataaaaattctacactcgaagcagtttggaaatattctcatccttagtggggatgttaatttggcagagagtgatttggcatatacccgggccatcatgggcagtggcaaagaagattacactggcaaagatgtactcattctgggaggtggagacggaggcatattgtgtgaaatagtcaaactaaaaccaaagatggtcactatggtagagattgaccaaatggtgattgatgggtgtaagaaatacatgcgaaaaacgtgtggcgatgtcttagacaatcttaaaggagactgctatcaggttctaatagaagactgtatcccggtactgaagaggtacgccaaatgaagggagagaatttgattatgntgattaattgatttgacagctgttccaatctccacgtctccagaagaagattccacatgggagtttctcagactgattcttgacctctcaatgaaagtgttgaaacaggatgggaaatattttacacaggggaactgtgtcaatctgacagaagcactgtcgctctatgaagaacagctggggcgcctgtattgtcctgtggaattttcaaaggagatcgtctgtgtcccttcatacttggaattgtgggtattttacactgtttggaagaaagctaaaccctgaagatcagtagcccctaatcacatgtgctgcaaaatagccttcctgacctccattatgctgtacattgacatcaaaatgaatccaggcaattgattgtgaattccttaaagttcttcctttttttaactaacttatttttaatttaaaaaagcaaatggaacaactgtatattttgatgagcttagggtgtcttttttctttgaaagtcagctgaaggatggttagacagcacagcgaagactgctaaatgcactgaccccccccattagaatgtgatttttgtctcctttttatttctctgtgggcttttgtttttgttcttgtttgggtagatcttcaatttggatatttggaggagtgaacatcgttgttttgctggagggaagatcttgatggtgtttctttccccaaaaattgacttagatattaaaatttggtgcttataagagagagttac

SEQ ID NO: 15065 - DNA, 787 bp, Homo Sapiens
  misc_feature (551)..(604): n is a, c, g, or t
  misc_feature (730)..(730): n is a, c, g, or t
ggagacttaagggactatgtactactgttaatatctctaagaacaaaacacattgaacatccttccagaaagtctttgagggaggacctatacccataatagaattatggcactcatttctgacagtgatcaagaaatcagttatttccttactgttggaaggacattgtaaagtatgtggttatatgcagtgaaactgcagaaaatactcctggttgaggagtttcactttactacagtgatataaaaaccagcagtttttacactaaattttttaaagaaatattagacaaaaatatagaattaaaacctttggttccaaaatgggaaaggttccacgatacataaatcatttctcatttgctttaaaaaatttaaaagtgtaaaaattatgagagactttattcgttaacaatgggggtaaagagctatatacatgaaaatgagtcttataaaattaagtgaagtgcaaataaaagcactgctactataagacattctggaatggttgtttaataacggtattatccatttgatctatagcaatgtgnnnnnnnnnnnnnnnnnnnnnnnnnnnnnnnnnnnnnnnnnnnnnnnnnnnnnngcttaagcacttcatccattgctttattctgtatctgcggagataatctgcaatcctcttttgttctttttaaaatttgatttggttataaaaatgccaaaatagaaagggtttcaaaaacctaanttggaacccggaatttctaatttaattgccctcctggttccttggcaagtccattca

SEQ ID NO: 15066 - DNA, 1467 bp, Homo Sapiens
tggtgtgtccctcggtgcctcgttggtgttgtgcctctgggttgcctcgcgtgtttgccccgctcgatatgggtgttcctgtgtgcgtcgccgtgggggttttctcgtctttctctgtggtttgccgctcccccgatggcgctgtgggcgtgctcccctctgggatttctgggtggtatgttcacacttctcgttagaggggtcttcccctggcttcgcctgtgggggctctgtactcagccacgcccccccgcaatctgtcttccgcgccatttcaagactcctgtccatggaggcgcttggactgtctgccaacctttcgagtggctcaccaccgggacttcctggggcccagcccaggcatgccaccccagcatcacgaagtcagctcctggcgcccaaaagcgttggccaacatccccgggacagctgccaacctcccatgctgaaatgatggggcctttgaggccatgacagcatctgcacactccatcactgcgctgagctgtggataccccactccagttttcttccgagtagtacacacagagcctggcccaattcccaactttgatgatgtcagccccagaaaggatgagctcttcttaccatctctcctgttaccacattccctgccatgatggtgtgctgggggaaagcgctttccgtacatctttaacaaattcaacaaaagtgttcagagtagcccatttgccacatccccaggcatatatacttcacctggggaatagcttccaggatctgttccagctgctcaaagtcagaagagcctgtgcctgagctggcagccagatgctcaagacagtcaggattctggccagcaaactcttgccactgaacgaggctatagtgcttatggacagcagtgaagagagagaacttacagagaaccttggccatctcaaaggtgcccacagtatccatattggcagcaatgatgggaaccccagagtatgtctgctttgagttccgaaatgaaaaggatcttgtgagatccacctcacttcgagacttaagggtactgcgtttgggcctcaaaaggacatccttgaagtccagtttcacatcgttgtcaatatgaggcatggcgcttagcctcggggtagcgatgaatctgagggctcgtgcaatcccgctaagccttctgggccacgccaacaggttcctctagttgccggcgagaactactagccgacgaattccagcttcggcggcggcagggcgaggccttctggataacagagttcacgcactgaggttgctgttggatccgagggggttagactacaactcccagggggaaccgggcgggaccgcctcctggcacgatgggagatgtagttcgttctgcccccacttttcgctagcccgggctcgccagggactctcagaatcgcagagtcgtcatctgtaaaattgctaaactggatgcctcatcccggaatt

SEQ ID NO: 15067 - DNA, 1332 bp, Homo Sapiens
  misc_feature (1106)..(1200): n is a, c, g, or t
  misc_feature (1312)..(1312): n is a, c, g, or t
gaccagaaatctcccctaattgaatcaacagccaatatggaccataatcagtcacagaagacctttaaaaacaaagagacgttgattattgaaccagagaaaaatgcatcccgtattgaatctctggaaccagaaaaggttgatgaagaagaagaaggaaagaaggatgagtctagctgctctagtgaagaagatgaggaagatgactcggaatcagaagctgaaacagataagaccaaacccctggcttctgtaactaatgcccacacttctagtacacaagcagctcctgtagctgttactacacctactgtgtcatcaggtcaagcgacacctacatcacctagtaaaaagtttccaccacagctacaaaatttctcccaagaagaagagagaaaagatgagtctcctgctacttggaggttaggacttagaaagacgggcagctatggtgcacttgctgaaatcacagcatctaaagagggtcagaaagaaaaagatactgcaggtgttacacgttcagcttcaagtcccagactttcctcctctttggataataaagaaaaggagaaagatagtaaaggaactaggcttgcatatgttgcacctacaataccaagacgactagccagtacatctgacattgaagagaaagaaaacagagattcttcaagtttgcgaacaagtagttcatatacaaggagaaaatgggaagatgatcttaaaaaaaatagctcagttaatgaaggatcaacgtatcataaaagtacctcaaatcgtttgtgggctgaggatagtactgagaaagaaaaggacagtgttcctacggcagtgaccattcctgttgctccaactgttgtaaatgctgcagcttctaccacaaccctgactacaactactgctggcactgtctcctccacaacagaggtcagggagagacgcagatcataccctcactcctgttagggatgaagagtctgaatcccaaagaaaagcaagatctacacaagcaagacaatctagaagatcaacacagggagtgacattaactgatcttcaagaagctgagaaaacaataggaagaagtcgttctacccgaaccagannnnnnnnnnnnnnnnnnnnnnnnnnnnnnnnnnnnnnnnnnnnnnnnnnnnnnnnnnnnnnnnnnnnnnnnnnnnnnnnnnnnnnnnnnnnnnntgaatataaacaaaagtactccagaacgtatgatgagacttaccaacgttataggccagtatcaacttcaagttcaaccactccatcctcttcactttctactatgagcagntcactgtatgcttcaagtaa

SEQ ID NO: 15068 - DNA, 1933 bp, Homo Sapiens
agagctcagagatgaggaacagacagctgagagcattaagatccaaatgactgtgaaagaatgggagaaagtgtttgagatgagtcaagataaaaatctataccacaatctttgtaccagcctgttccctactatacatggcaatgatgaagtaaaacggggtgtcctgctgatgctctttggtggcgttccaaagacaacaggagaagggacctctcttcgaggggacataaatgtttgcattgttggtgacccaagtacagctaagagccaatttctcaagcacgtggaggagttcagccccagagctgtctacaccagtggtaaagcgtccagtgctgctggcttaacagcagctgttgtgagagatgaagaatctcatgagtttgtcattgaggctggagctttgatgttggctgataatggtgtgtgttgtattgatgaatttgataagatggacgtgcgggatcaagttgctattcatgaagctatggaacagcagaccatatccatcactaaagcaggagtgaaggctactctgaaacgcccggaagttccattttggcagcagcaaacccaatcagtggacactatgacagatcaaaatcatatgaaacagaatataaattggtcagctcccatcatgtcccgattcgatctcttctttatccttgtggatgaatgtaatgaggtaacagattatgccattgccaggcgcatagtagatttgcattcaagaatggcaggaatcaatggcatcgtgtctaatccctcgcatgatatcagaagcatcatcttctcttggcaagacagttaaacacccaagcattcccaaagagtcagaggacttcatggtggagcaatataaacatctccgccagagagatggttctggagtgaccaagtcttcatggaggattacagtgcgacagcttgagagcatgattcgtctctctgaagctatggctcggatgcactgctgtgatgaggtccaacctaaacatgtgaaggaagctttccggttactgaataaatcaatcatccgtgtggaaacacctgatgtcaatctagatcaagaggaagagatccagatggaggtagatgagggtgctggtggcatcaatggtcatgctgacagccctgctcctgtgaacgggatcaatggctacaatgaagacataaatcaagagtctgctcccaaagcctccttaaggctgggcttctctgagtactgccgaatctctaaccttattgtgcttcacctcagaaaggtggaagaagaagaggacgagtcagcattaaagaggagcgagcttgttaactggtacttgaaggaaatcgaatcagagatagactctgaagaagaacttataaataaaaaaagaatcatagagaaagttattcatcgactcacacactatgatcatgttctaattgagctcacccaggctggattgaaaggctccacagagggaagtgagagctatgaagaagatccctacttggtagttaaccctaactacttgctcgaagattgagatagtgaaagtaactgaccagagctgaggaactgtggcacagcacctcgtggcctggagcctggctggagctctgctagggacagaagtgtttctggaagtgatgcttccaggatttgttttcagaaacaagaattgagttgatggtcctatgtgtcacattcatcacaggtttcataccaacacaggcttcagcacttcctttggtgtgtttcctgtcccagtgaagttggaaccaaataatgtgtagtctctataaccaatacctttgttttcatgtgtaagaaaaggcccattacttttaaggtatgtgctgtcctattgagcaaataactttttttcaattgccagctactgcttttattcatcaaaataaaataacttgttctgaaaaa

SEQ ID NO: 15069 - DNA, 1138 bp, Homo Sapiens
  misc_feature (813)..(874): n is a, c, g, or t
ggcaatgataaacaagaaacattcttaaacatctcacagatgaatttaagttattctgaggaagaattgatgtttgtctgagtcggctgttgatttcatcaggacacttttagttaagaaacctgaagatcgagccactgctgaagaatgtctaaagcacccctggttgacacagagcagtattcaagagccttctttcaggatggaaaaggcactagaagaagcaaatgccctccaagaaggtcattctgtgcctgaaattaattcggataccgacaaatcagaaaccaaggaatccattgtaaccgaagagttaattgtagttacttcatatactctaggacaatgcagacagtctgaaaaagagaaaatggagcaaaaggccatttccaaacgatttaaatttgaggaacctttgctacaagaaattccaggagaatttatctactgagcaatatttccctttagaacttcaagatttctacactgaaaatgttaatattatttatggacctctggccaaatggtacatgtactggaagtggataaccagtatcacttacacaaacaaaaataactttgtcaaatttgtggagttaggtggaagccagattttaaaagttgccaaccaggagatttaacaggtacagttacccgtttcaatgttatttttaagaagggagatgttggcacctttgaattctacatcctgtttctccagaatgagaatttgtgtacaaagatatttgtattcactttctttaaaaaatccaagtaaaagtgccaaaactatccccccctatactattccannnnnnnnnnnnnnnnnnnnnnnnnnnnnnnnnnnnnnnnnnnnnnnnnnnnnnnnnnnnnntggccacacaacctgcgccgccgaccggcgcacatgtgataagaagatactgtggggtggcccccccttgcggccccccagaaagaaatctttttaaaaccccctttttcttttttgggcggccgcgggggcgcccccccgataggggacaaggccgggatacggggggctcgaaaccgttgtggccccttccacagaggaaagatacccggtggccacccggataaataaccgcggcctgtgtgtttttcttcccccccacat

SEQ ID NO: 15070 - DNA, 2482 bp, Homo Sapiens
  misc_feature (2320)..(2334): n is a, c, g, or t
ggggcggggtatggcgcgctgtgcggcgcagggcggctggcacaaacggcggcgccggggccggaggaaaaagctcgccaccctgaagggtcccttcccaagcccttagggaccgcagaggacttggggaccagcaagcaacccccagggcacgagaagagctcttgctgtctgccctgcctcaccctgccccacgccaggcccggtggcccccagctgcatcaagtggaggcggaggaggaggcggaggagggtggcaccatgggcccgggcggtgccctccatgcccgggggatgaagacactgctgccatggacagcccgtgccagccgcagcccctaagtcaggctctccctcagttaccagggtcttcgtcagagcccttggagcctgagcctggccgggccaggatgggagtggagagttacctgccctgtcccctgctcccctcctaccactgtccaggagtgcctagtgaggcctcggcagggagtgggacccccagagccacagccacctctaccactgccagccctcttcgggacggttttggcgggcaggatggtggtgagctgcggccgctgcagagtgaaggcgctgcagcgtgggtcaccaaggggtgccagcgattggcagcccagggcgcacggcctgaggccccaaacggaaatgggccgaggatggtggggatgccccttcacccagcaaacggccctgggccaggcaagagaaccaggaggcagaccgggagggtggcatgagctgcagctgcagcagtggcagtggtgaggccagtgctgggctgatggaggaggcgcttgcctctgcgccccgacgccgtggccctggactatatcgtgccctgcatgcggtactacggcatctgcgtcaaggacagcttcctgggggcagcactgggcggtcgcgtgctggccgaggtggaggccctcaaacggggtgggcgcctgcgagacgggcagctagtgagccagagggcgatcccgccgcgcagcatccgtggggaccagattgcctgggtggaaggccatgaaccaggctgtcgaagcattggtgccctcatggcccatgtggacgccgtcatccgccactgcgcagggcggctgggcagctatgtcatcaacgggcgcaccaaggccatggtggcgtgttacccaggcaacgggctcgggtacgtaaggcacgttgacaatccccacggcgatgggcgctgcatcacctgtatctattacctgaatcagaactgggacgttaaggtgcatggcggcctgctgcagatcttccctgagggccggccgtggtagccaacatcgagccactctttgaccggttgctcattttctggtctgaccggcggaacccccacgaggtgaagccagcctatgccaccaggtacgccatcactgtctggtattttgatgccaaggagcgggcagcagccaaagacaagtatcagctagcatcaggacagaaaggtgtccaagtacctgtatcacagccgcctacgcccacctagtggccagtcccagagccgcatggcagacagcttaaatgacttcaggagagccctgggcctgtgctggctgctccttccctgccaccgctgctgcttctgactttgcctctgtcctgcctggtgtggagggctctgtctgttgctgaggaccaaggaggagaagagacctttgctgccccatcatgggggctggggttgtcacctggacagggggcagccgtggaggccaccgttaccaactgaagctgggggcctgggtcctaccctgtctggtcatgaccccattaggtatggagagctgggaggaggcattgtcacttcccaccaggatgcaggacttggggttgaggtgagtcatggcctcttgctggcaatggggtgggaggagtacccccaagtcctctcactcctccagcctggaatgtgaagtgactccccaacccctttggccatggcaggcaccttttggactgggctgccactgcttgggcagagtaaaaggtgccaggaggagcatgggtgtggaagtcctgtcagccaagaaataaaagtttacctcagagctgcacaaaaaccacacacccatcctatcccctccccctccccgcctcccctttctccagatacagccattccgtactccgctttcgccacttacatcctttccattccctcccccctgccttctctcgtccacgtcttgttacccctgcgcgcccgccccccttttcctacttcccaccccctcttccccacctcgtaaattcccttttttgggcgggcgannnnnnnnnnnnnnnaacaaatccttttccaacatcctttccccgttgttgccccggcgccttccctttccgccgcacgtcgcgccagacccgggcgtataccacccgtctcccctccccaagaaaaacaacctgccgccgcagaacaagccgaggtgcctgt

SEQ ID NO: 15071 - DNA, 982 bp, Homo Sapiens
ccctagaggatcccccgaacatgtcgcggctctccaaaatcttgagtggaagtatcatactctgcaatgaaatgcttgagttcttcaacacaccgctcacctatttcatgtaaattctgcctcaatgcaaactgtatagacttttctaatgaaggatctttttcaatcagcattttcaccaccatcccgaaagtttcacagtcttgtcggtaaacctgttcaatctctttggtttttgatgctattgctttagagcgagtggttagctgactatcttcaaataattctatcccatgtgttgtgtttgactcaggttcctctggctggtcagtaaacaatggtgctgtggatcccgcctcatactcagaaatttcaggcaagttactttcatctgatttctctagcttttcagcagcccacttgcttgcagcctcagcaagttccttttcagttagcctactgggtttgtctaacacctttgatgaagaaactgctgaaccacttgagggtgaagtatctcttgatgttttcaaagactggacaggcctctctttatctctttcaggatttccttcattctgccgtttgtaggaggcaccaggacgcacggactttctatgttgagactgatggaaagagtatgatttgctcctttctggagagtagcttctgctactgacactggaaccagatctgctgtgtggagaatcctttcggccaacaggtgattctctgaaaaaagtattgtcccttttataaggagaccgctctctcgcataatgggaagagtagaaactttttcttctaaagccatctctcatgtccctgtattcaggttgcctgcttgcagaatgatcgtctcttgtccatctataaccagattcatcactgggatgacttcgaggaggtgctcgttctctcgaaattcattcatattcatatcgtccctcagaccacatttcgtctcttctgtaagccacga

SEQ ID NO: 15072 - DNA, 884 bp, Homo Sapiens
  misc_feature (548)..(641): n is a, c, g, or t
  misc_feature (645)..(645): n is a, c, g, or t
  misc_feature (648)..(649): n is a, c, g, or t
  misc_feature (666)..(682): n is a, c, g, or t
  misc_feature (685)..(686): n is a, c, g, or t
ggccccaaaaaggccccaatccgagccaggaattcagggattcagagtgatggcaaggagaagcagcccggtcctggtgatggagcgcgctctgctcagtgatgagagagtcctgaaggaaatccagagcacactggagggagaccgcgggagcggcaactggcgttcacatcgagccgccgtggggtgcagcctcagcaatggcggagcagagtgagtggctgagcgtccaggctgcgcgatgagcacacactactactgatggcctttcgggggtccctgccccagccggagaggccggtgcacagggccccgccaggggctgggggcatcccggcttccacaatgcagctgctctgggcctcgggagaggagagaccccagtcccctgggctgcccttcccgggcctcgtctgtctgggtcctttggtcaatgttgcacagtttttattgctcccatccctttttgtagtgggctgggttttaagttataaatgttaactgcctctgggtgaaaaagtttttaataaacacctattacctcttgnnnnnnnnnnnnnnnnnnnnnnnnnnnnnnnnnnnnnnnnnnnnnnnnnnnnnnnnnnnnnnnnnnnnnnnnnnnnnnnnnnnnnnnnnnnnnncatntcnntagcgcccccggacccnnnnnnnnnnnnnnnnnganngttggggggcccccaggaccaccagggcacagggaaaacgcttgtattttgggcaatagaaaaacgcggggagggaaaccaagtcttgcataataaaacccagaagggccccccgagggacaaataaggggttttttatcacaaggcagtacaagaggggccctggaaattaaatttgggccctaaacccttgcagtt

SEQ ID NO: 15073 - DNA, 1020 bp, Homo Sapiens
gggctttttttagcgccatctgctcgcggcgccgcctcctgctcctcccgctgctgctgccgctgccgccctgagtcactgcctgcgcagctccggccgcctggctccccatactagtcgccgatatttggagttcttacaacatggcagacattgacaacaaagaacagtctgaacttgatcaagatttggatgatgttgaagaagtagaagaagaggaaactggtgaagaaacaaaactcaaagcacgtcagctaactgttcagatgatgcaaaatcctcagattcttgcagcccttcaagaaagacttgatggtctggtagaaacaccaacaggatacattgaaagcctgcctagggtagttaaaagacgagtgaatgctctcaaaaacctgcaagttaaatgtgcacagatagaagccaaattctatgaggaagttcatgatcttgaaaggaagtatgctgttctctatcagcctctatttgataagcgatttgaaattattaatgcaatttatgaacctacggaagaagaatgtgaatggaaaccagatgaagaagatgagatttcggaggaattgaaagaaaaggccaagattgaagatgagaaaaaggatgaagaaaaagaagaccccaaaggaattcctgaattttggttaactgtttttaagaatgttgacttgctcagtgatatggttcaggaacacgatgaacctattctgaagcacttgaaagatattaaagtgaagttctcagatgctggccagcctatgagttttgtcttagaatttcactttgaacccaatgaatattttacaaatgaagtgctgacaaagacatacaggatgaggtcagaaccagatgattctgatcccttttcttttgatggaccagaaattatgggttgtacagggtgccagatagattggaaaaaaggaaagaatgtcactttgaaaactattaagaagaagcagaaacacaggggactagaagctttgaatcgaattcctgcagcccggg

SEQ ID NO: 15074 - DNA, 986 bp, Homo Sapiens
  misc_feature (889)..(889): n is a, c, g, or t
  misc_feature (903)..(903): n is a, c, g, or t
  misc_feature (909)..(909): n is a, c, g, or t
gagcctccaccaaggcgctggtgcaacacctgccagctctactacatggggaccctgatccaacaccgcaggacacaggaccacaagattgccaaacaatccttgcgacccttctgcaccgtttgcacccgctacttcaaaacccctcgcaagtttgtggagcacgtgaagtcccaggggcataaggacaaagccaaggagctgaagtcgcttgagaaagaaattgctggccaagatgaggaccacttcattacagtggacgctgtgggttgcttcgagggtgatgaagaagaggaagaggatgatgaggatgaagaagagatcgaggttgaggaggaactctgcaagcaggtgaggtccagagatatatccagagaggagtggaagggctcggagacctacagccccaatactgcatatggtgtggacttcctggtgcccgtgatgggctatatctgccgcatctgccacaagttctatcacagcaactcaggggcacagctctcccactgcaagtccctgggccactttgagaacctgcagaaatacaaggcggccaagaaccccagccccaccacccgacctgtgagccgccggtgcgcaatcaacgcccggaacgctttgacagccctgttcacctccagcggccgcccaccctcccagcccaacacccaggacaaaacacccagcaaggtgacggctcgaccctcccagcccccactacctcggcgctcaacccgcctcaaaacctgatagagggacctccctgtccctggcctgcctgggtccagatctgctaatgctttttaggagtctgcctggaaactttgacatggttcatgtttttactcaaagccccataaaaaaagggtagttttgggcccccatnaatccccatacaantttttncccttggtgggccggcctcggcgcctctaaaaaatttttctaaacccttctctttggggccgggggcccccaatagt

SEQ ID NO: 15075 - DNA, 636 bp, Homo Sapiens
cccagacgaacggccagcagcttcagaagcccatgctgcagctcctgcaggacaaggacacctacagctggcccctgaaggagcggagcgacaccagcgacaagcggaagttcctgaaggagcggcttgcacggctgacgcaggctcggcgccggcttgcccagttccccggttaaccacactctgtccagccccgtagacgtgcacgcacactgtctgcccccgttcccgggtagccactggactgacgacttgagtgctcagtagtcagactggatagtccgtctctgcttatccgttagccgtggtgatttagcaggaagctgtgagagcagtttggtttctagcatgaagacagagccccaccctcagatgcacatgagctggcgggattgaaggatgctgtcttcgtactgggaaagggattttcagccctcagaatcgctccaccttgcagctctccccttctctgtattcctagaaactgacacatgctgaacatcacagcttatttcctcatttttataatgtcccttcacaaacccagtgttttaggagcatgagtgccgtgtgtgtgcgtcctgtcggagccctgtctcctctctctgtaataaactcatttctagcagaaaaaaa

SEQ ID NO: 15076 - DNA, 933 bp, Homo Sapiens
gggctccgatcctggaaactcattggctccgaggacttaggacctgttagcttggttgggcgactggcaaatccttccttccccggggtagaagtccagggcatttgaggagactcatctgacctcccttgacccagtgaaacagtttgctgcctggtttgaggaggctgttcagtgtcctgacataggggaagccaatgccatgtgtctggctacctgcaccagagatggaaaaccctctgctcgcatgttgctgctgaagggcttcgggaaagatggcttccgcttcttcactaacttcgagagtcgaaaaggaaaagagctggactctaatccctttgcttcccttgtcttctactgggagccacttaaccgtcaggtgcgtgtggaaggccctgtgaagaaactgcctgaggaagaggctgagtgctacttccactcccgccccaagagcagccagattggggctgtggtcagccaccagagttctgtgatccctgatcgggagtatctgagaaagaaaaatgaggaactggaacagctctaccaggatcaagaggtgcccaagccaaaatcctggggtggctatgtcctgtaccctcaggtgatggagttctggcaaggtcaaaccaaccgcctgcatgaccggatagtctttccgcggggcctacccacaggagattcccctttggggcccatgacccaccgcgggggaggaaaactgggctctatgaaagaacttgcacccttaactctggggacctgctgggcccaaacgtggagctagggcctacgtggtcaacgaaaagggccgcggggattcgggaacccaggcccctcccttttcaaagcctcaccccattttcccctcccctaacctcctttacccttcacggcgactctttttgaaactttagatccctctttccggtt

SEQ ID NO: 15077 - DNA, 720 bp, Homo Sapiens
ggggtggctaatgccgtaggctccttcagggctgagccatcccgcgtgtcttgcgctcggtggaaatgcccagccgagggacgcgaccagaggacagctctgtgctgatccccaccgacaattcgaccccacacaaggaggatctaagcagcaagattaaagaacaaaaaattgtggtggatgaactttctaaccttaagaagaataggaaagtatataggcaacaacagaacagcaatatattctttcttgcagaccgaacagaaatgctgtctgagagcaagaatatattggatgaactgaaaaaagaataccaagaaatagaaaacttagacaagaccaaaatcaagaaatagtcaacctgatttcacataacaatgtgtggcatttgttgttctgtaaacttttctgctgagcatttcagtcaagatttaaaagaggacttactatataatcttaaacagcggggacccaatagtagtaaacaattgttaaagtctgatgttaactaccagtgtttattttctgctcacgtcctacacttgaggggtgttttgactacccagcctgtggaagatgaaagaagcaatgtgtttctatggaatgggagaaaattttagtggaataaaggttgaagctgaagagaatgacactcaaattttgttaaataatctttcctccctggaagaatgaatcttgagattttgtccactcttctca

SEQ ID NO: 15078 - DNA, 1009 bp, Homo Sapiens
gctatctagaggatcccttgtcttgccacaaaggatgccaactgacataaagaagtcaagctacaaaaagctctctaagttcctgcagcaaatgcagcaggagcagattatacaggtgaaggagctgagcaaaggggtggagagcattgtggctgtggactggaaacacccgaggattacatctttcgtcatacccgagccctccccgacctcccagactatccaggagggtagcagggaacagccctatcaccctccagatataaaacccctctactgtgtcccagccagcatgaccctgctcttccaggagtctggccacaagaaggggagctttctggagggcagtgaggtccgaacgatcgtcattaactacgccaagaaaaatgacctggttgatgcagacaacaaaaatcttgtgagattggatcccatcctatgtgactgcatcttagagaaaaatgaacagcatacagtcatgaagcttccatgggacagtcttctgaccaggtgtttggaaaaattacagcctgcctatcaagtgacccttcccggacaagagcccattgtgaagaaagggagaatctgtccaattgacatcaccctagcacaaagagcgtctaataaaaaggtgaccgtggtccggaacttggaggcctatggtctggacccatactcagtggctgccatccttcagcagcgatgccaggctagcaccaccgtcaatcctgcccctggggccaaggacagccttcaggtgcagatccagggaaaccaggtccaccacctcggctggctattgcttgaagagtatcagctccctcgaaaacacatccaaggtctagaaaaggccctcaaacctggcaagaagaagtgacagactcttttgtctcacgtggtggatccggtggaaatccaagctctgggctggtaatttttatgagcattttcagcttttgcaaatacaaaatataattctttacaaaaataaatttttattctaatctaa

SEQ ID NO: 15079 - DNA, 793 bp, Homo Sapiens
  misc_feature (354)..(368): n is a, c, g, or t
  misc_feature (697)..(711): n is a, c, g, or t
  misc_feature (713)..(713): n is a, c, g, or t
  misc_feature (715)..(717): n is a, c, g, or t
  misc_feature (719)..(728): n is a, c, g, or t
gggggtgcactgtgggaaagagcttgtcgctgcggtgttgctgttggagactcgattgttggtgacagcgaaagaacgataacaaaatgccggagcgagatagtgagccgttctccaaccctttggcccccgatggccacgatgtggatgatcctcactccttccaccaatcaaaactcaccaatgaagacttcaggaaacttctcatgacccccagggctgcacctacctctgcaccaccttctaagtcacgtcaccatgagatgccaagggagtacaatgaggatgaagacccagctgcacgaaggaggaaaaagaaaagttattatgccaagctacgccaacaagaaattnnnnnnnnnnnnnnnctagcagagaagtaccgggatcgtgccaaggaacggagagatggagtgaacaaagattatgaagaaaccgagcttatcagcaccacagctaactatagggctgttggccccactgctgaggcggacaaatcagctgcagagaagagaagacagttgatccaggagtccaaattcttgggtggtgacatggaacacacccatttggtgaaaggcttggattttgctctgcttcaaaaggtacgagctgagattgccagcaaagagaaagaggaagaggaactgatggaaaagccccagaaagaaaccaagaaaagatgagggatcccgcnnnnnnnnnnnnnnnancnnnannnnnnnnnnccctggtcgggccgccctcgggcccctccaagaaaaccttttcttaagacccaattcgttttggg

SEQ ID NO: 15080 - DNA, 1070 bp, Homo Sapiens
  misc_feature (911)..(969): n is a, c, g, or t
gggagcagtggggttgcacacgcgcctcttcacgaggtggaaacaagatggaggattcggcctcggcctcgctgtcttctgcagccgctactggaacctccacctcgactccagcggccccgacagcacggaagcagctggataaagaacaggttagaaaggcagtggacgctctcttgacgcattgcaagtccaggaaaaacaattatgggttgcttttgaatgagaatgaaagtttatttttaatggtggtattatggaaaattccaagtaaagaactgagggtcagattgaccttgcctcatagtattcgatcagattcagaagatatctgtttatttacgaaggatgaacccaattcaactcctgaaaagacagaacagttttatagaaagcttttaaacaagcatggaattaaaaccgtttctcagattatctccctccaaactctaaagaaggaatataaatcctatgaagccaagctccgccttctgagcagttttgatttcttccttactgatgccagaattaggcggctcttaccctcactcattgggagacatttctatcaaagaaagaaagttccagtatctgtaaaccttctgtccaagaatttatcaagagagatcaatgactgtataggtggaacggtcttaaacatttctaaaagtggttcttgcagtgctatacgtattggtcacgttggaatgcaaattgagcacatcattgaaaacattgttgctgtcaccaaagggactttcagaaaaattgccagagaagtgggagagcgtgaaactcctgtttgtgaaaactgagaaatcggctgcacttcccatcttttcctcgtttgtcagcaattgggatgaagccacccaaaagatctttgcttaataagaagaaaaaagaggcannnnnnnnnnnnnnnnnnnnnnnnnnnnnnnnnnnnnnnnnnnnnnnnnnnnnnnnnnngcaggctaggaagactgcatcagttcttagtaaagatgatgtggcacctgaaagtggtgatactacagtgaagaaacctgaaataaagaacagcttgacag

SEQ ID NO: 15081 - DNA, 1151 bp, Homo Sapiens
gccacttccgggagtcggaaaggaaagctgtgggaccatcctggcaaccccggtgtttggctgggttctagcgtagccgtctgtgtggccggtgggggacctgcggtcggagtgggagggccagtctgcacccaagaggtggaagaggacgggctttaggctggaagcgccttagaggagccatttttccagcaggatgcctggtttgcttttatgtgaaccaacagagctttacaacatcctgaatcaggccacaaaactctccagattaacagaccccaactatctctgtttattggatgtccgttccaaatgggagtatgacgaaagccatgtgatcactgcccttcgagtgaagaagaaaaataatgaatatcttctcccggagtctgtggacctggagtgtgtgaagtactgcgtggtgtatgataacaacagcagcaccctggagatactcttaaaagatgatgatgatgattcagactctgatggtgatggcaaagatcttgtgcctcaagcagccattgagtatggcaggatcctgacccgcctcacccaccaccccgtctacatcctgaaagggggctatgagcgcttctcaggcacgtaccactttctccggacccagaagatcatctggatgcctcaggaactggatgcatttcagccataccccattgaaatcgtgccagggaaggtcttcgtaggcaatttcagtcaagcctgtgaccccaagattcagaaggacttgaaaatcaaagcccatgtcaatgtctccatggatacagggcccttttttgcaggcgatgctgacaagcttctgcacatccggatagaagattccccggaagcccagattcttcccttcttacgccacatgtgtcacttcattgaggtcctgggcctatgtcaagaagtgcaaaaacaacatgtgtccaaatcggggattggtgagccagctgctggaatgggagaagactatccttggagattccatcacaaacatcatggatccgctctactgatcttctccgaggccccaccgaagggtactgaagagcctcacctgggggcattttgtgggtggagggccagagtgtgtatacccaggcttgtctggaaggagaaagcctttgctgcctgaaagtctc

SEQ ID NO: 15082 - DNA, 1206 bp, Homo Sapiens
aggatcccccttgacacaatcgagaaatgtcgagacattcatcactgggtactggagatcgtcggcaccagtcacacgcggcggcacgcaagatctgctgagagtcgagaagcagaccaaggaacaatcgcagctgacggcaacacagactcgcactgtcaacaagcatggcgatgagatcatcacctccaccaccagcaactatgagacccagactttctcatccaagactgagtggagggtcagggccatctctgctgccaacctgcacctaaggaccaatcacatctatgtttcatctgacgacatcaaggagactggctacacctacatccttcccaagaatgtgcttaagaagttcatctgcatatctgaccttcgggcccaaattgcaggatacctatatggggtgagcccaccagataacccccaggtgaaggagatccgctgcattgtgatggtgccgcagtggggcactcaccagaccgtgcacctgcctggccagctgccccagcatgagtacctcaaggagatggaacccttaggttggatccacactcagcccaatgagtccccgcagttatcaccccaggatgtcaccacccatgccaagatcatggctgacaacccatcttgggatggcgagaagaccattatcatcacatgcagcttcacgccaggctcctgtacactgacggcctacaagctgacccccagtggctacgaatggggccgccagaacacagacaagggcaacaaccccaagggctacctgccttcacactatgagagggtgcagatgctgctgtcggaccgtttccttggcttcttcatggtccctgcccagtcctcgtggaactacaacttcatgggtgttcggcatgaccccaacatgaaatatgagctacagctggcgaaccccaaagagttctaccacgaggtgcacaggccctctcacttcctcaactttgctctcctgcaggagggggaggtttactctgcggatcgggaggacctgtatgcctgaccgtttccctgcctcctgcttcagcctcccgaggccgaagcctcagcccctccagacaggccgctgacattcagcagtttggcctctttccctctgtctgtgcttgtgttgttgacctcctgatggcttgtcatcctgaataaaatataataataaattttgtataaataggaaaaaaa

SEQ ID NO: 15083 - DNA, 527 bp, Homo Sapiens
atattgattattctcctggagagattagcataactgactgtgctgagcattcactattatacgaccctctatgaggagtacccagaaactgcaagcacaacgtggtccgcaaaacaaatgccatgacctgaaaactcctgtacgcacacacctacgcctaggcaggcattagctcaccaggcctagtgatagcaagttagtctccaaagatgggatctgcaatgccaaccccacctggcctccagagctccttataggtcattcccaagagaagttatctgtttttgcacacggtgattgacatagacaacagggtacgtacttgcagtcctcactctccagaaggctccggtacatggcaatctcaccctccagccgggcccgcacatccagcagcacctggtactcctggttctgccgctccaggtcagcccggatctcagacagctgttcctccacattgttgatgaggctctgcatctgggccagctctgtgcggtaacggtcctcggcttcacacaggcagt

SEQ ID NO: 15084 - DNA, 420 bp, Homo Sapiens
gaggatcccgcaagctcgggtgaatactaccaccttctagctgagaaaaatctataagatccagaaagaactagaagaaaaacgaaggaccagactacagaagcagaacatgctaccaaatgctgcaggcatggttccagtttccatgaatccagggcctaacatgggacagccgcaaccaggaatgacttctagtttgaatcaatttggccagatgagcatggcccagccccctattgtaccccggcaaacccctcctcttcagcaccatggacagttggctcaacctggagctctcaacccgcctatgggctatgggcctcgtatgcaacagccttccaaacagggccagttccttcctcagactcagttcccatcacagggaatgaatgtaacaaatatccctttggctccgcccag

SEQ ID NO: 15085 - DNA, 1542 bp, Homo Sapiens
  misc_feature (202)..(202): n is a, c, g, or t
  misc_feature (204)..(204): n is a, c, g, or t
  misc_feature (206)..(207): n is a, c, g, or t
  misc_feature (210)..(211): n is a, c, g, or t
  misc_feature (213)..(214): n is a, c, g, or t
  misc_feature (217)..(219): n is a, c, g, or t
  misc_feature (222)..(222): n is a, c, g, or t
  misc_feature (224)..(224): n is a, c, g, or t
  misc_feature (226)..(227): n is a, c, g, or t
  misc_feature (328)..(383): n is a, c, g, or t
ttatgggctagaagagaagatgggcgtggcgtaaatacaccactacaacgcaggacgaaggtatgggtccgcggtcgtggggggcgccgacgctacatgctggctagatcggaggtcgtgcgagtgcgcgaaggggacgcggagatcgggtatattgaggtgggagacgatgctggtagaaggggaggaaaagaggggtggngntnnggnngnnaannnggngngnntggagtggtgagagagggcaggcggtgtgagacacgatacgatggggtttcaacggggagatcggcgagaccgggtcgcatatgaaaaagtcggcgacgtnnnnnnnnnnnnnnnnnnnnnnnnnnnnnnnnnnnnnnnnnnnnnnnnnnnnnnnncagggagggaggcagaccgggcgagagaagtggtgacgtaggggcgggcgcggtatggcaggcgtgggggggtggatgtttccggagcagggaagggcttggaggcggtctgtcattggtagcactgggcgcccccagctgttctcgacggtattctggagccggtcggcattctcgcgtgagagggggtttacaagcacatcccctatcctcttgatgagaaagttattttcacttttatccaccagagactccttcttccgctccagaatcctctggaagaattggctatggatacttgatcagctcattccaaacaaggtgaacagcttttctacccattctgctgctcaaaaagcagatccgccatcatcccctggctgtacacaccactcattgatcttgagagtgcggacatgatgaaactctgtctgcatcaactcagtatagtacttcttgccgtttgaccacatctttcttttgctgttttagatacttgctgtctattatccgactccaagactctgcttccagctgtttggactcaatctcaaagtctcccagtagttgtccttcattcatgtctgtaccctcatcagtaagtgattctgttgactcattgaccttgctgattttatttagtgagtctgttgaatgagacaggaatttccaggtgtttgacatgttctcatcattgccaactccagtaatgttctgtatggagacacttttggagagcgagacactctgctgggatcgtctattggcaaatattggggtggtagcggtttcatccaccaggaggactgcggaccgaggacgctccttgggctgtgagggcttgtttctcataatgaccgtgggcagtgatgatgtgtcatgtgcctgaaggctccctttgggctgcttcattttgacctttgcacaggaggctagactttctcggcagcctttgtggacaaaagcactgcaatttgcacaagtataggcatctttgttggtgaagggcttcatacactggctacagctgatgggagaagatgcgcatcttctcccatcagcctgtttatcttctactgccagctcttcaaagaacgttttttgatcttcttgtccttcttccctttcttcaccactttgtctgatgggatgaagactg

SEQ ID NO: 15086 - DNA, 1060 bp, Homo Sapiens
ggaaggaaggcaacttggaagtggtgggtgcccaggacggtgcctccagcctcaacagtgggcatggacagggttaatgtctccagagtgtacactgcaggcagccacatttacacgcctgcagttgttttccggagtctgtcccacggcccacatgctcacttgactcatgctgctaagatgcacaaccgcacacccatacacaactacaagggccacaaagcaactgctgggttagctttccacagacataaatatagtccatctgcaatcacaagcacatagccaggtaacccaccaactcccctggatctgcagcccacacgtgggagtctggctgtcaccttcacaagccacagaaacggccacacatgttcacagctcacacgccctctccattcatcgaacttctcagtgtccctgtccctggtgcctggcacagggaacagcatgccccctccggggtcatgccacccagagactgtcgctgtctatggccccaactcatgctccctctcttggctacaccactctcccagcctgtgaccaccgatgtccacacacccccaaccacttgtccacacagctacccacgtacgacatcgtcctggctccccagagtatcttcccactgagacacgccgcccccacagaggcacagtccccagccacctctgcaactgcagccctcagtcacccctttttaagcaccctgattctaccaaatgcaaacacatctgggtctgcgattatgcacagagactttggacatacgaggaccctcagaccggaggaacacctgcccaaccccaacacgtgcttatgtaaccacgtggaaagcggcccctgctgcccctccacacacacatacacactcactgatctacagcccctgttcggcgtcagagtccccactagacccagtggaaggggttagagaccaagtaggggccagtttccaattcaccctgtcagggagtgagccggatctgacgttccttgtgacttaagggtccggcttgggaattaaagtttgtttctggcctttagcctaaaaaaa

SEQ ID NO: 15087 - DNA, 423 bp, Homo Sapiens
gatcagcggaccttagcttgttgcagttatgggcaaggggaatatgaacacacagacgggtcataaatgagcactggggaaagaggggaaagctgagggagcgctatatcatcacatcaactgagcatggacttggggaaataaggtaaaccacaagctgtgactcaattcgcaagcataggtagaggacgaggttttggtatctgaatgcctaaagaagtaaataaaatcgagggcagaaaataagtccaaggtatttttaaagcaaggaaggacaagaaaatggaagataaaaagaatgaacataaaagtctcaagttaatttttatgtcagacttctgaatgccccaaacaaaacaattctgtaaggccgaaagcagtggctcaggactgtaatctcagcactttggaatgtgcacattt

SEQ ID NO: 15088 - DNA, 1320 bp, Homo Sapiens
gctccggccgctgggcgtagctgcgactcggcggagtcccggcggcgcgtccttgttctaacccggcgcgccatgaccgtcgcgcggccgagcgtgcccgcggcgctgcccctcctcggggagctgccccggctgctgctgctggtgctgttgtgcctgccggccgtgtggggtgactgtggccttcccccagatgtacctaatgcccagccagctttggaaggccgtacaagttttcccgaggatactgtaataacgtacaaatgtgaagaaagctttgtgaaaattcctggcgagaaggactcagtgatctgccttaagggcagtcaatggtcagatattgaagagttctgcaatcgtagctgcgaggtgccaacaaggctaaattctgcatccctcaaacagccttatatcactcagaattattttccagtcggtactgttgtggaatatgagtgccgtccaggttacagaagagaaccttctctatcaccaaaactaacttgccttcagaatttaaaatggtccacagcagtcgaattttgtaaaaagaaatcatgccctaatccgggagaaatacgaaatggtcagattgatgtaccaggtggcatattatttggtgcaaccatctccttctcatgtaacacagggtacaaattatttggctcgacttctagtttttgtcttatttcaggcagctctgtccagtggagtgacccgttgccagagtgcagagaaatttattgtccagcaccaccacaaattgacaatggaataattcaaggggaacgtgaccattatggatatagacagtctgtaacgtatgcatgtaataaaggattcaccatgattggagagcactctatttattgtactgtgaataatgatgaaggagagtggagtggcccaccacctgaatgcagaggaaaatctctaacttccaaggtcccaccaacagttcagaaacctaccacagtaaatgttccaactacagaagtctcaccaacttctcagaaaaccaccacaaaaaccaccacaccaaatgctcaagcaacacggagtacacctgtttccaggacaaccaagcattttcatgaaacaaccccaaataaaggaagtggaaccacttcaggtactacccgtcttctatctgggcacacgtgtttcacgttgacaggtttgcttgggacgctagtaaccatgggcttgctgacttagccaaagaagagttaagaagaaaatacacacaagtatacagactgttcctagtttcttagacttatctgcatattggataaaataaatgcaattgtgctcttc

SEQ ID NO: 15089 - DNA, 1268 bp, Homo Sapiens
ggcagcggcaagcgcgctgcggttccggtggcgccatgtcgttctgcagcttcttcgggggcgaggttttccagaatcactttgaacctggcgtttacgtgtgtgccaagtgtggctatgagctgttctccagccgctcgaagtatgcacactcgtctccatggccggcgttcaccgagaccattcacgccgacagcgtggccaagcgtccggagcacaatagatctgaagccttgaaggtgtcctgtggcaagtgtggcaatgggttgggccacgagttcctgaacgacggccccaagccggggcagtcccgattctgaatattcagcagctcgctgaagtttgtccctaaaggcaaagaaacttctgcctcccagggtcactaggcgggcagcccacacccaccccagacggccaccacactgaggccacacgttggccattccaccttggagttggaaccctgggcgtcgagacaggaaggcagggcgcagtggttgaaacatcaggacactcccaaggccccggctctgaacaagaccttttcgtttcttggaaaagagactcatttgctgatggttcatgccttctgctgggacaggcctgggctgtgcagccacactgtcggctgacttagccccctgctcactctaggtgcctccaggaggtgagccctgggtgcagctggtctctgaatgacgttacaccctcaccttcttttcctggccctgtctctggactctcccctgtgaggcccaattccaagacagactctcgtcctcaccgaagcttaggcccacatctcccaggctgcttaggagacagaatggaaacggaggccgcccctgccagccgccctggccctggtcactgcatgatccgctctggtcaaacccttccaggccagccagagtggggatggtctgtgacctgctgggaaggcaggctgatggggcacacccttggcctctcgtccacgaggggagaaacctaaaccctgtttcacaatctgtgcggaagtagcttgcctcacttctgcttaggaaagcggctgttgctccataactctaaccagcacagggctgaggcctgcagtgcacacctgcagggaggcccttcccaaggtgtggtgactgtgccttactgtacatgctcggaggcctggccatataggagggtgggtgatgctgaaatcaccccccatcttaagtaattactttctggagtaatcaggtggaaatccatagacaaatgaaacattcagatgt

SEQ ID NO: 15090 - DNA, 453 bp, Homo Sapiens
ggcggacagaagtgtacaacgactccttgacttccgtctctcccttgatttagagcgttttttatgtgggctcttagatctacgtctgtctttctgtcttgaacgtgatctattatgggatctactcctgtgttttgattgtgatcttttccttctagaatgggattttgagctagacctggattttgagcgagtatgggaacgagatcgaccgccttttctttcattgctctttccagactctggttcaatagctgctgagataaatgactgagcttctcgtactcgcttcattacttcttctaactccttagctgcagcctgaggtgtcatctcagggggttttactattgcattgttggagtgatttattctgccatccgcacaaacttcacttctccaacttgtttaaaaaattcaagtagttgatcagctgtcgttgttacacattct

SEQ ID NO: 15091 - DNA, 2509 bp, Homo Sapiens
  misc_feature (1371)..(1389): n is a, c, g, or t
  misc_feature (1566)..(1577): n is a, c, g, or t
  misc_feature (1618)..(1636): n is a, c, g, or t
  misc_feature (1902)..(1902): n is a, c, g, or t
  misc_feature (2117)..(2117): n is a, c, g, or t
  misc_feature (2231)..(2231): n is a, c, g, or t
  misc_feature (2234)..(2234): n is a, c, g, or t
ggggcgccgcctttctccgctggcaacggcgccgctccccgctcctcctccccagccatggcgttcacgttcgcggccttctgctacatgctggcgctgctgctcactgccgcgctcatcttcttcgccatttggcacattatagcatttgatgagctgaagactgattacaagaatcctatagaccagtgtaataccctgaatccccttgtactcccagagtacctcatccacgctttcttctgtgtcatgtttctttgtgcagcagagtggcttacactgggtctcaatatgcccctcttggcatatcatatttggaggtatatgagtagaccagtgatgagtggcccaggactctatgaccctacaaccatcatgaatgcagatattctagcatattgtcagaaggaaggatggtgcaaattagctttttatcttctagcatttttttactacctatatggcatgatctatgttttggtgagctcttagaacaacacacagaagaattggtccagttaagtgcatgcaaaaagccaccaaatgaagggattctatccagcaagatcctgtccaagagtagcctgtggaatctgatcagttactttaaaaaatgactccttattttttaaatgtttccacatttttgcttgtggaaagactgttttcatatgttatactcagataaagattttaaatggtattacgtataaattaatataaaatgattacctctggtgttgacaggtttgaacttgcacttcttaaggaacagccataatcctctgaatgatgcattaattactgactgtcctagtacattggaagcttttgtttataggaacttgtagggctcattttggtttcattgaaacagtatctaattataaattagctgtagatatcaggtgcttctgatgaagtgaaaatgtatatctgactagtgggaaacttcatgggtttcctcatctgtcatgtcgatgattatatatggatacatttacaaaaataaaaagcgggaattttcccttcgcttgaatattatccctgtatattgcatgaatgagagatttcccatatttccatcagagtaataaatatacttgctttaattcttaagcataagtaaacatgatataaaaatatatgctgaattacttgtgaagaatgcatttaaagctattttaaatgtgtttttatttgtaagacattacttattaagaaattggttattatgcttactgttctaatctggtggtaaaggtattcttaagaatttgcaggtactacagattttcaaaactgaatgagagaaaattgtataaccatcctgctgttcctttagtgcaatacaataaaactctgaaattnnnnnnnnnnnnnnnnnnnccgacaagagcaactaaaagaaaagagagaagaaagagaaaacaggtcaaataaaacaacggataagagaaaaacccccgtagaaactatccggccgcccgaccccgccggccccagcgcatggctctaccggtggcacggcgccgtgtgacctctgtggacttggggtcctcctgnnnnnnnnnnnnacagtcgcgctgcgcgcgcacccacccttcccctgcgcggnnnnnnnnnnnnnnnnnnngtcgcgtaaccgcagcgggtacgcgtgctgggctgcatggtgcgtagtggtggtttcgttccatatcgatcacgactgcatcactctttgtcgtccactccaacaacgttcatcgacctgatgatactagatggcgccctttgctgtcgctgcgacctctataatatgactcgggtctcgggtgtggcctctcttgactcgatgctagtcgcacactcatgtccagttactgagcgtgtgctgttgatcgcgcagactcccgaaanaacttccgatgcgcttcagctgcagaacggcgagccgggaggtggttcgtgttcggctgtgtagggcgagcattataaggtggacgcagacggaccggtagtcgcgaaatgagcgtgggcggcgcgggcactactaccgcgttaccatcgatgccacgtcgctgtgctttacttatcaccccggctccgtctcggtatatctggtctcctcaganttggccatctgagactactataactgtccctcgtctatcgttctgctctcgagcaacgtcgcctctaccagccgattacacactcgagacgctcggcgtggcgggcgtcgtgtntcngtgtgacgcacgcgccgcgtgcagatatgcttgacgtcgcgttccaggggcagacgcttactatcttgcgcggcgcgcctcgatcttcgacggggcgaccgcgagcatactagccatgaccgacacatacacgttagcccagacgccgccatagagtatgcgctagatcttgcagcgccaacacgatttgttaggctccttccgcccgtctcactatgtcactccacaccgcatcttgtcgagcgccgagtggtattcgtggagccggtcgcgcg

SEQ ID NO: 15092 - DNA, 1842 bp, Homo Sapiens
gtcggctccctgacatgcagattccacccagaagacagagaaggagccagtgggggtggaatgggctggggtcaaagactgggtgcctgggagctgaggcagccaccgtttcagcctggccagccctctggaccccgaggttggaccctactgtgacacacctaccatgcggacactcttcaacctcctctggcttgccctggcctgcagccctgttcacactaccctgtcaaagtcagatgccaaaaaagccgcctcaaagacgctgctggagaagagtcagttttcagataagccggtgcaagaccggggtttggtggtgacggacctcaaagctgagagtgtggttcttgagcatcgcagctactgctcggcaaaggcccgggacagacactttgctggggatgtactgggctatgtcactccatggaacagccatggctacgatgtcaccaaggtctttgggagcaagttcacacagatctcacccgtctggctgcagctgaagagacgtggccgtgagatgtttgaggtcacgggcctccacgacgtggaccaagggtggatgcgagctgtcaggaagcatgccaagggcctgcacatagtgcctcggctcctgtttgaggactggacttacgatgatttccggaacgtcttagacagtgaggatgagatagaggagctgagcaagaccgtggtccaggtggcaaagaaccagcatttcgatggcttcgtggtggaggtctggaaccagctgctaagccagaagcgcgtgggcctcatccacatgctcacccacttggccgaggctctgcaccaggcccggctgctggccctcctggtcatcccgcctgccatcacccccgggaccgaccagctgggcatgttcacgcacaaggagtttgagcagctggcccccgtgctggatggtttcagcctcatgacctacgactactctacagcgcatcagcctggccctaatgcacccctgtcctgggttcgagcctgcgtccaggtcctggacccgaagtccaagtggcgaagcaaaatcctcctggggctcaacttctatggtatggactacgcgacctccaaggatgcccgtgagcctgttgtcggggccaggtacatccagacactgaaggaccacaggccccggatggtgtgggacagccaggcctcagagcacttcttcgagtacaagaagagccgcagtgggaggcacgtcgtcttctacccaaccctgaagtccctgcaggtgcggctggagctggcccgggagctgggcgttggggtctctatctgggagctgggccagggcctggactacttctacgacctgctctaggtgggcattgcggcctccgcggtggacgtgttcttttctaagccatggagtgagtgagcaggtgtgaaatacaggcctccactccgtttgctgtgaaaaacaaacacaacagaacaaccaaacgggggggccgcaacaagaagtaattccccggagggggcccacaactttacgcggtaccccggacattccgttgaacacaaagggcgccccaaataagggacgccgataataaaacagcaaaggcacagggcccggccgtcatacaaaacgccgccgcgcgcggggccaccctgagctcacccgggggactctaggagacagggacacctaacattcacgggcgggcggccctcaacgtggcgcccaacacaccccacagagattacaaggcccgcacgggagcctaaaaagcacacggcgtatacggggctaaccacgcgcaaatggcaggagcatagaaacttggcaaccgggcggaatagcaccattct

SEQ ID NO: 15093 - DNA, 322 bp, Homo Sapiens
ttaatcagcctatctatatccacagctacgcgggatccgagccgagtctgcaacctacaccacagctcacggcaacgacggatcattaacccactgagcaaaggcagggaccaaacccacattcagagaccgaacccgcaacctcatggttcctagtcggattcgttaaccactgcgccacgacgggaactcctcatggtagttttgatttgcatttctctaataatcagggatgttgagcattttttcatgcacttgttggccatctgtttatcttccttggataaatgtctattcaggtcttttgcccatttttccattg

SEQ ID NO: 15094 - DNA, 950 bp, Homo Sapiens
  misc_feature (324)..(343): n is a, c, g, or t
  misc_feature (833)..(833): n is a, c, g, or t
  misc_feature (914)..(915): n is a, c, g, or t
agtgctcttctgggaagacgacctcttcttctccgcaaatgtggtattgcagcaggccaagatcttcctgtacgcgttctttttctggagtcagataatccataatgcctggaaatgctagacgaggtagtttcttttgcactggaagcacccgtgaaatccacatctgaggtattggatgaatgtgcagttccctcagttctccctatagaacaaggtaaatccaaagtaggattctctgaaattgattccttatccaaaagtggctcagcagttttttgaatcatttttcttgtatatgggccaggtggacgacctacagannnnnnnnnnnnnnnnnnnnctatgccattgcttacttcccttgaatcagatataggtttggatgcctttctgcctttaattttaaattcatgagatgttccttcaggttctttctctgctttgaaagccacatttggtggaacaggaggaacacgaattcgcaacccaaacaaatgcttcttcttctttatttctttcccagacataaacatggtcttgtaatcatttaatgcctccagaacatgctcatatctttcagattttggtgtgtctgccagcactgtaatggtagacgtttgaggtattctggtccagaactgcagacagagcatataaacgtataaaatctgtctccaaatagcattggcttttgaaggcattgcacacaagcctcatgaaaccactgcttacatttgcagcactgtagcatcttcaaataccagtctccagggcctccacaatagcagtaacactgctggacattggttttatgacctgcatcccattcnggtctgcccactatagggtaatgtctgctcatgacttgcatgctttggatttggtcctttcttagtgcaccacctctttgnntgtgtgcaaacacctgccgaagagcattttcatca

SEQ ID NO: 15095 - DNA, 1918 bp, Homo Sapiens
  misc_feature (1235)..(1386): n is a, c, g, or t
  misc_feature (1394)..(1411): n is a, c, g, or t
  misc_feature (1433)..(1445): n is a, c, g, or t
  misc_feature (1487)..(1514): n is a, c, g, or t
  misc_feature (1528)..(1552): n is a, c, g, or t
  misc_feature (1596)..(1612): n is a, c, g, or t
ggtccggaattttcgggatgttgccaaaataccttctgaactacactgcattgttgtgccgagaacaccgagcactgaactttgcaaagaccttcgtctttgagaagacggtagcttctgcagttaggaggtgcagacacttgctctcctatgtagttctcagatgcgtaaagcagaacagcctcccgaatgaagcgttgccattgaactcaccagtgagttagcagcacgtgttcccgacataacattgtactgtaatggagtgagcgtagcagctcagctctttggatcagtctttgtgatttcatagcgagttttctgaccagcttttgcggagattttgaacagaactgctatttcctctaatgaagaattctgtttagctgtgggtgtgccgggtggggtgtgtgtgatcaaaggacaaagacagtattttgacaaaatacgaagtggagatttacactacattgtacaaggaatgaaagtgtcacgggtaaaaactctaaaaggttaatttctgtcaaatgcagtagatgatgaaagaaaggttggtattatcaggaaatgttttcttaagcttttcctttctcttacacctgccatgcctccccaaattgggcatttaattcatctttaaactggttgttctgttagtcgctaacttagtaagtgcttttcttatagaaccccttctgactgagcaatatgcctccttgtattataaaatctttctgataatgcattagaaggtttttttgtcgattagtaaaagtgctttccatgttactttattcagagctaataagtgctttccttagttttctagtaactaggtgtaaaaatcatgtgttgcagctttatagtttttaaaatattttagataattcttaaactatgaaccttcttaacatcactgtcttgccagattaccgacactgtcacttgaccaatactgaccctctttacctcgcccacgcggacacacgcctcctgtagtcgctttgcctattgatgttcctttgggtctgtgaggttctgtaaactgtgctagtgctgacgatgttctgtacaacttaactcactggcgagaatacagcgtgggacccttcagccactacaacagaattttttaaattgacagttgcagaattgtggagtgtttttacattgatcttttgctaatgcaattagcattatgttttgcatgtatgacttaataaatccttgaatcatannnnnnnnnnnnnnnnnnnnnnnnnnnnnnnnnnnnnnnnnnnnnnnnnnnnnnnnnnnnnnnnnnnnnnnnnnnnnnnnnnnnnnnnnnnnnnnnnnnnnnnnnnnnnnnnnnnnnnnnnnnnnnnnnnnnnnnnnnnnnnnnnnnnnnnnaaaaccgnnnnnnnnnnnnnnnnnnaaaaaattttttaacccatttnnnnnnnnnnnnnccgccccgaaaaagaaggaacaccggtgactatttttttctnnnnnnnnnnnnnnnnnnnnnnnnnnnngggcgtgggtccannnnnnnnnnnnnnnnnnnnnnnnnggggggggaacaaagggaggtttttttaaaaaaacctacccgcnnnnnnnnnnnnnnnnncagactttcccggcgggcataccaccccaagggggggtgcccgcgcggggcctctcaaaaaataaatgacacccacccccgcccgcctttgccactttttttaagggggagagggcgtgggataatcctatacaaacctcctcccgcggcggaaagggggcggaccacctctccacacaacgggttattttgtgacacactgttacactcgccgcgcggggataatcaacaaacctccctgtgccccgccgtgatagccataaaatatttctccccccccagcgggacgaaaaagccgggggagac

SEQ ID NO: 15096 - DNA, 556 bp, Homo Sapiens
  misc_feature (69)..(85): n is a, c, g, or t
  misc_feature (204)..(221): n is a, c, g, or t
tatgtcatctttaaactgcattctacagtctatagttcttttgtaacatacagtagagtaacaaactcnnnnnnnnnnnnnnnnnctttaaataaggggcaagtttccaaagatcagtgtggagtgctacagaaataattataggagaggaaatcataatcacagaaggtataatgcttgtttgaggctccggaataagaactnnnnnnnnnnnnnnnnnncactggtttcatgcttacggggcacacactttggtgcaccccgtgaacacaaattttaataccaaaaaatccttgatgcttcacctggggctgccaagcagtttgtaaaacagaggaaaacatttagtgcagtctgtattatccttttccaacttttctgtttgtgcaagtttttgaagattcattggccaaacaatgaacaacaaaggttttctgagagaagacaaggtggacttttcattttgttagtaaataccagtggcactgttgaacgaaacaaatacttttatctcagtctttcaaatcagtattaatgtctgtgtttccttccactg

SEQ ID NO: 15097 - DNA, 2332 bp, Homo Sapiens
  misc_feature (30)..(30): n is a, c, g, or t
cggaggagccgccgacgcagccgccaccgncgccgccgccgccaccagagccgcctctgtccgcgccgcgcctcggcagccggaacagggccgccatcggggagccccaacacacggtccacagctcatcatgatggacttggagctgccgctcgccggagactcccgtcccagcaggacatggatttgattgacatactttggaggcaagatatagatcttggagtaagtcgagaagtatttgacttcagtcagcgacggaaagagtatgagctggaaaaacagaaaaaacttgaaaaggaaagacaagaacaactccaaaaggagcaagagaaagcctttttcgctcagttacaactagatgaagagacaggtgaatttctcccaattcagccagcccagcacatccagtcagaaaccagtggatctgccaactactcccaggttgcccacattcccaaatcagatgctttgtactttgatgactgcatgcagcttttggcgcagacattcccgtttgtagatgacaatgaggtttcttcggctacgtttcagtcacttgttcctgatattcccggtcacatcgagagcccagtcttcattgctactaatcaggctcagtcacctgaaacttctgttgctcaggtagcccctgttgatttagacggtatgcaacaggacattgagcaagtttgggaggagctattatccattcctgagttacagtgtcttaatattgaaaatggacaagctggttgagactaccatggttccaagtccagaagccaaactgacagaagttgacaattatcatttttactcatctataccctcaatggaaaaagaagtaggtaactgtagtccacattttcttaatgcttttgaggattccttcagcagcatcctctccacagaagaccccaaccagttgacagtgaactcattaaattcagatgccacagtcaacacagattttggtgatgaattttattctgctttcatagctgagcccagtatcagcaacagcatgccctcacctgctactttaagccattcactctctgaacttctaaatgggcccattgatgtttctgatctatcactttgcaaagctttcaaccaaaaccaccctggaaagcacagcagaaattcaatgattctgactccggcatttcactaaacacaagtcccagtgtggcatcaccagaacactcagtggaatcttccagctatggagacacactacttggcctcagtgattctgaagtggaagagctagatagtgcccctggaagtgtcaaacagaatggtcctaaaacaccagtacattcttctggggatatggtacaacccttgtcaccatctcaggggcagagcactcacgtgcatgatgcccaatgtgagaacacaccagagaaagaattgcctgtaagtcctggtcatcggaaaaccccattcacaaaaggacaaacattcaagccgcttggaggctcatctcacaagagatgaacttagggcaaaagctctccatatcccattccctgtagaaaaaatcattaacctccctgttgttgacttcaacgaaatgatgtccaaagagcagttcaatgaagctcaacttgcattaattcgggatatacgtaggaggggtaagaataaagtggctgctcagaattgcagaaaaagaaaactggaaaatatagtagaactagagcaagatttagatcatttgaaagatgaaaaagaaaaattgctcaaagaaaaaaggagaaaatgacaaaagccttcacctactgaaaaaacaactcagcaccttatatctcgaagttttcagcatgctacgtgatgaagatggaaaaccttattctcctagtgaatactccctgcagcaaacaagagatggcaatgttttccttgttcccaaaagtaagaagccagatgttaagaaaaactagatttaggaggatttgaccttttctgagctagtttttttgtactattatactaaaagctcctactgtgatgtgaaatgctcatactttataagtaattctatgcaaaatcatagccaaaactagtatagaaaataatacgaaactttaaaaagcattggagtgtcagtatgttgaatcagtaatttcactttaactgtaaacaatttcttaggacaccatttgggctagtttctgggtaagtgtaaatactaccaaaaacttatttatactggtcctaatgccatttggtcatattccatagaatttatatggatgaaaatggacattctgggctaaaaaacaaatttatttggcaaaaactaacccacctatggtac

SEQ ID NO: 15098 - DNA, 789 bp, Homo Sapiens
cggagttgtcaatgtggggtgacacatcatcagaataagagtcccggggctcagaatgggaacaacttcaccaaaataaacttccttagcaaaatgagaagcaagaagttccccctccagaatcagggaccacaggttctgggaggaaggctcctttgtaggattgggaagggaactgggcagacttggtttatgtcttctaacccctgatcctcaatcccttaccttagtaatactggactttaatgactggtaatgacccgtaaaaccaagtcaacaaatgtctatctatccctgtgacatggccatgggatggctcttctgaccattgggggccaggccaggcttagggtagcaaggaccaggccaaaggggcagggcctcctttggaggggttgaggggtacatcctcggctggtgtttgcatccaggggtccagcaggatctcttccagtgagggtcgggaagaaggtttgggggccaggcaccggcggattagggcacagcagtctggggagacatgggctgggaagtggagctcagcttccagaatctcctggtccctctcaaagggaatgtccccacacaccatgtcatagaggaggatgcccagtgaccagacagtggccgggagtgcatggtactggtgtcgagagatccactctggggggctgtacacccttgtcccatcaaagtcagtgtagggttcatcatgaagcagggcaccagaaccaaaatcaatgagtttggcacagccacggcgtaggtctatcaggatgttctcatcct

SEQ ID NO: 15099 - DNA, 772 bp, Homo Sapiens
cgtccttatacaaggctgatgctgatccgtgggatgaggccaatgagcccaggcaccacatcagaatagttgacgtcaatggtctctgcgatggattggaagccgtagaggagggcctctgtgtgctgccaggagtagggctcctctgagctggtgagcaaacgacccagcttgtcatagaggttgctgagcagctcggcccccaacatctcatagacatacatgagcgtgtctgagatgtccaccctgtaaattcggaactgctccttctcgtctgaggaccagaatccatattcctcatcagaagggaactgggccttgtgcagaagcacatccaccagctggaagtagactggccggtacacctgagggtatacagcctgcttctctgcctcaaaggatagaatatcatcctgcagtgtgtaccagaaggtgagggttagggagctggtggtctcattgacaggatagtggccagggatgcctgtgcagaacataatcatgttgacgagtgccaggaaactctgccagtgctctacttggtccagcaaggcccgggagtggttctcgcccagggccacagcgatgcgacagatgccatgggaggtctccatgtccccattctgcactgcctgccgcagttgttcctgcagacccagcaccagcgggatgagtttcaggagtgtgttcacgtacctctgggcatcagcctgtgagatggcattcacaatggcctccacactgctgtcgaagagctccgagtcctgcagag

SEQ ID NO: 15100 - DNA, 1015 bp, Homo Sapiens
  misc_feature (904)..(904): n is a, c, g, or t
  misc_feature (937)..(937): n is a, c, g, or t
  misc_feature (959)..(959): n is a, c, g, or t
  misc_feature (964)..(964): n is a, c, g, or t
tggaccggtccggaattcccgggatgcagaccccagagtcagaaggagtgagaaccctgacccctaatcccactgcatccagccaataggagcccagccaccatggcggagctgcaggaggtgcagatcacagaggagaagccactgttgccaggacagacgcctgaggcggccaagactcactctgtggagacaccatacggctctgtcactttcactgtctatggcacccccaaacccaaacgcccagcgatccttacctaccacgatgtgggactcaactataaatcttgcttccagccactgtttcagttcgaggacatgcaggaaatcattcagaactttgtgcgggttcatgtggatgcccctggaatggaagagggagcccctgtgttccctttgggatatcagtacccatctctggaccagcttgcagacatgatcccttgcgtcctgcagtacctaaatttctctacaataattggagttggtgttggagctggagcctacatcctggcgagatatgctcttaaccacccggacactgttgaaggtcttgtcctcatcaacattgatcccaatgccaagggttggatggattgggcagcccacaagctaacaggcctcacctcttccattccggagatgatccttggacatcttttcagccaggaagagctctctggaaattctgagttgatacaaaagtacagaaatatcattacacatgcacccaacctggataacattgaattgtactggaacagctacaacaaccgccgagacctgaactttgagcgtggaggtgatatcaccctcaggtgtcctgtgatgctggtggtagggagaacaaagcacctcatgaagatgcagtgggtggaatgtaactcaaaactggacccanccagacctcgttcctcaagatgcctgactcggnaggtcagccccagctgactcanccagncaagctgaccgagggccttcagtacttcctgcaagcatggggctacttggc

SEQ ID NO: 15101 - DNA, 719 bp, Homo Sapiens
gtagaatcgactcgtacctttgcgatgaattgaattgtagtatgtcctcactttgcttgaacttggctatcctgccatgctccagacactcctgcagctccagcttatcattcacagtggatgccaacggcctgttcataccgggaaggttaccccagaagtagcgggccctgtgtgcagctgacacttctttggcatcaatcatcacagggttggactcgagaaatcgcgagatgtccctcttgtcactaacgcccatggccaccacattctcaaagagccagaagaaggggcgatcatctccctccttgggccgcgcatcatgcaggaggcggtagaactcaaagaagagccggccagtgccctcgtagaggcccttgcgagcagggttgacgatggagaggtcattgcagggactgcccccaatcaccagatcgaatgggccccactcctggatatgcttctgtgtgacgctgcggacgtccccgacgtacatgatcttcccctggtgccgcaccatgcccaccgtgatggagtcctcacacacctccgaggcaatgtagcggtccacctgaatgcccaagtccttcagcaccaggagccctgtagcgattccatcaaagagagacagcacccggatgggcttcctcttctcagctgggacaggtgggtaaccttggaaggtcaattctatcgcaaagggatccttctgaccacca

SEQ ID NO: 15102 - DNA, 1039 bp, Homo Sapiens
ttataggctaggtacgaggccgggggtgaatcggcacgaggaggaaatcatcgagttccccatcctaaagctaaatggccggaccatggagattgagtctacctttcacatgtatgtccagcctgtagtccatccacagcttaccccattctgtacagagctcaccgggattattcaagccatggtggatggtcagccaagcctgcagcaagtgctggagagggtcgatgaatggatggcgaaggaaggcctcttagatccaaacgtcaagtcaatttttgtcacctgtcgagactgggacttaaaagtcatgctcccaggccagtgccagtacttgggcttgccagtggcggattacttcaagcagtggattaatctgaaaaaggcttacagcttcgccatgggctgctggcccaagaatggacttctagacatgaacaagggcctcagcctgcaacacataggccggccccacagcggcattgacgactgcaagaacattgccaacatcatgaagacactcgcctatcgaggcttcatcttcaagcagacatcgaagccgttctgattggccgaggacaggatggggcaggacagggtagctgtttggcccagcccagaatcctcctctccctcaccagaggggaagagggagagtggcatagctctgtgtccagagtgtccccagctgccctgtgggctcatgcccttggcgtgggcttgtgcccttgcaagggcttggccacttggcccttctggagcagacactttgtgccccccatccccacccctcaatctcagcccagtatcagcccctcccattgcgggcctgggctagggggacccaggcactcaccgcctcctccctggtacacaggcttctgtggggccaccaagcccctcctgtgccccctcccatccatagtgcatggtgtgtggtgcccccagggctccaggacagatcaggccccaccttgtgtctacccccatccccgctgtgaacgtgccactgaataaagtcggggaaacgagaaaaaaa

SEQ ID NO: 15103 - DNA, 1174 bp, Homo Sapiens
  misc_feature (377)..(416): n is a, c, g, or t
cggtccggaattcccgggattacgaaacttggggggagtgcacacgaagaacttcgaggagcgcacgcgggaccagggaccaggctgagactcggggcgccagtccgggcaggggcagcgggagccggccggagatgccctgtatccaagcccaatatgggacaccagcaccgagtccgggaccccgtgaccacctggcaagcgaccccctgacccctgagttcatcaagcccaccatggacctggccagccccgaggcagcccccgctgcccccactgccctgcccagcttcagcaccttcatggacggctacacaggagagtttgacaccttcctctaccagctgccaggaacagtccagccatgctcctcagcnnnnnnnnnnnnnnnnnnnnnnnnnnnnnnnnnnnnnnnntcccctgcctctgcctccttcaagttcgaggacttccaggtgtacggctgctaccccggccccctgagcggcccagtggatgaggccctgtcctccagtggctctgactactatggcagcccctgctcggccccgtcgccctccacgcccagcttccagcagcccccagctctctccctgggatggctccttcggccacttctcgcccagccagacttacgaaggcctgcgggcatggacagagcagctgcccaaagcctctgggcccccacagcctccagccttcttttccttcagtcctcccaccggacccagccacagcctggcccagagccccctgaagttgttcccctcacaggccacccaccagctgggggagggagagagctattccatgcctacgggctttccaggtttggcacccacttctccacaccttgagggctcggggatactggatacacccgtgacctccaccaagccccggagcgggggccccagtggaagtgaaagccccctgggctgtgtgtgggggacaacgcctcatgccagcattattgttgtgcgcaaatgcgaagggctgccaggggcttctttcagcggcacagggggcaaaaaacgcccaagtacaatcggccctgggctaaaaggcactgccctggtgggaaaaaaggcggggccaaaccgcctggccaggtttggccccccttccccaaaaaatcccggtgtcggtgggggctatgggggaaaaagaaaat

SEQ ID NO: 15104 - DNA, 933 bp, Homo Sapiens
ggctattctccttggttgtggagctgtcactattaaaaagtcgtgaacttcttcaaggcagtgcgtttggggggaaatgtaatagtggggctcaatacctgaggtgttgtacttgttggtggaccaaaacttgtgtgtttggtgcaaaaattgggagttacctctcggctattcccactctgtgcagaagacagactttgtcccagttgggccgattctggcaacagactgtaaaacacagaaaagtcttttttgaaggggcctccggtgaggatggcacatcaattacaggaggtgtatatagtgtagtttggtaaataggatccatctccaggactgggggttcctaatgggcaaaatcccaaaatctgggggttaatgggactaaaagctgctggtcctcctaataaatcttcgaccagttttgggtttatttggaacctgtttagataatatggaagttcctgttcccagtgggacagtatcaggtgaaattacacgctgaatcaatattaagacactgaggaatctgttatccaaggagtactttgaacttggacagatcctaaattcaatcgtgtttaatccaaattgtgtcccggggtgtatccgtaagaaactgtctcaggctgtctgtgagataaactatgagttaggtacttgtgttgtgcacgagttgggcagacagttgctagagttctgtacaaggatgtgaatttacaattggtctgagtcaggatctcggctttcccctaatttcacataatgaattcaaagggagaccagaaggaaaggatttaaagtaaggctctattggtaacatacgcatccgttgggcaggcgatctgtatcgcaatatcctgtcccacatgcaagcgtacacgcggctgataaacagctcggtacaatatcgactgcattctgtttaaaagc

SEQ ID NO: 15105 - DNA, 1025 bp, Homo Sapiens
agtgacttgtcaacttgagctcccaaagtgctgggattacaggtgtgagccactgcacccagcctggcagtcaattttaagcctcctatttcccaggttttagcttaataatcctcattagtttttcagatttttgtcagtcttgttttggggctattttgccttagtgggcctaaacagaatattaaaatacattaataatccatactgagagtagagtataaatgggtttctcactccttagggacacgagtggaaacaatacatcccatgaacacaggtgaatgtccctggttatccctgagctgggcagtttcacacaatcattttttctctgaggccaaagtctgtggtttgatcatcttagcagcttccagaacagaaagtaggtttactttgtctccaaattctttttctcggtgctcaagaagaatgccctgctttcctgatcccaccacgaaaactcccccaaggatgaagccttctccttccaggtttccagagaagcctccgttccaggctcggaagaagttgtaccacactcccagacggataaatcccataaacatcatcttccgcctttgtggaccattagaactttttcttttcatcccaaggaagatttctcctttgaaataaggctggaaatccttcacttcagtcctgatgtgctcctttaccactgcatagagggggacgcccagctggtccaacatgcttttcagggaggacagatccgcagcttcctctcgacagaggaaacagcctggcctccgcacggccataatcacagctccatttttttcccatagctcctttgctttgaaagtccttggttccttctccagtgttttcaggtctatatcctccaggtactccagggccgctttctggggcttggacagaaacacgtctgtgttggcaagcagcaatgccaaggcagcagcccccagggctcctgcaccaatggaccacatccccatggtgaagaaacttgggtcctggaggaaagacatttctcaagt

SEQ ID NO: 15106 - DNA, 1316 bp, Homo Sapiens
  misc_feature (489)..(564): n is a, c, g, or t
  misc_feature (1105)..(1164): n is a, c, g, or t
  misc_feature (1278)..(1278): n is a, c, g, or t
ggtttcttagctctccatttgccatgattttcctcccattcatcatgagggagtttctcaaaccaggagtttatatttattttttagaaaatacacacttttcaggagaaacctgagcatgattttggattctccaccctccccccagtctctgcacctgggattcagctcaaggattcagtgtcttcatttttacaaaagttcccccaagaaatcagcaaccagcctctgtttcatctgggagcccctcccttggccccctgggtttgggggtgctgccctactgggaacagcgggggtctgtcacccgtctgagccgcacccccctgtgtggatttcaggaagagcctccctttctttgcgtctccctttctttaattaacattttcaaaagtaataaattcttactgacgacttgtaacttagtcatattttatacttgtagcctttaataaagccatttaaaaaaatgctacaacaacaacaacnnnnnnnnnnnnnnnnnnnnnnnnnnnnnnnnnnnnnnnnnnnnnnnnnnnnnnnnnnnnnnnnnnnnnnnnnnnncgttggtcgccccgttcggcccccgcaaaagctttgagagaacctttcttttggccccgggcctccccccaaggaagagggaaccctgggccgtagccctggttaccacgagaaaaccgccggcccgctggagatagccgcggtggccttccgcccccaaagaaaacaccactctccgggggcgcccccccgggagcgctttcttcaaaacacatttccctgatgaccgcgcgtccccggccggtccgcccaccgcgccccaatcacaccccggataggttgctttcccaccactaccccctgtctgcacgcgctgaatccggcccggggcgtggggtggtggggcgcccgccgtccgcgcttagcccacgtggtatgtaaagatcgccgccagaacgcaacgtgtgctcccgccgccgcggttggcgtagcggccgtcgagagcgacgaggcgcccggcgagccgacgtcctgccgacccctctgttgagccggggaacagcattgacccgcgcagccgttctttcatcgccctcctgannnnnnnnnnnnnnnnnnnnnnnnnnnnnnnnnnnnnnnnnnnnnnnnnnnnnnnnnnnnatccaccagtcttttgcggagcacctcccgccgcgtccgcgtgattgtgagaggggcagggcgcgcgcccccacgcgatgctctacctcctacctccgccacccgcggcgccangcgccccgcggggcgcgagcgtcgcccgcgcctcggtg

SEQ ID NO: 15107 - DNA, 288 bp, Homo Sapiens
agaatgtcagcttcatacttaccagcactgtttattttaatattttttcctgttatatgtaatatacataacttcaaagcacatccgtacaaacctcctacaagctgcaccttcataatgagaaaccataagcatacaatgtctacttcccttcctgtggcttcgttttctgttcttgctttcttttctttttctcatttcaaaggagagtcatctgcagtggccctcagaaggaccaggacacagagggtgaagggtgtggggtcccggcccgcgaaagaaaaaaac

SEQ ID NO: 15108 - DNA, 730 bp, Homo Sapiens
  misc_feature (55)..(343): n is a, c, g, or t
tgtctgaccaccctactctcagagcacacttggtctcgttatccaggagctctgnnnnnnnnnnnnnnnnnnnnnnnnnnnnnnnnnnnnnnnnnnnnnnnnnnnnnnnnnnnnnnnnnnnnnnnnnnnnnnnnnnnnnnnnnnnnnnnnnnnnnnnnnnnnnnnnnnnnnnnnnnnnnnnnnnnnnnnnnnnnnnnnnnnnnnnnnnnnnnnnnnnnnnnnnnnnnnnnnnnnnnnnnnnnnnnnnnnnnnnnnnnnnnnnnnnnnnnnnnnnnnnnnnnnnnnnnnnnnnnnnnnnnnnnnnnnnnnnnnnnnnnnnnnnnnnnnnnnnnnnnnnnnnnnnatggataccaagggatgactgtataaactcactcaggaaggcttctcattggaggaaggtcccagttcaggacacacagggacatctccctggactactgtccattcatccatccattcatccattgtctccccccacccccgcatctcggactgtcccagtgacagccctagcaagaagagacaagaaacaagttcacgttgtccagttttgaggtaatggaagaagttgcaccagtatgagaatagtgggtcagttttctacaggatgcagaaagcatatcgggcagcctcggggtgcggaaaggagcctggcctctctagcagccacacaggcctgcagtaggatggggctgtggctggccatgtggatcacttgggcctcatg

SEQ ID NO: 15109 - DNA, 633 bp, Homo Sapiens
  misc_feature (431)..(431): n is a, c, g, or t
gggggctaccccggctactcctgctcagcatggctgctttagtgactgttctcttcacaggtgtccggaggctgcactgcagcgcagccgcttgggcgggcggccagtggcgactacagcagggactggctgccaacccctccggctacgggccccttaccgagctcccagactggtcatatgcggatggccgccctgctcccccaatgaaaggccagcttcgaagaaaagctgaaagggagacgtttgcaagacgagttgtactgctgtcacaggaaatggacgctggattacaagcatggcagctcaggcagcagaagttgcaggaagaacaaaggaagcaggaaaatgctcttaaacccaaaggggcttcactgaagagcccacttccaagtcaataaaaagcaactcctgcctccccttcctcgggngggagagaaagaaagggaaaaaagaccttgttcggccggcctcgggcccctcgaagaaacttttcctagaccatttccgtttggcgccgcggggccccagtaaggttaaagtggaacaatgggtcattagcctggttttccctagggaagaacccctgggcccatggacctaggggggtttggggattccctcacccaaatt

SEQ ID NO: 15110 - DNA, 1232 bp, Homo Sapiens
gggcccttcgatagctcatctttgcgcgtcgcagtcgcgcggagcccggcttccgacgtgcagcctggcagtgcagtgagctgtctggccttttgtccttgatccttggttaaggaaatgaccaaccagtacggtattctcttcaaacaagagcaagcccatgatgatgccatttggtcagttgcttgggggacaaacaagaaggaaaactctgagacagtggtcacaggctccctagatgacctggtgaaggtctggaaatggcgtgatgagaggctggacctacagtggagtctggagggacatcagctgggagtggtgtctgtggacatcagccacaccctgcccattgctgcatccagctctcttgatgctcatattcgtctttgggacttggaaaatggcaaacagataaagtccatagatgcaggacctgtggatgcctggactttggccttttctcctgattcccagtatctggccacaggaactcatgtcgggaaagtgaacatttttggtgtggaaagtgggaaaaaggaatattctttggacacgagaggaaaattcattcttagtattgcatatagtcctgatgggaaatacctagccagtggagccatagatggaatcatcaatatttttgatattgcaactggaaaacttctgcataccctggaaggccatgccatgcccattcgctccttgaccttttccccggactcccagctccttgtcactgcttcagatgatggctacatcaagatctatgatgtacaacatgccaatttggctggcacgctgagcggccatgcctcctgggtgctgaacgttgcattctgtcctgatgacactcactttgtttccagttcgtctgacaaaagtgtaaaagtttgggatgttggaacgaggacttgtgttcacaccttctttgatcaccaggatcaggtctggggagtaaaatacaatggaaatggttcaaaaattgtgtctgttggagatgaccaggaaattcacatctatgattgtccaatttaaacatcaaagtctccaggcttatgctgcaaagagaatgtacggattgatcatgacattccttaccttcttaggcttgtttaaaagaaatatagcatttattgtagcaaagacttaaattttgtagatacaatatgaatcttttcatgttttattggaaatgctgttcatactttaacataaagctttcttaatgcaaa

SEQ ID NO: 15111 - DNA, 782 bp, Homo Sapiens
cctacctaacagggctctgagagagccgggaggcccaaagtggctggaagaaggtaaaggaaaaatcctgtcttgggctcaaggtcacagagtggggcccagggggagttcctgctgagggcagggccttgccaggcttcagtctccagtgccaaaggaggaaatgcccaggctgtcagcatttccagatgagagcagaagggagaagcttaaacccaagtcacacatccagcaatggagtccgacagcccagcaccatctgggaactgagaagcacctctgcccggcccccacaccgtgtggaaagtgaggagcacctctgcctggccgccaccccgtctggcaagtgaggagcgcctctgcccggccgctgtgcaaccttccaagtgtgaagtgacagccttgtgtgtgatcttttctgccttccccaagtttgcactttcgacattaaagtttactttttagttaaaagttttaaaaaatatatatatataaatacactgtagataacatttgtatgccagctacacctttttctacttctgtttggctttttttccccacaccaatggtaatttatcttcacagattgttcttcatttctagaaattgttacttcatggtaattacttgagcaaaagcttgaaaatccctgacaagtacttttcatctcatagtatattagttttcactcagtcattttatgaataatatagttatccacttaaacatttcaatattttaaccatcttgaaaattaaagattaaaaatcccaaaaaaa

SEQ ID NO: 15112 - DNA, 816 bp, Homo Sapiens
gggaggaggaggaggagggactcggcgggaggatgggcttgctctcaattttgcgcaagttgaaaagtgcaccagaccaggaggtgagaatacttctcctgggcttggataatgctggcaagaccactcttctgaagcagcttgcatctgaagacatcagccacatcacacctacacagggtttcaacatcaaaagtgtacaatcacaaggttttaaactgaatgtatgggacattggtggacagaggaaaatcagaccatactggaagaattattttgaaaataccgatattcttatatatgtaatcgacagtgcagacagaaaaagatttgaagagacgggtcaggaactagcggaattactggaggaagaaaaactaagttgtgtgccagtgctcatctttgctaataagcaggatttgctcacagcagcccctgcctctgaaattgcagaaggactgaacctgcataccatccgcgaccgagtctggcagatccagtcttgctcagctctcacaggagagggcgttcaggatggcatgaactgggtctgcaaaaatgtcaatgcaaagaagaaataaaatctaaacgaatggagatgcaggagctgcgggagccgaattcggtcctgaaaaacactaatttgctgctttctgaccaaatgtttttccatctgtgtacagctccagctggtttgaagagagggaacaacacgggtttagaaagatcccccattccaccaggagatttaactggacctctgaaggtccagaatcattttttcaattaaagggaaattatattattttcctcctg

SEQ ID NO: 15113 - DNA, 884 bp, Homo Sapiens
taatccccttcgacggtgcctgaggtaagagagagggaagaatggggaggggaaggagcggcacatggggttgagcagaggagaaaatcagaaagatggcttagagaagccagcagtctgcgaggctggggaggatggagagtggtttggggtttggggtcggggtctaaggtgatcagatgcagaagcattacacggtggcctggtttctttactcagcccctggggtagatcccagccccccatgtaggtcccttggctggaaaaggaagagggagtggtcagatgaatctgaggaggagccggagaaggagctcgcccctgagcctgaggagacctgggtagtggagatgctgtgtgggctcaagatgaagctgaagcaacagcgagtgtcacccatcctccctgagcaccacaaggacttcaacagtcagcttggtaggaggataccccagagagcacctccaatcctgttctttctaaaaagaggaaacttccaataaccacacttttccaatgggaaagatacgcccccagtggctgagctctccacgcaggaggactcagaagtgatcactcatgagggacacttaggagacgatagaagactaggctagacttgataaaggttggcgcttgggatgagaaagcttggtttcgggccaggtgcattggctcatgcctgagatgctagcacgttgggaggctgaggcaagaggattgcttgcactcaggactttgagtctcgcagtgagctatgtatgctacctactgcactccagcactgggagtacagtatgcatagactctgtctcctttacatactactgtactatatactctgtagcttgcatcagctctgtcatcagccgtgttaggtacgg

SEQ ID NO: 15114 - DNA, 1411 bp, Homo Sapiens
  misc_feature (270)..(296): n is a, c, g, or t
aaaataagtgcatacaaatacagctagaagcatttctgatttgccaagtgctctaaaaaagcagcgcaagtcacagcctacatagaacggtaactgtcaccaggataataaagcacaaagatatgctaataacgttaacaaaagaaaaaaatgtcttgataagtacataccttttgtcgtcaaaagaaaatatagaaacacaatgtattcaagggagaatcggaaattatacagccatgtttatgaagtctacatttcccttgtcttggnnnnnnnnnnnnnnnnnnnnnnnnnnncaattcaagcagttttaattaagggtaatcattgggtttttctgaaaccggaaaagtcacgagtctctctcttttttcactttcacatctccagcaaggatggttgcaatttccccttgcataaaggcccaggggacattggagcccacaagagggcatttttccccactgggacaatagacctctccactagctccctgctgtttgatgctttgtctggagcaagggaagcagaacttgtgcgaagggacggacgggcactgcacaaaatgggtgtcctccagccgctcgtggcagagggtgcagcacagcggggcactggttgccagagaggagtccgggaggctggcagggtgcactggctccagtcctcctgtgttgcctgctccctggccccccacctctctggggcccagccttctttggttcatagaggacggagagggcggactgttgctattcctcctggtagtggagtgaacctggttggcatcttttgaggcatgactgccccctgcattgtctgctactaagatcagggctgccatgggggactggccattctgggccgcttcaggcggtgtggtccggttggaatgaggtgaggcagtgggtggtggcggagacacaaaagaggatgtaggagtcatggggatcttgagcccctctgtggatgtggacagccacggctgggcctctccgttgatcttagggggcccgacttcaccttctggttctggagagggcttccttttccttgctgttcttgcaactgcagtcagggccggctccttcttaaacttgctctcgaagggccccgagtggccgtgctggtgcagcgccagcagcgtgtcgcgcacggtcttgggcctgttgacccagtcctgctctccagacccgcggctcttgcccgcaccttccgcgctcagctcggcggccccggccgcggtggacaggctgtcggccgggccccggtgcgcaggcggcggcggttgtttctccttggctgccgcctcacgctgctcgtgctccacggcagcgctgctcgacacggatgccggccgcttgtgggcgcccagatcggtgggtgcgcggagcccaggctggcggccgct

SEQ ID NO: 15115 - DNA, 963 bp, Homo Sapiens
ggtacctttgccctgtgctcccaagaagatattgctgataaactaggtgtggatatctctgcaacaaaggcagtccacataagtaatcctaaaacagctgaatttcaggtggcacgcactacccttcttcctggcctccctgaagaccatagcagcaaatcgtaagatgccccttccactgaaactgtttgaaatctctgacattgtaataaaagattctaatacagacgtaggtgcaaaaaactacagacatctctgtgctgtttattacaacaagaatcctgggtttgagatcattcatgggctgctggacagaattatgcagttgctcgatgtgcctcctggtgaagacaaggggggatatgtgatcaaagcatcagaagggcctgctttcttccccgggcgatgtgcagagatctttgccaggggtcaaagcgtcgggaagcttggggtccttcatcctgacgttatcaccaaatttgagctgaccatgccctgctcctccctagaaatcaatattggaccctttttgtgaagattggtctctgtggtgtgattctcttcccaggtgtccctttctcctcccctagtgtccttaagtcctcctccacagggaacatctatttgggctttgatgtttaataaagtagaaagcactgtctggctgtgtgggtagagaccatcctttccctgcatgttaggccagcttgtgccatataccaatgtggtgtctgtgtgtgaagctgcattgttgggtaaaagccccgtggagtgctggagaaatgcactagcagagtgcaggatctgttctgaaaggcagacgtgctcctcagacattagaacatcacattggaacggattactcctgcataacaagatcccatttctttccttattgataaaacaagatagtcgatgagaattcatgttgcatgagttcgagataactgacgggttctccca

SEQ ID NO: 15116 - DNA, 798 bp, Homo Sapiens
  misc_feature (12)..(12): n is a, c, g, or t
  misc_feature (28)..(28): n is a, c, g, or t
  misc_feature (110)..(110): n is a, c, g, or t
  misc_feature (347)..(468): n is a, c, g, or t
  misc_feature (580)..(595): n is a, c, g, or t
aaatataattcngacaatagtcaatacntgtttcagtccaacattaggattctgagtcccaatcacataactgtggtgttactctgtcatttataggtgtcaaagcactngatagtaaacccagtagcatcttttgagtgtttcataatgcattttccaacttgaaaacaataattgaaaaatagccttattgtatattttatgccatgactaaaagtgccatttttactgatgctattagactgataatttcttgaagtgaaatttacctttttttctctttagtattatgtttataatgccatatttttagaaagcattccagatcaggcatggtggcttacacnnnnnnnnnnnnnnnnnnnnnnnnnnnnnnnnnnnnnnnnnnnnnnnnnnnnnnnnnnnnnnnnnnnnnnnnnnnnnnnnnnnnnnnnnnnnnnnnnnnnnnnnnnnnnnnnnnnnnnnnnnttattaggctgcagaggcaagaggatcccctgagcccagaagttcaagggtatagtgagtcgtgattgtaccactgcattcctgctgagcaacagagtgagaccccatctcnnnnnnnnnnnnnnnnggcattctagtaaatcgaatgtaatgtgaatggaatttcaaaacaggatctaagatggtatgtagtagaattcaaagtaatatcattttaaagttaaatgagtatggaaaaggtctgttctctagttttgtccagttcagtttactgaaggaatatatttaattatattcatatatttaacaaataaaaatatgttgaatttt

SEQ ID NO: 15117 - DNA, 402 bp, Homo Sapiens
ttatgaatgtaaccaccaaaagaactgaaaacaaaaataattaaaattatttttgccatcaagttcttaatttcaagaagcaggaactgcccagttcctgcttcttgaaatgcaatggagaccattgtgactgggggtgaatgcacacatttgttcttccatacagagactcattctttatatatactcaacggtaatttgaatcgttaggaatcctgagaaacactcacccctgggcacacacatgtacacagccccacggccaaccctccagaagctgggtttcccatggttcaattactagaagctcttttctcagaaggccaaacattcggaatatttagatgacactgtcccatctccccttgggaaaatcataaggtttcaagaagcaggaactgg

SEQ ID NO: 15118 - DNA, 677 bp, Homo Sapiens
gggcccttccggtcctcgaagcctcgaccgctacccgcaccctaaatcccagaggttggccccctgaggtgcctctctgctcctgtcttttgtttggatgccggcgctgctgcctgtggcctcccgccttttgttgctaccccgagtcttgctgaccatggcctctggaagccctccgacccagccctcgccggcctcggattccggctctggctacgttccgggctcggtctctgcagcctttgttacttgccccaacgagaaggtcgccaaggagatcgccagggccgtggtggagaagcgcctagcagcctgcgtcaacctcatccctcagattacatccatctatgagtggaaagggaagatcgaggaagacagtgaggtgctgatgatgattaaaacccaaagttccttggtcccagctttgacagattttgttcgttctgtgcacccttacgaagtggccgaggtaattgcattgcctgtggaacaggggaactttccgtacctgcagtgggtgcgccaggtcacagagtcagtttctgactctatcacagtcctgccatgatgagccctgttcctgctcatcatgaagatccccgcgatacttcaacgccttctgacttccaggtgatgactgggcccccaataaatcccgtctttgggtctctctgaaa

SEQ ID NO: 15119 - DNA, 638 bp, Homo Sapiens
  misc_feature (234)..(257): n is a, c, g, or t
gggagtacagggaagcagcggccgccatttcagggagcttgtcgacgctgtcgcaggggtggatcctgagctgccgaagccgccgtcctgctctcccgcgtgggcttctctaattccattgttttttttagattctctcgggcctagccgtccttggaacccgatattcgggctgggcggttccgcggcctgggcctaggggcttaacagtagcaacagaagcggcggcggcgnnnnnnnnnnnnnnnnnnnnnnnnatctcttcccgaacacgagcaccacaggcgcccgaaggccggaacaggcgtttagagaaaatggcagacgatattgatattgaagcaatgcttgaggctccttacaagaaggatgagaacaagttgagcagtgccaacggccatgaagaacgtagcaaaaagaggaaaaaaagcaagagcagaagtcgtagtcatgaacgaaagagaagcaaaagtaaggaacggaagcgaagtagagacagagaaaggaacaaagagcaaaagccgtgaaagaaagcgaagtagaagcaaagagaggcgacggagccgctcaagaagtcgagatcgaagatttagaggccgctacagaagtccttactccggaccaaaatttaacagtgc

SEQ ID NO: 15120 - DNA, 1027 bp, Homo Sapiens
  misc_feature (28)..(28): n is a, c, g, or t
taggctatgtacgaggcccgcgtgttantcggcacgaggaacgtgtccagccgctacgaggaggagatcaaggcagagcaggaggaaaggaagaagcaggcggaggagatgaagcagcggaaagcggccttcaaggagctgcagtccacctttaagtagcgggggctgcagccgacctgccctgctctggccccagtgtggtgggcgagggtggcgcatgggaggccgagcctgaatccttgcctgtgtctgacgggaccactactaaaaacctaaaaatatctgtgaatggagcaagttcaggggtcttatggaggtggcccggcccctccccgctcccttccactctgcacgaggccgccacaccggcgctggctccctgcccggcccggccctccctggcaatccctgggctctcttgcacccctaactgccccctgcctgctccggcactgccccaggcccagctcctggccctaggtccctcccagccccatgtgcctgccgcctgccctccacacatccctgtccccccaacccgggaacccctgccctcctccagcaggcgcaccgcccctggggcacctgcagcaccttcccaggctgggagacggaaagagatacgaatcagggactagcccccacagagtgggacccaaaggggctaatcggaggacacgacgggaccactccaccagagacactaaacactccatctgcgtcataaccatctactgaaatgggacggagacagcagggaagctaccgtactagcatgaaggcacccgggcaagaccacagacaccccatgccagactagagagaacccagcatcactagtgacacccaagaccgagaagcactcctggacgtccaaatatgccaaaactaacctcaacaggcccaagacccagcaggacatcccgtgaattattggtccaagaacggatctgcagcaacagcaaaaacacgaagaaataaacaccaaacaagaaaaccataagataaccaaccatgacaaaaagcg

SEQ ID NO: 15121 - DNA, 931 bp, Homo Sapiens
  misc_feature (824)..(824): n is a, c, g, or t
  misc_feature (830)..(830): n is a, c, g, or t
  misc_feature (882)..(882): n is a, c, g, or t
  misc_feature (903)..(903): n is a, c, g, or t
gcagaggaacaaaagatacccgaagacagtatctatattggaactgccagtgatgattctgatattgttacccttgagccacctaagttagaagaaattggaaatcaagaagttgtcattgttgaagaagcacagagttcagaagactttaacatgggctcttcctctagcagccagtatactttctgtcagccagaaactgtattttcatctcagcctagtgacgatgaatcaagtagtgatgaaaccagtaatcagcccagtcctgcctttggactacgccgtgctaggaagaagaccgtttctgcttcagaatctgaagaccggctagttgctgaacaagaaactgaaccttctaaggagttgagtaaacgtcagttcagtagtggtctcaataagtgtgttatacttgctttggtgattgcaatcagcatgggatttggccatttctatggcacaattcagattcagaagcgtcaacagttagtcagaaagatacatgaagatgaattgaatgatatgaaggattatctttcccagtgtcaacaggaacaagaatcttttatagattataagtcattgaaagaaaatcttgcaaggtgttggacacttactgaagcagagaagatgtcctttgaaactcagaaaacgaaccttgctacagaaaatcagtatttaagagtatccctggagaaggaagaaaaagccttatcctcattacaggaagagttaaacaaactaagagaacagattagaatattggaagataaagggacaagtactgaattagttaaagaaaatcagaaacttaagcagcatttggnagaggnaaagcagaaaaaacacagctttcttagtcaaagggagactctgttgacagangcaaagatgctaaagagaganctggagagagaacgactagtaactacgg

SEQ ID NO: 15122 - DNA, 743 bp, Homo Sapiens
ggtagccactttccttttgttgtcattcttgtgatcctgggtgggtttctgtggcactcttttagaacatgtagcatcatcttagaggtctatttttaaaaaatgtgttgaagaggaaaaaaccattctcacgatggggcttaagtcattgtccaggaataagattggcgtggtgcccatgacatcaccgtcactctgcctaaaagcactctagagctacttgttcacgtggagaggaaggatattttgcgaagcaacagccgcaggtggagagccctgttcacctgatagggtctagctgtgacagtaaatataataccgctgtttccttgggtacagatttgagtgttcatgtgatgagactgtaaacctcatttttcggttcctctgtttaaaaaaacatctgaaggatgaactaaggctgctggtgccctgagcaactgataatgcaaatgtggacaaagtgtctgttttctactccagcctgttcatatggaccaaatttcaacaaggaactcaaggaaaatttgtacctgtcgtatttatgctttcatgtaaaaaagggttggggggaggggtgtctttttgcttttggtgaactttttttcaaaatcatttttccactgtttctgtctggttttaaaacaaattacagttttgtatggattttttaaatgtacattttggaacaaatgatcaaatattttctgaaataacaataaaaggcagaaaattatcaaaaa

SEQ ID NO: 15123 - DNA, 879 bp, Homo Sapiens
gtattgcaaatccctacagttgagatattaaagagatacatttattttatagttacataaagccagaatcatcactaccctactttcgcgtattcctttgtggctctgaatgcagctttaagaaaaacataaacaaagctaagcaaagcaaaacaagaacgagctcttgtatagatgtacaatggcttagcaaatcgctttagtttggttcctatttaaagatttagcgactagactactcgtactacacaattcagctatcttacagagcaaggtcctagggaacaggataacttatttaggtttagctctcataatacaatatccataatggctttagaagaatgtaaagtaaataacattggtaaacagcgtatactgatattttctgacaaactcatttatctaacatcatgctgagcaatcaagaggattcctctatatatttataaattttaatttattctatttcctgattcacaaactcttgctccatgttaaagcagttatcaccaatagaacctatgagaaccagtgcccatggaaacctaacagcttgtttttttaatcccctattaaaactcggttgaacttgatatatgcatggttgaaatatgcgtgggtactaggcctttattcaggaatgtaaaattaatggtatctggtatcaagttgtaagaaaaactcacccagattgggacgtaactgagtgatatgtgaaagaatcttcccctgtctgaatttagaataacaccttacactggggcagaaagaaggtcgcggagaggaagtagaagttgacggcacagcacaacttcactggcttcaatcaactgaggtaacttattagagacgaacattaattattcacaaatccca

SEQ ID NO: 15124 - DNA, 1949 bp, Homo Sapiens
  misc_feature (352)..(373): n is a, c, g, or t
  misc_feature (425)..(473): n is a, c, g, or t
  misc_feature (525)..(573): n is a, c, g, or t
  misc_feature (625)..(673): n is a, c, g, or t
  misc_feature (946)..(983): n is a, c, g, or t
  misc_feature (1046)..(1083): n is a, c, g, or t
  misc_feature (1146)..(1183): n is a, c, g, or t
  misc_feature (1246)..(1283): n is a, c, g, or t
  misc_feature (1623)..(1671): n is a, c, g, or t
  misc_feature (1723)..(1771): n is a, c, g, or t
  misc_feature (1823)..(1871): n is a, c, g, or t
atacctgatcacttcttcgcactattttctcggtactatgcaatatggtccaatatcaaagggaatgatagcagttgaaggactcggggggtatctaacagcaatacctgatcactacttcgcactagtttcttcggtactatgcatattggtccaatatcaaagggaatgatagcattgaaggactcggggatatctaacagcaatacctgatcactacttcgcactagtttctcggtactatgcatatgtccaatatcaaagggaatgatagcattgaaggactcggggatatctcaacagcagtacctgatcactacttcgcactagtttctcggtactatgcatatgnnnnnnnnnnnnnnnnnnnnnnagcattgaaggactcggggatatctaacagcaatacctgatcactacttcgnnnnnnnnnnnnnnnnnnnnnnnnnnnnnnnnnnnnnnnnnnnnnnnnnagcattgaaggactcggggatatctaacagcaatacctgatcactacttcgnnnnnnnnnnnnnnnnnnnnnnnnnnnnnnnnnnnnnnnnnnnnnnnnnagcattgaaggactcggggatatctaacagcaatacctgatcactacttcgnnnnnnnnnnnnnnnnnnnnnnnnnnnnnnnnnnnnnnnnnnnnnnnnnagcattgaaggactcggggatatctaacagcaatacctgatcactacttcgcactagtttctcggtactatgcatatggtccaatatcaaagggaatgatagcattgaaggactcggggatatctaacagcaatacctgatcactacttcgcactagtttctcggtactatgcatatggtccatatcaaagggaatgatagcattgaagactcggggatatctaacagcattacctgatcactacttcgcactagtttctcggtacgatatcnnnnnnnnnnnnnnnnnnnnnnnnnnnnnnnnnnnnnnctcggggatatctaacagcaatacctgatcactacttcgcactagtttctcggtacgatatcnnnnnnnnnnnnnnnnnnnnnnnnnnnnnnnnnnnnnnctcggggatatctaacagcaatacctgatcactacttcgcactagtttctcggtacgatatcnnnnnnnnnnnnnnnnnnnnnnnnnnnnnnnnnnnnnnctcggggatatctaacagcaatacctgatcactacttcgcactagtttctcggtacgatatcnnnnnnnnnnnnnnnnnnnnnnnnnnnnnnnnnnnnnnctcggggatatctaacagcaatacctgatcactacttcgcactagtttctcggtactatgcatatggtccaatatcaaagggaatgatagcattgaaggactcggggatatctaacagcaatacctgatcactacttcgcactagtttctcggtactatgcatatggtccaatatcaaagggaatgatagcattgaaggactcggggatatctaacagcaatacctgatcactacttcgcactagtttctcggtactatgcatatggtccaatatcaaagggaatgatagcattgaaggactcggggatatctaacagcaatacctgatcactacttcgnnnnnnnnnnnnnnnnnnnnnnnnnnnnnnnnnnnnnnnnnnnnnnnnnagcattgaaggactcggggatatctaacagcaatacctgatcactacttcgnnnnnnnnnnnnnnnnnnnnnnnnnnnnnnnnnnnnnnnnnnnnnnnnnagcattgaaggactcggggatatctaacagcaatacctgatcactacttcgnnnnnnnnnnnnnnnnnnnnnnnnnnnnnnnnnnnnnnnnnnnnnnnnnagcattgaaggactcggggatatctaacagcatactgatcttcgcactagtttctcggtactatgcatatgatacaga

SEQ ID NO: 15125 - DNA, 841 bp, Homo Sapiens
  misc_feature (721)..(744): n is a, c, g, or t
gggggcacagacgagatctcgatcgaaggcgagatggcggacgtgctagatcttcacgaggctgggggcgaagatttcgccatggatgaggatggggacgagagcattcacaaactgaaagaaaaagcgaagaaacggaagggtcgcggctttggctccgaagaggggtcccgagcgcggatgcgtgaggattatgacagcgtggagcaggatggcgatgaacccggaccacaacgctctgttgaaggctggattctctttgtaactggagtccatgaggaagccaccgaagaagacatacacgacaaattcgcagaatatggggaaattaaaaacattcatctcaacctcgacaggcgaacaggatatctgaaggggtatactctagttgaatatgaaacatacaaggaagcccaggctgctatggagggactcaatggccaggatttgatgggacagcccatcagcgttgactggtgttttgttcggggtccaccaaaaggcaagaggagaggtggccgaagacgcagcagaagtccagaccggagacgtcgctgacaggtcctctgttgtccaggtgttctcttcaagattccatttgaccatgcagccttggacaaataggactggggtggaacttgctgtgtttatatttaatctcttaccgtatatgcgtagtatttgagttgcgaataaatgttccatttttgttttctacccnnnnnnnnnnnnnnnnnnnnnnnnaaaatggcgggcccgcctcggcccctcgaaaacttttctagaccctttcctttggcgccccgggggcccccgtagggaaagatggacattgggcccc

SEQ ID NO: 15126 - DNA, 774 bp, Homo Sapiens
  misc_feature (130)..(130): n is a, c, g, or t
aggtcactctaaggatcccgatcacgtgcattgtggaagtggatgagtgagaaaaagggagggtgagtgaaccagaagcatgtcttggctgtgcagagctgggtttcagtccaaggggctatcccttcanacccctcactgctgcccagaactgaccaatggagcccacagtagagtgagaagtgaaaccccatctgtatcccagagcgcagctagtttcattacagatgggagcaaacccttggatacttgatgcttaaaaatccaccataaggaaagatggaaacgtccccatgtggctcagatcacattttgtgtcattcattttaggggcctggggagaattccatggaggagcatccttgcgaagcatggtggtttctcattctcagatctcacccaggagggtagggaatgcttggttggctgtccaggtggacaatgtgaaaatagctgtgacaactttagggacagagagagtctgacaggagctgggaactgctgctccctggtactctgtccatctctttcgtgtcaggtaccaggtctctgtggaggaagcaaaggaggggcagcctttgaaaagaatccctccaaggaaatgtttccaccgacctaagaagtattaataaaagattcagtcccaaagaattttaggggtaatttaagatgtgtttgattaagattgagccctaatcaagaattaagtcagctcctgaaggacagggttaagctctcaacagtcacaatgcactgattcagatctgtagatca

SEQ ID NO: 15127 - DNA, 1366 bp, Homo Sapiens
  misc_feature (694)..(716): n is a, c, g, or t
  misc_feature (735)..(735): n is a, c, g, or t
  misc_feature (1010)..(1010): n is a, c, g, or t
  misc_feature (1095)..(1095): n is a, c, g, or t
  misc_feature (1097)..(1097): n is a, c, g, or t
  misc_feature (1312)..(1312): n is a, c, g, or t
ttttcttggttcctactcggacgacttgtggaggtttcatgacaacttcttttgtcaacttgacagatatctgtaaactattacatcgtcagcccaaacatctccttgcatttttgttggctgaattgggtacaagtggttctatagatggtaataaccaacttgtaatcaaaggaagattccaacagaaacagatagaaaatgtcttgagaagatatatcaaggaatatgtcacttgtcacacatgccgatcaccggacacaatcctgcagaaggacacacgactctatttcctacagtgcgaaacttgtcattctagatgttctgttgccagtatcaaaaccggcttccaggctgtcacgggcaagcgagcacagctccgtgccaaagctaactaatttgctaatcactgattttgcaaagcttgttgtggagatgtggctggacaggtttgccatcagagtggatataccgttgtattaaaaacaagataaaaaagctgccaagatttttggcgagtggttggtctgaagtccttgcaagacgctgatgctcaagctgttgacatactcattgcctactttaacacctgtcagagaaacgtgatatggggtaaggaggtgcttttttaaaatcgttcatagacttctgtaaaatgcaagataaattaaagttattataacagtgaacaacnnnnnnnnnnnnnnnnnnnnnnnccttgtcgggccgcctcgngccctcgaagaagcttctctaaacccattcgttttggcgccgcggggcccagttaggtaagtgaaacatgggtcatagcctgttttccctaggaagatccctggcccatgaactaagtgctttgaaattcctcacccaataaaaaaaaccgccccgggcgggccaacccggagccggttcttgaaaacaaaatcccaaagatgggaaagcttccttgagagggtccaattttaccttgggaacttcctattccaaaccaggagagagttccccanaggccggaaggcttcccgaattaatccaaatattataaccgcgcccccgcgggcgccctgtgggccaactcttacaatttcgggnangagaaaaaaccttggggtgtgggacaaaaatttctccactttgtatagagggccaaatttttctcttgggccccgcgaaacaatgtggggaaaaaaagccccacatccccacacataaaaacccggggggtaattgtggaattgtgaaaaacactcttgtggaagacttcccggccgcccgaggcgcgggggccatattccccgacgcacaaccnccttcttgtggtgcggggcccccctttggcggggagtaaaatcacaataaattt

SEQ ID NO: 15128 - DNA, 654 bp, Homo Sapiens
ctgcctggatggccagtcacactgcagacccctggcatgtccctacagacagagggagtgatgagctacgtaagccatgtgctcacctgcctgggtgggggactggctctctggcggaccgggcagtggctctgggcccagcggctggggcactgccacacatactgggcagtgagcgaggagctgctccccaacagcgggcatgggcctgatggcgaggtccccaaggacaaggaaggaggcgtgtttgacctggggcccttcattgtagatctgattaccttcacggaaggaagcggacgctcaccacgctatgccctctggttctgtgtgggggagtcatggccccaggaccagccgtggaccaagaggctcgtgatggtcaaggttgtgcccacgtgcctcagggccttggtagaaatggcccgggtagggggtgcctcctccctggagaatactgtggacctgcacatttccaacagccacccactctccctcacctccgaccagtacaaggcctacctgcaggacttggtggagggcatggatttccagggccctggggagagctgagccctcgctcctcatggtgtgcctccaacccccctgttccccaccacctcaaccaataaactggttcctgctatgatcaaa

SEQ ID NO: 15129 - DNA, 688 bp, Homo Sapiens
  misc_feature (499)..(499): n is a, c, g, or t
ggggcggcggggcctcgtccttctcttaccgccatcttggctcctgtggaggcctgctgggaacgggacttctaaaaggaactatgtctggaaggctgtggtccaaggccatttttgctggctataagcggggtctccggaaccaaagggagcacacagctcttcttaaaattgaaggtgtttacgcccgagatgaaacagaattctatttgggcaagagatgcgcttatgtatataaagcaaagaacaacacagtcactcctggcggcaaaccaaacaaaaccagagtcatctggggaaaagtaactcgggcccatggaaacagtggcatggttcgtgccaaattccgaagcaatcttcctgctaaggccattggacacagaatccgagtgatgctgtacccctcaaggatttaaactaacgaaaaatcaataaataaatgtggatttgtgctcttgtatttttaagtggattaaaaaacttactaccttaaaggganaactgccaccaaccaaaaaaattcctgtgtcggccgcccttggccccttcgagaaagctttcttaaaacctttcgtttgggccgccgcgggccccagaaaggaaaagtggaaccatggtccataagctgttttccccaaagaaaatccccgggcccttgaactaaatgccttggaatttctcccccaat

SEQ ID NO: 15130 - DNA, 963 bp, Homo Sapiens
acttagaggatccccaacgatggtcctcagctggggactcaggaggagctgataatcttgattgagggtcatggagctggagacccagacaggagctgatgttctagttagtggatcttccagctgcagactcagagaggagctgatgttctagtttgagggtcatgcagctgaagacccggggaggagctgatgttctagattgagggtcgtggagctgcagacccggagaggagctgatgttctagtttgagggtcatgcagctggagactcaggagaggagctgaggttctagtttgagggtcttgcagctgaagacctgggaggagctgagattctagtttgagggtcgtgcagcagaagactcagggaggagctgatgttctagattgagggccctacagctgcagacctgaagaggagctgatgttcgagattgagggtcgtgcagctgaatactcggagaggagctgatgttatagtttgagggccctacagctgaagacccggagagtatctgatcttcgagattgagggtcatgcagctgaagactccgggaggagctgaggtgctaatttgagggtcttgcagctgctgacttggggaggactgatgttctagtttgagggccctacagttggaaatctgtacaggagctgatgttctagtttgagggtcatgcaggtgaaaaatcggggaggagctgatattctagtttgagggccctgcagctagagatgcagacaggagctgatgttgtagtttgagggtcgtacagctgaagattcagggaggagctgctcgagtattttgagggtcatgcagctgcagaaccggagaggagctgatgttaaagattgagggtcatgcagctgaagactctgggaggagctgacgttctaatttgaggtccctacaggtggacaccccagagaggagcttatgttctagattgagggtc

SEQ ID NO: 15131 - DNA, 1368 bp, Homo Sapiens
  misc_feature (1039)..(1080): n is a, c, g, or t
ggccttcgggtccaggactacaactcccggcagggtgcgcaaaacgaccgcccaaggcaacggaggctcacgaggtacaaggaagcacaacgccccaatccgctttgttttacacagtctcactttccctgcacctttatacacttcgataaccctaaccaacaggacgctgactcggaggggagcttgaactaggggaaaggccactcaaagagcgcatgcgtacagagcaaggtttcaaggaggggaaaaagaacgggtcaaattaggcgaacaaaagatggcggaggctgtgccaggggaccccggaagcacttaccctccacttcctcctcctgtttggcttctgtctcacctagacccgtccggtcgcagactgtctcccagacgctccctgtccgaatcagcatgattcttcagaggctcttcaggctctcctctgtcattcgggcagccgtctcagtccatttgcggacgaacattggcgttacagcagcggcatttaataaggcacttgatcctatacagaaactctttgcggacaagattagagaatacaaatccaagcgacagacatctggaggacctgttgatgctagttcccagtatcaccaagagctggagagggagctttttaagctcaagcccctgtttggtaatgccgacatgaacacatttcccaccttcaaatttgcacaccccccatttgcaacccctggaaaaaccccagggcctgaagaaataaaggtaaaatttcatccgggcaatttggtcacgggattaccctgtaccaacctacatgcgaaacctcccaaaactaaacaccgatcttccccaaaatggccaaatggttctttttcacgcctgggcgccccagctcaaatttctctgggggatgccccgcaaaactgtcccccctacacccggcccgcccccgctactaatgtacccccacatgcattgcggggtgtcgccgccccccatttccagcctcttttccaaacagtttctcttcacgcgccttttcgccgttgagagnnnnnnnnnnnnnnnnnnnnnnnnnnnnnnnnnnnnnnnnnnggctatcatttaacccggtgcccccctccgagagaaattccgtttgttcccaccccacccataccggttctggtaatatctctctacgccccacgacaccaatacgcgcccccgggggcgtaacacacgagcgccgccgccaatacacagataacggacgtcggagagggcggggaccccccgtgcacgcggtatatccccaccccggcatcgtgtttaatgctacgcgggtgcgggacttccgcccggtctgcatattccctcattattgtcccccaagtatgccgg

SEQ ID NO: 15132 - DNA, 992 bp, Homo Sapiens
  misc_feature (76)..(76): n is a, c, g, or t
  misc_feature (79)..(79): n is a, c, g, or t
  misc_feature (81)..(82): n is a, c, g, or t
  misc_feature (84)..(87): n is a, c, g, or t
  misc_feature (94)..(101): n is a, c, g, or t
  misc_feature (168)..(168): n is a, c, g, or t
  misc_feature (276)..(276): n is a, c, g, or t
tttaactaatggggcccgcgggccaaacggatggttttagaaagtttttcgaagggccgaggcggcccgacaaggnttntnntnnnntgttttnnnnnnnntgcctgctaaactatattaactcatattaaaaagtacctagtcaaaatttagaacattctgatcaanaatgggtctgcacatgctttcaaaacacctgctggtcatagtcaggagggaactgctcgctgcacatcgggcacaccttccagtgactttcaacatgttcttcaaatntgctctgatcatagttaggaggaaacattaactcacagaggggacacttcttgtgaacatcaaagctggaatcaaagcaaaagcctgtcccatgcccacgtaaatgttgacttggaggatcaggagcagtaggcacattctcatcttctttgctatcctcagagtcctctaagccatcaggccgactaaagtttcgagcaggctggctgcagacaacattgtcttccagtccccaagaggggactccgacaggtggcctttgtatttcatctgggtaaaaagcaccatctgctccatcttccattttcctttctgctggattttctagactccttttaagttctttataattgtcctgtacttcagctagttcaagttttacattttcagcaattttcacttgttctttccatttcagctccatttttgcaagttcatcagcatatttattgcattttgctttctcatcctgcaagagttgtttacatttattatacttttctgttttgtcagcaatttctttggtcatttcacagacttgcccctttgttactatgtcaaaatctgcctctgctgcagaaggtgatggctttacatctacagtagaggcagaagtggctgggtctgtgtttactgaagcatcattcactttctgctgattccccgttttctttgtgaagacattattattattagctgattgatctgaaagtttg

SEQ ID NO: 15133 - DNA, 1197 bp, Homo Sapiens
  misc_feature (1030)..(1125): n is a, c, g, or t
  misc_feature (1131)..(1142): n is a, c, g, or t
gggagtcgcaggtgtgctgctgaggcgtgagaatggcgtcccgcggccggcgtccggagcatggcggacccccagagctgttttatgacgagacagaagcccggaaatacgttcgcaactcacggatgattgatatccagaccaggatggctgggcgagcattggagcttctttatctgccagagaataagccctgttacctgctggatattggctgtggcactgggctgagtggaagttatctgtcagatgaagggcactattgggtgggcctggatatcagccctgccatgctggatgaggctgtggaccgagagatagagggagacctgctgctgggggatatgggccagggcatcccattcaagccaggcacatttgatggttgcatcagcatttctgctgtgcagtggctctgtaatgctaacaagaagtctgaaaacccctgccaagcgcctgtactgcttttttgcttctcttttttctgttctcgtccggggatcccgagctgtcctgcagctgtaccctgagaactcagagcagttggaactgatcacaacccaggccacaaaggcaggcttcccccggtggcatggtggtagactacccctaacagtgccaaagcaaagaaattctacctctgcttgttttctgggccttcgacctttataccagaggggctgagtgaaaatcaggatgaagttgaacccagggagtctgtgttcaccaatgagaggttcccattaaggatgtcgaggcggggaatggtgaggaagagtcgggcatgggtgctggagaagaaggagcggcacaggcgccagggcagggaagtcagacctgacacccagtacaccggccgcaagcgcaagccccgcttctaagtcaccacgcggttctggaaaggcacttgcctctgcacttttctatattgttcagctgacaaagtagtattttagaaaagttctaaagttataaaaatgttttctgcagtaaaaaaaagttctctgggccgggcgtggtggctcacacnnnnnnnnnnnnnnnnnnnnnnnnnnnnnnnnnnnnnnnnnnnnnnnnnnnnnnnnnnnnnnnnnnnnnnnnnnnnnnnnnnnnnnnnnnnnnnnngggagnnnnnnnnnnnngctctgagagcatcttattttgtttaaaggcaagaaataaaatttccttttgtgg

SEQ ID NO: 15134 - DNA, 935 bp, Homo Sapiens
ctccgggccgacatgagtggggaccacctccacaacgattcccagatcgaagcggatttccgattgaatgattctcataaacacaaagataaacacaaagatcgagaacaccggcacaaagaacacaagaaggagaaggaccgggaaaagtccaagcatagcaacagtgaacataaagattctgaaaagaaacacaaagagaaggagaagaccaaacacaaagatggaagctcagaaaagcataaagacaaacataaagacagagacaaggaaaaacgaaaagaggaaaaggttcgagcctctggggatgcaaaaataaagaaggagaaggaaaatggcttctctagtccaccacaaattaaagatgaacctgaagatgatggctattttgttcctcctaaagaggatataaagccattaaagagacctcgagatgaggatgatgctgattataaacctaagaaaattaaaacagaagataccaagaaggagaagaaaaagaaaactagcaagcaagaagcggatggtcaacatttgacaaaaacccaagaatcaagcattaagataaaaaagttcctgagccagataacaagaaaaagaagccgaagaaagaagaggaacagaagtggaaatggtgggaagaagagcgctatcctgaaggcatcaagtggaaattcctagaacataaaggtccagtatttgccccaccatatgagcctcttccagagaatgtcaagttttattatgatggtaaagtcatgaagctgagccccaaagcagaggaagtagctacgttctttgcaaaaatgctcgaccatgaatatactaccaaggaaatatttaggaaaaatttctttacaagactggagaaaggaaatgactaatgaagagaagaatattatcaccacctaagcaatgtgatttaaccagagtgt

SEQ ID NO: 15135 - DNA, 520 bp, Homo Sapiens
aggaccagtcttaaatgtcaaagcaataacatattcagcaatgcaggtctataatgaagagaacccggaagcttttgtgatcattgacatttaagacaccaaaaaataaaagactcctacgaagaactgtttttgttttcctcttccttttgagaagacactatgaattaaattctacagctttcttttgatatatggaaatttgtagaacagaaatattttagttaaagtgtgactttcagaaagggaaaatcagggcacagccttggtctgtgttccccaaatattcacactttaaagaattcttcaaccccccaagggacagttatggtcctttgattctctgctgtggcagtaggtgtgcctcatgcccttccagtgcaatgcaagccctccagcctcaccccagagaggatcactgatgtcagcagcagcctgaggctgaatccaggttgaaagaagaataacttgaaaaaatatatttccacacacagaattttgttttcttccaagttggtta

SEQ ID NO: 15136 - DNA, 306 bp, Homo Sapiens
ctcacagctgcatcttaaccttacctttgcctctgcctctcaagctggtacctcctaatttacatcctaagagtggaaccatgtgacaaggactggagtgccattggctgtggactgttcaggcagggaagtacaagaccactcttgtattcaggggcaaccaaaggagagaattacgtacttgttgagtacaaactgcaccaagccctggagacccattaccaccgttaaccctcaatacagctctgctcagtaagggattcgtctccccaaatgaaaaaaaagtaatctcagaatgttggccga

SEQ ID NO: 15137 - DNA, 837 bp, Homo Sapiens
  misc_feature (684)..(711): n is a, c, g, or t
ataatgtacaaactggaagataatgacatgaaaataattgtgaaatatggaattattgggggacacatgaagcccactaaactatgctttcttataatgcatatttcttctcagtttaaatgtatgtaaatatcgaagctatatggtatgatttataaagataaatgggccaaagtgtacattgagactggcagccatctatggtaccactgaaaccctgacccagaaaagtggcttgcttggacacccagctgcctttgtttctgcattaaaccaatattgatcacacatatgacacaggctagtcctataaaagtaatgacttcatagaaatggcattataatttttaagttgatactctacaggtagctattgatataattagttttaataaaacatgctgcaaccatggtatacaacaaaaatacatttctttggtgattgaaattaaggccgtatttacaatgacttaatataagactgacttttatcctgcttcataacttgtatggagaactcaccaagaaagaattcaatactgtgaaatatgcagcaagaagattggtctttacctaggctgtgtttcctaagctctgagttttaagcaccagtagatttgtattaaaagaaaaacaaaatggggccttagcttctggcttttaattttgccagctaaggacatnnnnnnnnnnnnnnnnnnnnnnnnnnnntagccatctgctatcagcatcattatgtaaaagaaaatatattttagcccctaaaattaggaagaatgtaatctcagaataaaggttgtcatttaagttgaataaatatatagctttatgaaaaac

SEQ ID NO: 15138 - DNA, 2259 bp, Homo Sapiens
  misc_feature (377)..(472): n is a, c, g, or t
gggcttgaaaaaagaagggaaacttttaactaaatcccagagagaagccagagccagagccgaagctactcttaaactgctacaagctcagggtgttgaagtgccatcaaaagactctttgccgaagaagaggccaatttatgaagataaaaagaggaaaaaaataccacagcagctagaaagtaaagaagtgtctgaatcaatggaattatgtgctgctgtagaagttatgggacaaggagtaccagaaaaggaagagacaccacctcctgttgaaccagaagaagaagaagatactgaggatgctggattggatgattgggaagctatggccagtgatgaggagacagaaaaagtagaaggaaacacagttcatnnnnnnnnnnnnnnnnnnnnnnnnnnnnnnnnnnnnnnnnnnnnnnnnnnnnnnnnnnnnnnnnnnnnnnnnnnnnnnnnnnnnnnnnnnnnnnnnagtgaaggcagtgaaggtgatgaggaagatgaaaaggtgtcagatgagaaggattcagggaagacattagataaaaagccaagtaaagaaatgagctcagattctgaatatgactctgatgatgatcggactaaagaagaaagggcttatgacaaagcaaaacggaggattgagaaacggcgacttgaacatagtaaaaatgtaaacaccgaaaagctaagagcccctattatctgcgtacttgggcatgtggacacagggaagacaaaaattctagataagctccgtcacacacatgtacaagacggtgaagcaggtggtatcacacaacaaattggggccaccaatgttcctcttgaagctattaatgaacagactaagatgattaaaaattttgatagagagaatgtacggattccaggaatgctaattattgatactcctgggcatgaatctttcagtaatctgagaaatagaggaagctctctttgtgacactgccattttagttgttgatattatgcatggtttggagccccagacaattgagtctatcaaccttctcaaatctaaaaaatgtcccttcattgttgcactcaataagattgataggttatatgattggaaaaagagtcctgactctgatgtggctgctactttaaagaagcagaaaaagaatacaaaagatgaatttgaggagcgagcaaaggctattattgtagaatttgcacagcagggtttgaatgctgctttgttctatgagaataaagatccccgcacttttgtgtctttggtacctacctctgcacatactggtgatggcatgggaagtctgatctaccttcttgtagagttaactcagaccatgttgaagcaagagacttgcacactgtgaagagctgagacgcacaggtgatggaggttaaagctctcccggggatgggcaccactatagatgtcatcttgatcaatgggcgtttgaaggaaggggatacaatcattgttcctggagtagaagggcccattgtaactcagattcgaggcctcctgttacctcctcctatgaaggaattacgagtgaagaaccagtatgaaaagcataaagaagtagaagcagctcagggggtaaagattcttggaaaagacctgggagaaaacatgggctggtttacccccccttgtggcttataaagaagatgaaatccctgttcttaaagatgaattgatccatgagttaaagcagacactaattgctatcaaattagaagaaaaagaagtctatgtccaggcatctacactgggttctttggaagctctactggaatttctgaaaacatcagaagtgccctatgcaggaattaacattggcccagtgcataaaaaagatgttatgaaggcttcagtgatgttggaacatgaccctcagtatgcagtaattttggccttcgatgtgagaattgaacgagatgcacaagaaatggctgatagtttaggagttagaatttttagtgcagaaattatttatcatttatttgatgcctttacaaaatatagacaagactacaagaaacagaaacaagaagaatttaagcacatagcagtatttccctgcaagataaaaatcctccctcagtacatttttaattctcgagatccgatagtgatgggggtgacggtggaagcaggtcaggtgaaacaggggacacccatgtgtgtcccaagcaaaaattttgttgacatcggaatagtaacaagtattgaaataaaccataaacaagtgaaagaagc

SEQ ID NO: 15139 - DNA, 1000 bp, Homo Sapiens
  misc_feature (705)..(822): n is a, c, g, or t
  misc_feature (843)..(869): n is a, c, g, or t
ggcaactttcctttttataaaacaacaaatggttcaactctgtctgcaaattaacagctgaacacctgcaactgcaaatgttttttgatccgacgtactgaaataggaagtcatgctcttcccaccctccacccaccagagtggaacccgctgcaaaatccccagccttaattcttgcttcaggacccagaccggtgtcttgctctagggcaacccagggcagaggggccaggtctgcccagcgtttaccactgctgtcaagccaacagcccttggccaccatacgggccatcctcagtgaggcagccccccataggcttccgccaagctctggtcccgaagaggctgtgcgagcccttccccgccctccccaaggccccccgccccctcctctgcctgctgcgtggaggcagccatgggaaggagcccaggggagctggcctgggggagcgaagcccatgttcgcttcctgacttagagctggggggagtgggttatggggcttgttcccctgcagtatctgttctgtgaagtttgttaaatgtaaggaaagcttaaattcttgtatctttaaaagagaaaatcttatttaacccttttgtgttctagatttacttacacacatagcctagagctcagttttagttttaacattgtgaaaatattaaaagaatcttgtaactttattcttttttctcctgctgnnnnnnnnnnnnnnnnnnnnnnnnnnnnnnnnnnnnnnnnnnnnnnnnnnnnnnnnnnnnnnnnnnnnnnnnnnnnnnnnnnnnnnnnnnnnnnnnnnnnnnnnnnnnnnnnnnnnnntcctaagttcagaatgttttnnnnnnnnnnnnnnnnnnnnnnnnnnngttttttggggcccgccccccccacaaaaaaattttttacaactttttgttggggccggggccccccaagagaaaagaaaaaacgagcccatcctttttcccccaaaaaaccccgtggcctacataaaagg

SEQ ID NO: 15140 - DNA, 751 bp, Homo Sapiens
  misc_feature (48)..(66): n is a, c, g, or t
ctagtggatccccgctccacccgacggggtggggtgggcgctaagccnnnnnnnnnnnnnnnnnnngtacccctcactaaaggcaccgaaggcttaaagtaggacaaccatggagccttcctgtggcaggagagacaacaaagcgctattatcctaaggtcaagagaagtgtcagcctcacctgatttttattagtaatgaggacttgcctcaactccctctttctggagtgaagcatccgaaggaatgcttgaagtacccctgggcttctcttaacatttaagcaagctgtttttatagcagctcttaataataaagcccaaatctcaagcggtgcttgaaggggagggaaagggggaaagcgggcaaccacttttccctagcttttccagaagcctgttaaaagcaaggtctccccacaagcaacttctctgccacatcgccaccccgtgccttttgatctagcacagacccttcacccctcacctcgatgcagccagtagcttggatccttgtgggcatgatccataatcggtttcaaggtaacgatggtgtcgaggtctttggtgggttgaactatgttagaaaaggccattaatttgcctgcaaattgttaacagaagggtattaaaaccacagctaagtagctctattataatacttatccagtgactaaaacccacttaaccagtaagtggaaaataactgtcaagactgtatggtggtggaactgacttgtgctggaaaatgg

SEQ ID NO: 15141 - DNA, 784 bp, Homo Sapiens
ccagtccacgtggacaactgcatcctgaatgccgagaccctcgtgtgtgtcaaagagcccccagcctacaccttccgcgactacagcgccatcctttacctaaatggggacttcgatggcggaaacttttatttcactgaactggatgccaagaccgtgacggcagaggtgcagcctcagtgtggaagagccgtgggattctcttcaggcactgaaaacccacatggagtgaaggctgtcaccagggggcagcgctgtgccatcgccctgtggttcaccctggaccctcgacacagcgagcgggacagggtgcaggcagatgacctggtgaagatgctcttcagcccagaagagatggacctctcccaggagcagcccctggatgcccagcagggcccccccgaacctgcacaagagtctctctcaggcagtgaatcgaagcccaaggatgagctatgacagcgtccaggtcagacggatgggtgactagacccatggagaggaactcttctgcactctgagctggccagaccctcggggctgcagagcagtgagcctacatctgccactcagccgaggggaccctgctcacagccttctacatggtgctactgctcttggagtggacatgaccagacaccgcaccccctggatctggctgagggctcaggacacaggcccagccaccgcccacggggcctccacatggccgctgcataacagcgatacagtacttaagtgtctgtgtagacaaccaaagaataaatgattcatggtttttttt

SEQ ID NO: 15142 - DNA, 1063 bp, Homo Sapiens
  misc_feature (55)..(73): n is a, c, g, or t
  misc_feature (107)..(117): n is a, c, g, or t
  misc_feature (345)..(355): n is a, c, g, or t
  misc_feature (422)..(439): n is a, c, g, or t
  misc_feature (447)..(447): n is a, c, g, or t
  misc_feature (491)..(503): n is a, c, g, or t
  misc_feature (524)..(532): n is a, c, g, or t
  misc_feature (561)..(573): n is a, c, g, or t
  misc_feature (609)..(623): n is a, c, g, or t
  misc_feature (690)..(701): n is a, c, g, or t
gaaattaaaggaggggggggttctaaagaagctggtgtcctctccctctcgcgtnnnnnnnnnnnnnnnnnnnagtgcgcacacagagcggggggagaaaacatatnnnnnnnnnnnaacaaaaattctctccaacaacaaaacccgctcgggaaaaaataatattttctcaccaaaaaaaatatttttttatattcacacaccagagcaaccctctttttataaatatttgtcctcccaaaaaggtttttgggggttcccacacacacaaaatcaaaaaaatgggtcttttacacccattatatttttgggtttcggggcaacaccattggcggggcccttcgnnnnnnnnnnnccatatctgcccggtggtttttcaggcctttaccatataaaaacgggggaagggcccgcccctcccnnnnnnnnnnnnnnnnnnggggttanttggcttccccccccaaaattcaaaaaattctcctttggggggnnnnnnnnnnnnnttgggggaccctctctttccnnnnnnnnncaccaaacattcttttggacaaaagggtnnnnnnnnnnnnnttttttaaggaccccccaacaccaaaaaataaaggnnnnnnnnnnnnnnncaggagatcaagaatccctaaaaccttttcgggttttctcccccggaaagaacatgaaaggggggcnnnnnnnnnnnnctttcttaaaccaaggataatgtttttccccttttgggagtagagtcatcatttcaatcacaggaaaaaaactagcttctccctgtgtccgtctggtccggagagcttgcgttttagaaacgtggtaaagtagaatagcagaaaggagccaacggcttgatgggatagtctgtgccgaaactcccgatcccaacatgctgcgtacagacacacgagcgaaaacggttcgccctcccctgggtatccaaggatgaggacgtgagtatgaaagtggtccccgggcccagtatccattccgtcgtgtgacagacaggctaactgaccatcccttctccaataccaaaacattcttttttgttgcc

SEQ ID NO: 15143 - DNA, 833 bp, Homo Sapiens
  misc_feature (785)..(785): n is a, c, g, or t
gggacgtgtggtgaggcctacagaagcggccttcagctggaccttggtctccccgccggacttcgagggtgtcatcgccgcccctgttgggggtgagcgccgcgcggctgcagcatgcctcacaggaagaaaaagccctttatagagaagaagaaagctgtgtcttttcacttggtccaccggagccaacgagatcctttagcagcagatgagagtgcaccccagagggttctattgcccacacaaaaaatagacaatgaagaaaggcgagcagaacagaggaagtatggagtgttctttgatgacgactatgactacctgcagcacctgaaggaaccatctgggccttcagagcttattccctcaagtaccttcagtgcacacaacaggagagaggagaaagaagaaacgctagtaattccaagcactggaattaagttgccttcatcagtgtttgcttcagagtttgaggaagatgttggattgttaaataaagcagctccagtttcaggaactcgactggatttttgatcctgacattgttgcagctcttgatgatgattttgactttgatgatccagataatctgcttgaggatgactttattcttcaggccaataaggcaacaaggagaaggaagagggaaatggatatacagaaatctgagaatgaagatgaccgcgagtgggaaagatgtggatgatgaaaaagggagatagccatgatgactatgactctggcaggcctattgtcaaatgaagactgtatggtttgggcccgggaanaatcccgaagctatagcagatccctgggtcctggaggggaggaaccac

SEQ ID NO: 15144 - DNA, 345 bp, Homo Sapiens
tgactcagggcgagctgcagctcgcctctgacgttatctcacgggagcgagctgcatctgtgggaacagctcttcccacgagcagctgctcctacggtgggctgtcgtcctccagcagcctcacccagagcagctgtgtggtcactcagcagatggccagcatgggcagcagctgcagcatgatgcagcagagcagcgtccagcctgcgtgccaactgcagcatcaagtcacctaagagctgcgtgggtggagaggcctcccagtaaccagcagcagcagccgccaccaccgcctccacagcagccacagccgcagccgccacaaccacaacgaaagcaccacag

SEQ ID NO: 15145 - DNA, 1048 bp, Homo Sapiens
ggggcaggcgaggcggtcgcttcgagcgcgctagtcagctccctgaagggagtgacggcggttgggtgcccgcggccacttttgccttcccggggagatgtcctttgcttctcagatgtaaatgcactttaagtttgttattcaacagtgaaaatgagtcatacagaggttaaattaaaaataccttttggaaataaattactagatgctgtttgtttggtacctaacaagagcttaacatatggaataattcttacacatggagcatcaggagatatgaatcttcctcatttgatgtcactggcatcccatcttgcatctcatgggtttttctgcctgagatttacctgtaaaggccttaatattgtacatagaattaaggcgtataaatcagttttgaattacctgaagacatcaggagaatacaaacttgcaggtgttttttcttggaggtcgttcaatgggctcaagagcagctgcttctgtaatgtgtcacattgagccagatgatggtgatgattttgttcggggtctcatttgtatttcttacccactgcaccatccaaagcagcagcataaactcagagatgaagacctctttcgtttaaaagaacctgtactgtttgtgtcaggctcagcagatgaaatgtggtaaaaagaacttgtttgaaaaaagtggcacaagaaaatgcaagctccccataaaatccactggatttgaaaaggcaaatcattccatggcagtgaaaggacggtcgacaaatgatgttttcaaagaaataaatacacagattttgttttggatccaagaaattactgaaatggacaagaaatgtcattagttaaaagccatgttatcttgagtacacatacagttaatttgataaagaagagtatgcctctcagcattgtgagatatatttcagactaatttgatgttctttaatgttcccttatttttgaaacacgttttaaatgtgaaattaatgtccttcacaaaatgtcttttgaaagcactgttacagtcgtataaagatgatgtaaaaat

SEQ ID NO: 15146 - DNA, 586 bp, Homo Sapiens
aaacaggtgccctcatcgtggtctgtgccatgtcccgtctctatggtggttgaggagaaaggcggggaagcttcctcagccttgcagatatgtgtggcatttactagccagagctctgaaaggcagtgctgtctgtttcttgtactgggaccaaagtaaaaatccaagcacattccccttgcagttaggggaggccctactgccttctcaaagcagagaggcagcttatcaaactcagcccaaaactctgtttacatgggtggggagatggagcagggaagtacagagtgggatggtcaggacctgggccattgcaaccaaaatggggacttcctgggtagggaggtcactccctctactcactgagctaggattagggagggttattgccccaaccattgcaatgggaggtggagggacaggctcagcctcctcattgtctaaatgaggcctaaatgtgtgaagtgcgatttctgcttttgtgtaccccaccaccccattaccacagctgcctttgtgtgtttgtgtcaataaaaagccaaaccctgaagaacccccaacccagaacaaaagaaccccacatgtc

SEQ ID NO: 15147 - DNA, 1056 bp, Homo Sapiens
ctggaccggtccggaattcccgggatctgagcgccgctccctctcaggatgaaggtgacggtgggcccagacccttccctggtctaccgacctgatgtggacccagaggtggccaaagacaaggccagcttccggaactacacgtcaggtcccctcctggaccgtgtcttcaccacctacaagctcatgcacacgcaccagacagtggacttcgtcaggagcaagcatgcccagtttgggggcttctcctacaagaaaatgacagtcatggaggccgtggacctgctggatgggctggtggatgagtcggacccggacgtagatttccccaactccttccatgccttccagacagcggagggcatccggaaggcccacccagacaaggactggttccacctcgtcgggctcctgcacgacctggggaaggtcctggccctgttcggggagccccagtgggctgtcgtcggcgacaccttccccgtcggatgccgtccgcaggcctccgtggttttctgcgactccaccttccaggacaaccctgacctccaggatcctcgatacagcacagagctcgggatgtatcagccccactgtgggctcgacagggtcctcatgtcctggggccatgatgagtacatgtaccaggtgatgaagtttaacaagttctcactgccccctgaggctttctacatgatccggttccactccttctacccctggcacacgggccgcgactaccagcagctgtgcagccagcaggacctggccatgctgccctgggtgcgggagttcaacaagttcgacctctacaccaagtgcccggacctgccggacgtggacaagctgcggccctactaccaggggctcattgacaagtactgccctggcatcctgagctggtgaccctcctgccacccaagctgctgctggacctaggcctggccctccacctgcctggagaggcctggccctgggcaaacagccgccatcagggttcacctcggtgggggaccccactcacccccttagggtcgccacccctcacggcaactt

SEQ ID NO: 15148 - DNA, 426 bp, Homo Sapiens
caggcactggggggctgaggtcctctgagaagggacacagggcctggggggctctctcagcccatcagcaggagaggactgactccagaaaaatcagcgtttgtacccactcaggctgccaagacctgtgtccgtccttccaagctcaaccttcagagttcatgaggccccttgcccagaatgtccacagagttcatgaggccccttgcccggaatgtccacatttgaaacctcccaacaccgagccccatttcaagtataaccaggagggaaaatggtgcttgaaataagcatgccacaaaggaaaacctgctttctcgaaatgggccctggccgcccaggccctgacctccccggccaggatggaacgttccagagacccattagtgccaaaggcaaatgaaaacacaccctgtgaaaatgtca

SEQ ID NO: 15149 - DNA, 669 bp, Homo Sapiens
  misc_feature (277)..(309): n is a, c, g, or t
cgaggtctaacctccagacggccttcagactccttgcttgtcctccttcaccgtctccaagatgagcttggcacagagtcgctcttcatgtcccagtagtctgtcactggcgagtcccagcgtgtgctccgcctttgaaatcaaagggtgaatcggacaatgtcagaaaaccaccgatctcgctgatcgtcagaaaggctaaagtttggtgtcttcattctccagaaacggatttgtgttacaatattcgtcaaaagcagaatcttccctataaacnnnnnnnnnnnnnnnnnnnnnnnnnnnnnnnnnaaaaatcttctccttctcttgtgaaattgtgtcctcttttaaatcattcttcttctctaattttgagggccggtcttttgatttcttctttctctcctctttgtacagtctcagtttttcttctttcggagacttttccttcagcgatctctccttttctgctttattcgaacggtctttctggttttgtcttctccttcctttccttatcggggccatccttcttctccttctctcgtgctgagtggtgccgttcccacggctccaggcccttcccaaagtcgccgtcggacttgtcctttgaagccactctcgcagccacactccttcagctcctcccggtggactcctctggctagc

SEQ ID NO: 15150 - DNA, 843 bp, Homo Sapiens
gggctattaagctggtgaaaacagagctacaaagcccagaacacccattggaccaacactatagaaacctacattgtgccttgcgcccccttgaccatgaaagttacgagttcaaagtgatttcccagtacctacaatctacccatgctcccacacacagcgactataccatgaccttgctggatttgtttgaagtggagaaggatggtgagaaagaagccttcagagaggacctgcataacaggatgcttctatggcatggttccaggatgagtaactgggtgggaatcttgagccatggacttcgaattgccccacctgaagctcccatcacaggtgacatgttggggaaaggaatctacgtttgctgacatgtcttcccacgagtgccaagtaactgcttggcctctcgcctaaagaatacagggactgctgctcttatcagaggtagctctaggtcagtgtaatgaactactagaggccaatcctaaggccgaaggattgcttcaaggtaaacatagcaccaaggggctgggcaagatggctcccagttctgcccacttcgtcaccctgaatgggagtacagtgccattaggaccagcaagtgacacaggaattctgaatccagatggttataccctcaactacaatgaatatattgtatataaccccaaccaggtccgtatgcggtaccttttaaaggttcagtttaatttccttcagctgtggtgaatgttgatcttaaataaaccagagatctgatcttcaagcaagaaaataagcagtgttgtacttgtgaattttgtgatattttatgtaataaaaactgtacaggtctaaaga

SEQ ID NO: 15151 - DNA, 1361 bp, Homo Sapiens
  misc_feature (583)..(626): n is a, c, g, or t
catcctagttgggaaggctttgaccatgtcatctgagcgtctcctccagtagctctgaaagctgtggacaccaatggccaggattccttctcccctggtttttgaggatccctgggtcttctgagactggccaggagagggatggtggggccagtggttgtgtgaaagcaggaggggcagccctcctggacaagtgtgatccccctataaacggctctcaggaggttagtgagtaggagattctgccttgtcctgatgagcctgtgcaggggctccaggggagcatgctgtccagggggcacagaagggtggtgagtgtgatcaaatctagtctcactcccactttttagtctcactcctacttttgtccaccagccctgcctcctggatcttctcccacttttattttccagctttaggacctggggagatcctgtgagtcaaggcagacacccaatcctgcccccacactcggggtcctccaagaggttggggggcagagtcccagagcagccctttaccccaggtccaggccctggaatcctgagactcgcgtttccttggccagtggtaacacaggacnnnnnnnnnnnnnnnnnnnnnnnnnnnnnnnnnnnnnnnnnnnntttgctcatttctttagggaacttgggagtcggggttggaggtgctgggcaatggaacttcaaattcaatgtcgcccagcagtgaggggagtcgggaggtgaggcctgtaggccaaccaattggtggagtctcagcgatagcccaggtgagaagtggttcacccagaggggcagggtgggggcctcgggcagatctgtccctcttggcacctctgtcctcaaatgtccaaaatgttggaggacctctgttcatatcccacgcctgggctgcttgccagcagtggagttactgtagagggatgtcccaagcttgttttccaatcagtgttaagctgtttgaaactctcctgtgtctgtgtttgtttgtgcgtgtgtgtgagagcacatcagtgtgtgcaggctgtgtttccccatttctctcctcccttcagacccatcattgagaacaaatgtaagaaatcccttcccaccaccctccctgcctcccaggccctctgcgggggaaacaagatcacccagcatccttccccaccccagctgtgtatttatatagatggaaatatactttatattttgtatcatcgtgcctatagccgctgccaccgtgtataaatcctggtgtatgctccttatcctggacatgaatgtattgtacactgacgcgtccccactcctgtacagctgctttgtttctttgcaatgcattgtatggctttataaatgataaagttaaag

SEQ ID NO: 15152 - DNA, 603 bp, Homo Sapiens
  misc_feature (418)..(436): n is a, c, g, or t
ggactcgtgcgcctaccagacagtggcggaggacggcgctcgctagtctcccaggtcgcggtacacggcgagaacgggcggggcggtctcggctgcgtccgggcgatccagtgcttagttccgtcatatccctctccacgacctcggtcgagcatgttcaccagggcccaggtgagacggattctgcagcgggtgcccgggaagcagcgatttggcatctaccggttcctgcccttcttttttgtcctgggaggaacgatggagtggatcatgattaaagtgcgcgtgggccaggagaccttctatgatgtctaccgtagaaaagcctcagaaagacagtatcagagaaggctggaagatgaatgagactgaacttcagcagtcaataaagtcaatatgaattttcaaaaagaacggnnnnnnnnnnnnnnnnnnncatgtccggcccgccttcggcccttcgaaaaggctttctaaaccatttcgttttggcggcgcgggcccccataaggtaaagggaaacatggcccaataacctggtttcccaagggagatccctgggtccattgacataggggccttgggaattcctcccccacaagt

SEQ ID NO: 15153 - DNA, 1482 bp, Homo Sapiens
  misc_feature (460)..(479): n is a, c, g, or t
  misc_feature (1006)..(1016): n is a, c, g, or t
gcgaggttggagtaatgtccgtgtagaaaaaggaacatgttcttatccagccaatactgggagtgctgtctccacaatttcagggcatctgaactgtttgatgtggtttggtgtgtgtgtatgtatgtgtttaatattgaagtggatcatgagatgtaaagaaaacaataatggcaatgacttatattcaaatctgtatttgtttctttatcaatgtaatctgctgaggaccttttgtctaagattcagtagtgttttaaggttctgatatcgaattaatgaagtaaagttgttgatggtggtgaaacaccgtagggcatgtggttcaaagagaagcaggagggcaagggaaagttaccctgatcttagtttgtagcttatgacttatttaatgaatggatgcccagccaagctcagagtaggcgcccaaagcattgtggattattttcctgttttgtcnnnnnnnnnnnnnnnnnnnnaagccatgacatcccagaagaggacagtgaattactcctaggtcggctcttatagagtggccatagtgttctgtcaaaacacttgcttccattttcagagataaaaatcattgattacaaaaaaacaaacaccaagacaacaaagcagacccgtcatcactcggcggacgcctccgaatcacaccgcgacccacccgaacaaccacgtagcgcgatcctcaaaataagaattcttttgtggcgccccctcccccctcaaaaaaattttcttaaaacaattttttttggcgcccgcggcccccaaaagggaagcggaaactgggcccaaaactgttctccaaagaagaacctgggccaagacacaaggacgttggtattccccaccaaataaaaaaaccccccccggggggcaaacacgaggttttcttaaaaaaaatccccagagggggttctggtggggccctttccgggggattcttcccacggggggcccccaggcgaagccctttaatactaaatttaagcgnnnnnnnnnnngtgggccccttattgggaggaaaggggtggaaaaatttcctttaaaacatttttcggccgcaaagtggggaaacccctctcacacaatggctgcgtggtgagacccctcgaaatccccgccggtgcggtttctccaacccccctttggcgcgccttgtgtggaatataaaatatattcgcccccggggggaacaaaacgcggggggaaaaaacaaaattttctcccctttttgcgccgcgccgctttcaaaaccaaccatcgggtggggaactaccccaccccattgatatctgttttctcacatacaaaacaccacttttctcttctcactaacacccctttttggggggaaatattgggggcctggtgtatttcgtcatcgcacaaacccacaaccctattgtgtgtggcatatcattttgtgcgggagaataatgcgctgagcgagaagacatcctccacggg

SEQ ID NO: 15154 - DNA, 731 bp, Homo Sapiens
ctctggccctcaagacttcagaaaaatgcacggaagaggaggaggaaagttggagcaccagcagtgaccttaccatttcaataagtgaagatgatctgattctagagagcccagagccacagccaaatccaggtggcaagatggagggagaagatggaatagaggccttaaaattaatccatgctgagcaagaaagagttgccctatccactgaaaaaaattgtattttgcaaaccctaagctctcctgattcagaaaaggaatcctccactaacgcaccaacaagagaacctggacaaacaccagactcagacgtaccgagggcacaggtgggtcagcatgttgccaccttgaaagaacatgataattctgtcaaagaagagaaacagaagcctatcagttgctgaagaaggccacccttcaggataatacaaatcaaactgaagacaggtttcaaaagacagatgcttctgtgtcacacttgtcaggtttgaatattggcagcggtgcattcgagacaaagacagctaacaaaattgcttcggaagctagtttttcatctagtgaaggaagtcctttgtcaagccctctgggatgagtctgatgacagtaactcagaaattgaggctgctttacgccccagaaaccataacaccgatgattctgatgatttttatgactaacgtgctgtgacatttggtttcaataaagtcttttaaacaaacccaaaa

SEQ ID NO: 15155 - DNA, 1240 bp, Homo Sapiens
  misc_feature (596)..(596): n is a, c, g, or t
ggagacgttcgcacacctgggtgccagcgccccagaggtcccgggacagcccgaggcgccgcgcccgccgccccgagctccccaagccttcgagagcggcgcacactcccggtctccactcgctcttccaacacccgctcgttttggcggcagctcgtgtcccagagaccgagttgccccagagaccgagacgccgccgctgcgaaggaccaatgagagccccgctgctaccgccggcgccggtggctgctgtcgctcttgatactcggctcaggccattatgctgctggattggacctcaatgacacctactctgggaagcgtgaaccattttctggggaccacagtgctgatggatttgaggttacctcaagaagtgagatgtcttcagggagtgagatttcccctgtgagtgaaatgccttctagtagtgaaccgtcctcgggagccgactatgactactcagaagagtatgataacgaaccacaaatacctggctatattgtcgatgattcagtcagagttgaacaggtagttaagcccccccaaaacaagacggaaagtgaaaatacttcagataaacccaaaagaaaganaaaagggaggcaaaaatggaaaaaatagaagaaccagaaagaagaaaaatccatgtaatgcagaatttcaaaatttctgcattcacggagaatgcaaatatatagagcacctggaagcagtaacatgcaaatgtcagcaagaatatttcggtgaacggtgtggggaaaagtccatgaaaactcacagcatgattgacagtagtttatcaaaaattgcattagcagccatagctgcctttatgtctgctgtgatcctcacagctgttgctgttattaccagtccagcttagaagacaatacgtcaggaaatatgaaggagaagctgaggaacgaaagaaacttcgacaagagaatggaaatgtacatgctatagcataactgaagataaaattacaggatatcacattggagtcactgccaagtcatagccataaatgatgagtcggtcctctttccagtggatcataagacaatggaccctttttgttatgatggttttaaactttcaattgtcactttttatgctatttctgtatataaaggtgcacgaaggtaaaaagtattttttcaagttgtaaataatttatttaatatttaatggaagtgtatttattttacagctcattaaacttttttaaccaaaa

SEQ ID NO: 15156 - DNA, 998 bp, Homo Sapiens
gggagcagattggtgataataaatacaggttcttcctgggaaatcagtttggagactcccagcaactgcgactggtccggatcctgcggagtactgtgatggttcgtgttggaggtggatggatggcacttgatgagttcttagtgaaaaatgatccttgcagggccaaaggaaggacaaacatggaactgcgtgagaagttcattttagcagatggtgccagccagggtatggctgctttccgaccccgaggccgaagatcccggccatcatcacgaggcgcttcacccaacagatccacttctgtgtccagtcaggctgcgcaggcggcctccccacaggtccctggcaccaccacacccaagattctccatcctttaacacgcaattatggtaaacccatggttgacaaacagcaaaatgtcaactccttgtaaagcagcagagtgctcagactttccccgtgccatctgcagagggaacgccaatacaaagaagcaagcttcgacttccaggatatttatcaaggaaaggcttccactctggggaagacagtgccttgataacaactgcagctgccagagtccgaacacagtttgctgattccaagaagactcccagccgaccaggaagtcgagctggaagcaaagctggcagcagggccagcagccgccgaggcagtgatgcatcagactttgacatttcagaaatccagtccgtgtgctcagatgtggaaactgtcccccagacacacagacctacaccccgagcaggttctcggccatccacagcgaagccttcaaaaatccccacgccccagaggaaatcacctgccagcaaattggacaagtcctcaaagagatagtgcaattggttctaccaaggcccttccttgagcatttattatttaagtttgaacgatgtaaaatatggtgtagaaattcttgtgaaatattgcaagaggcgagtttaaaattctgcagatggccttatttgtg

SEQ ID NO: 15157 - DNA, 913 bp, Homo Sapiens
  misc_feature (648)..(685): n is a, c, g, or t
taatgacaaaatacctgtggccttgggcctcaaggaaaagaatctgtacctgtcctgcgtgttgaaagatgataagcccactctacagctggagagtgtagatcccaaaaattacccaaagaagaagatggaaaagcgatttgtcttcaacaagatagaaatcaataacaagctggaatttgagtctgcccagttccccaactggtacatcagcacctctcaagcagaaaacatgcccgtcttcctgggagggaccaaaggcggccaggatataactgacttcaccatgcaatttgtgtctacctaaagagagctgtaccagagagttcctgtgctgaatgtgaactcaatccctagggctggcagaaagggaacagaaaggtttttgagtacggctatagcctggactttcctgttgtctacaccaatgcccaaactgcctgccttagggtagtgctaagaggatctcctgtccatcagccaggacagtcagctctctcctttcagggccaatccccagcccttttgttgagccaggcctctctcacctctcctactcacttaaagcccgcctgacagaaaccacggccacatttggttctaagaaaccctctgtcattcgctcccacattctgatgagcaaccgcnnnnnnnnnnnnnnnnnnnnnnnnnnnnnnnnnnnnnncattggtctaatttattcaaagggggcaagaagtagcagtgtctgtaaaagagcctagtttttaatagctatggaatcaattcaatttggactggtgtgctctctttaaatcaagtcctttaattaagactgaaaatatataagctcagattatttaaatgggaatatttataaatgagcaaatatcatactgttcaatggttctgaaataaacttcactgaagaaaa

SEQ ID NO: 15158 - DNA, 607 bp, Homo Sapiens
  misc_feature (42)..(97): n is a, c, g, or t
ggggttttttaaaacacaaaaattatagaatatgggatcccnnnnnnnnnnnnnnnnnnnnnnnnnnnnnnnnnnnnnnnnnnnnnnnnnnnnnnnnttgaatgaaaaatgcttatgtattgacagaacacttctagaatgatacccaaactcctggagtgggagtggggaatgccttctacgtacacactgttctactgtttgaattttttaatatgagcccaaattgtataatctttttttaataaaggggagaaaaatcacttacaaggttatacatattttttcccttgacagtactttattaattttcatccatattttacttgactaaaaatacaatgtatgaaaatttatctttaatagcattttccataagctactataacaatttattgatacatctgggattcagccaggtcttatagtatttaaatttataactcctgccatgcttagcattaagtaaatcagtaagcaagcagtatttaagccaaagctttaagaatactttaaagttcatttgtaaatacatagatgcaagactgtttcctataggaagtcacaatcctcaacagaaaatggtgttcttatccggatacagacc

SEQ ID NO: 15159 - DNA, 570 bp, Homo Sapiens
  misc_feature (430)..(465): n is a, c, g, or t
ccaacattggcttcgaccccaggggttggtgtggagacggggtggggagcacacagaggcagacacaggagcagggtagggttggtgggtgcaaagaaacctcagggccggggtttcaatcccagtcttgccactgcttggctctgtgactctgaatgagtccctgacatttcagagcatttttcccaattgagtaggagctcctgccctgcctgaggctggagctcttggtcccctgtgacgaccttggatgaagacagacccttgtgaggacagaacctggaagacagctgaaccggggccggggctgaggccattcacctggctcctgtctccaaggcccaacagactcacaggcagacagctgcacatcacagggatggacaggtcgaggcacagacacagaccaagcctgggctggggagcccgnnnnnnnnnnnnnnnnnnnnnnnnnnnnnnnnnnnnttactccagaagccccttcaccacatccacacagtgggacagcgtcagggaggtggctgaggcagacctgagacaaaaccaagaaagatatgctaagggactggc

SEQ ID NO: 15160 - DNA, 798 bp, Homo Sapiens
gaacagtccactttggaaagtgaagaatggaatcctgggaaggagatgaaaaaaatgagcaacaacacagatttaaaactagccttcaaatattagataaatccacgaaaggaaaaacagatctcagtgtacaaatctggggcaaagctgccattggcttgtatctctgggagcatatttttgaaggcttacttgatcccagcgatgtgactgctcaatggagagaaggaaagtcaatcgtaggaagaacacagtacagcttcatcactggtccagctgtaataccagggtacttctccgttgatgtgaataatgtggtactcattttaaatggaagagaaaaagcaaagatcttttatgccacccagtggttactttatgcacaaaatttagtgcaaattcaaaaactccagcatcttgctggtgttttgctcggaaatgaacattgtgataatgagtgggataaacccattcctcaaaagaaatggaggcttcgtgggagctgcttttcattaattatatgacaggccctggattaatgacgtggatgtttttcagtgggctttaggagtagcaacatacaggaattttcctgtggtggagccaagttggtcaatgctgcatgatgagagggcatatttatgtaatttcttaggaacgatttatgaaaattcatccagacaggggactaatgaacattttggaaaaagatggggaacgataagcttagaagggtttcagcaagagaaaactgggagcctcagggaaacaatgaaagtcttaagaattaccaagatg

SEQ ID NO: 15161 - DNA, 736 bp, Homo Sapiens
tatacgtgttcggggttggagttggtaccagggatgacgctggagttaatgactatgtctgagttggaaagggtccctgggggtgccccgttcccaaagagagtgtctgagatggagatgatgcctccaagagtgggtgctaaagctggggctagggccagtgtctgcgtaagaagccgggctcgggagaggtgacggaaccggggctggtagcatagtttgagttgatgatggagccaacacaggggttggagctggtaccggtgaagctgaggctaaagaggttcctggagtagacgatggagccataactggaaccggagtctgtgatgaagccaggacaggagcagcacctggcgatggtgccaggaccggaagaggagccagaggaggagctggagaaggagccagaattgctgtctgtggagccgccataggagccagaggggtggctagagcctgagatgcagaagatgctggagccagaagggaagcctgagctggagctggatttggtgctgacggaaaaggactggccagagccgaagctggcaccaggacaggtgagcatgctggggccacggttgagttcaaccctggaacatgtgaagaggtgggagccaacaacacgagggtgaccaggtgctctgagactgaagacagggatggagctgtggccaaacctagagtcaaggctgatagctgacggggaagcaccagattgtgccaaggaggg

SEQ ID NO: 15162 - DNA, 575 bp, Homo Sapiens
atgtcctctgctttgctggtggtccgagccattcacatctcacttctaacactcgttatcgtggctactatggacgagtcctggtggactctccctggtaaagagtccttgaatctctggtcagactgcacgtggaacaacgacaccaaaacatgggcctgcagtaatgtcagcgagaatggctggctaaaggcggtgcaggtcctcatggtgctctccctcattctctgctgtctctccttcatcctgttcatgttccagctctacaccatgcgacgaggaggtcttttctatgccaccggcctctgccagctttgcaccagcgtggcggtgtttactggcgccttgatctatgccattcacgccgaggagatcctggagaagcacccgcgagggggcagcttcggatactgcttcgccctggcctgggtggccttccccctcgccctggtcagcggcatcatctacatccacctacggaagcgggagtgagcgccccgcctcgctcggctgcccccgcccctttccggcccccctcgccgggggtcctccaaaaaataaaactttaacggcgg

SEQ ID NO: 15163 - DNA, 478 bp, Homo Sapiens
  misc_feature (451)..(451): n is a, c, g, or t
gggactctgggcaggatccaacgtcgctccagctgctcttgacgactccacagataccccgaagccatggcaagcaagggcttgcaggacctgaagcaacaggtggaggggaccgcccaggaagccgtgtcagcggccggagcggcagctcagcaagtggtggaccaggccacagaggcggggcagaaagccatggaccagctggccaagaccacccaggaaaccatcgacaagactgctaaccaggcctctgacaccttctctgggattgggaaaaaattcggcctcctgaaatgacagcagggagacttgggtcggcctcctgaaatgacagcagggagacttgggtgaccccccttccaggcgccatctagcacagcctggccctgatctccgggcagccaccacctcctcggtctgccccctcattaaaattcacgttcccaaaaanaaaggaaggacagaaagaaaacgtgtc

SEQ ID NO: 15164 - DNA, 738 bp, Homo Sapiens
  misc_feature (28)..(28): n is a, c, g, or t
gccaggttcgttgtgttcctctctcggnggtcttctgtcacacacagatgaactttaataaattacaaatgcacctgaaaatgccttcttgatttcctttcagtttaggcctcaaatgggctctcctcaaggctggacctcaaaggcccagtttgggccttcgcaaatgtctctaacccttgacttagagtttgaagattcattccattctggatgtgaatgcaggtaacacccagtttgctgacgtctacaatattccgcctctcatcatcaaagaagatcatctgggagaaaggaattccagtcttctgctgcaacctctcaaagtgtgtgatcttgctgcctggatagatttcccgatgaacaaagtacctgaagaggtcaaagagctccagtagctggttggccccttctatctcacttgtccttgaagcagccgcaccgggcaccccaaggctctgcaatcgttttaggacctcaggcacctctgggtacagtcggacgtcttggccccgcctatctcgtacagttccatcactgctcttatggaacggagggtctacgtgcgtgtcgacccagaaaggccagagagtgtaatccaaatcaaagactgccagcttcggtagccgcgccatgacccgcaccgcaggctgcgcgcagcagaggtggggcttcacccggggccttagagagtgcggaacctccggcagctaaggcagccaccctgcctgccatccc

SEQ ID NO: 15165 - DNA, 842 bp, Homo Sapiens
  misc_feature (108)..(209): n is a, c, g, or t
  misc_feature (528)..(555): n is a, c, g, or t
ggattttaataaaatgcagaagtaggttgacaagaatttcacctgcaaccttgtcaaccacctagaataaaagcctctgcagccctcccctaaagactcatcaatgtnnnnnnnnnnnnnnnnnnnnnnnnnnnnnnnnnnnnnnnnnnnnnnnnnnnnnnnnnnnnnnnnnnnnnnnnnnnnnnnnnnnnnnnnnnnnnnnnnnnnnnttcagaaatacaactataaaaaaataaataaatcctccagtctggatcgtttgacgggacttcaggttctttctgaaatcgccgtgttactgttgcactgatgtccggagagacagtgacagcctccgtcagactcccgcgtgaagatgtcacaagggattggcaattgtccccagggacaaaacactgtgtcccccccagtgcagggaaccgtgataagcctttctggtttcggagcacgtaaatgcgtccctgtacagatagtggggattttttgttatgtttgcactttgtatattggttgaaactgttatcactnnnnnnnnnnnnnnnnnnnnnnnnnnnnaaatctatttatttttgcaaacccctggttgctgtatttgttcagtgactattctcggggccctgtgtagggggttattgcctctgaaatgcctcttctttatgtacaaagattatttgcacgaactggactgtgtgcaacgctttttgggagaatgatgtccccgttgtatgtatgagtggcttctgggagatgggtgtcactttttaaaccactgtatagaaggtttttgtagcctgaatgtcttactgtgatcaattaaatttcttaaatgaaccaatttgtct

SEQ ID NO: 15166 - DNA, 789 bp, Homo Sapiens
  misc_feature (394)..(426): n is a, c, g, or t
  misc_feature (530)..(569): n is a, c, g, or t
ataccagtttttagctggtgtttatgaagaacagtgagtacctagaactgtgccactaattaaaggaaatcctaagaaggtgcatttctttacagagctgtgtcatgccatcctttgggccctctgctggaaaagtagaatcaagtctcaaataatgcctttttaattgtatcctctagtattatagatataggacagtactgtatcatacctctgtgaatgtaaaatatcttgtacctgctttatgatacgtagtagtgaccgtgctttatcagagctgtttttaatgatgttattctagaatgttttctttccagatgatgattcagaagctaattttaaaaaacggtgccaggtaccacaacagtaacagaactttgcaattttctggggnnnnnnnnnnnnnnnnnnnnnnnnnnnnnnnnnaaatggagtgtgctggatgtctctataattttattcagatgactgcagaacctggaaaagctgttgctgctattgatgcataacatactgctattggtcttttnnnnnnnnnnnnnnnnnnnnnnnnnnnnnnnnnnnnnnnnatttgaatttttggaaactttagctgtgctgtcaactttggaaaaagtatcccggtttactgtgttgagttggcattgtacagaaattaacagccatattggtctagaaacgttaaacttaatttttttccatttgtacaggggtaacgcactgtattaaatatgtaaggtcttatctacatgggtttgattacagaaactaataaagtattctctaaat

SEQ ID NO: 15167 - DNA, 1188 bp, Homo Sapiens
cttaacaggctgatgctggaggccagtgtcactgctgcccggatttcttctccttctggaagctgaagctcgtacgtctgttcagttttctttgtttttgagcaaagtagtcagcccgggcagtgctagctcgcgattccaggatgtagttaaccttgagcacaatttcattgacggtagcagcgtccgattcaaagtagaggtgtttatagtcgtgattgcttagatacgtgagtttaaatattgcgtgactggggcttttctcttcagcaaggtcacaggcacagagcaggtcggaatcgattgagatgggtttctgcttaatccaaaacttagtgctggctttctgattcgtaacagggtctatctctactttgtctccagagatacctagctgtacgtcggttgtgaatcgcagtctgtggatcatgctgactttgaatgacttgtaatggtggctgctaagcatatcctgtactgtggctatgtcaatttgcgaatcctcctcaaaaaccccgtctgcccttgaactgttctcgcggaccaggcagaactcccatgcgctctggctctccaaagtgctgtccaggtcaacggcgacattgggctcgctctgcttctccaggcggtactgagggcctgaaactttctgggatccttttcttcgcttcactgccttcagtaagatttccttcatggtaacctttgtgttgtccacctgaataagggagaatccatgagcagcatttattcgaacaaagagtgactctttggatgtcagaccaggagatgagtacttttcaaccagggccaaagtactgaagccaaacttatgaatgggctcattggaatccagcggggggaaatcggtgtccacctccccatcatcctcagcaatatgcatggcagtaggcactgacattgtcattgagcttcggctcccgtccttcgcttgtatactgccagcagatgagcccgatcaggtcctgcaccctggcgctggccattgtcaccacggtcattggcagcagtctgtcctggctcgagtgcagagggaggtagacatccgatcttcttggttgctgttgtacctacatgacccttgccatcaaatttggaatactcgttaaagggttattcagctgaagagggcactgttctagcgtacagatatatcactgcttccca

SEQ ID NO: 15168 - DNA, 650 bp, Homo Sapiens
  misc_feature (63)..(63): n is a, c, g, or t
aggggttggttcccgtcgtcgtacacgaggttgctgaaagaaaatgagacagaagcagtgacngtgcccacgccaagccccacaccagtgagaagcatcagcaccgtgaacttgtctgagaatagcagtgttgtcatccccccacccgactacttggaatgcttatccatgggggcagctgccgacaggagagcagattcggccaggacgacatccacctttaaggccccagcgtccaagcccgagaccgcggctcctaacgatgccaacgggactgcaaagccgccttttctcagcggagaaaacccctttgccactgtgaaactccgcccgactgtgacgaatgatcgctcggcacccatcattcgatgagaggacagccaaggactctcccgggcctctccggttctcccttgcggaatgatgggcgcatcctgtctgccacgtgctgacggtcgggaagcttcagtggagaggcctaactctaatgtcgcctgcttaagcaaatcatgcttctctgtttcacgtagttgggttgacaagtttctgcctttaagataaatgagtaatagtctaatgaccagctcagccatttaaaatattttcttcctattctgttcaagaaacagtaaacttggtttcaatcttta

SEQ ID NO: 15169 - DNA, 1710 bp, Homo Sapiens
acttaggctagtacgaggccggtggtttatctggcaccgaggctcccaagagccctgcggcgggcgcgaaaatggcggcggcggcgacggccgggcgctcctgaagcagcagttatggagcttccctcagggcggggccggagcggctctttgactcgcaccggcttccgggtgactgcttcctactgctcgtgctgctgctctacgcgccagtcgggttctgcctcctcgtcctgcgcctctttctcgggatccacgtcttcctggtcagctgcgcgctgccagacagcgtccttcgcagattcgtagtgcggaccatgtgtgcggtgctagggctcgtggcccggcaggaggactccggactccgggatcacagtgtcagggtcctcatttccaaccatgtgacacctttcgaccacaacatagtcaatttgcttaccacctgtagcacccctctactcaatagtccccccagctttgtgtgctggtctcggggcttcatggagatgaatgggcggggggagttggtggagtcactcaagagattctgtgcttccacgaggcttccccccactcctctgctgctattccctgaggaagaggccaccaatggccgggaggggctcctgcgcttcagttcctggccattttctatccaagatgtggtacaacctcttaccctgcaagttcagagacccctggtctctgtgacggtgtcagatgcctcctgggtctcagaactgctgtggtcacttttcgtccctttcacggtgtatcaagtaaggtggcttcgtcctgttcatcgccaactaggggaagcgaatgaggagtttgcactccgtgtacaacagctggtggccaaggaattgggccagacagggacacggctcactccagctgacaaagcagagcacatgaagcgacaaagacaccccagattgcgcccccagtcagcccagtcttctttccctccctcccctggtccttctcctgatgtgcaactggcaactctggctcagagagtcaaggaagttttgccccatgtgccattgggtgtcatccagagagacctggccaagactggctgtgtagacttgactatcactaatctgcttgagggggccgtagctttcatgcctgaagacatcaccaagggaactcagtccctacccacagcctctgcctccaagtttcccagctctggcccggtgacccctcagccaacagccctaacatttgccaagtcttcctgggcccggcaggagagcctgcaggagcgcaagcaagcactatatgaatacgcaagaaggagattcccagagagacgagcccaggaggctgactgaactcaaaaggaacaggatggcaccccgagccgcaggacggaaactggggggcagcccttcccccaactccacaaaagggttggatggggggggcgggcaaaaaagggaaggtggagggtccccccaatggcaccatttagattcatggggttttccttccacaggaaaagaaaggacagcgcgacaaaaactgccttgtgcgggccgccctcgggccctccaaaaaagcttttcaacaaccattcccctttgggggcccggggcgcccccgtaagggtaaagtgcaacactggggcccaaagccgtgttctcccaaaggaagaaccggggccccataaaacaggaggcctggggaatctcccac

SEQ ID NO: 15170 - DNA, 1239 bp, Homo Sapiens
  misc_feature (75)..(154): n is a, c, g, or t
  misc_feature (572)..(722): n is a, c, g, or t
  misc_feature (1120)..(1135): n is a, c, g, or t
  misc_feature (1149)..(1149): n is a, c, g, or t
  misc_feature (1202)..(1203): n is a, c, g, or t
aaaaattagctgggcatggttgcgcatgcctgtaatcccagctactttggaggctgaggtggggagaattgcttnnnnnnnnnnnnnnnnnnnnnnnnnnnnnnnnnnnnnnnnnnnnnnnnnnnnnnnnnnnnnnnnnnnnnnnnnnnnnnnncaacagaaggaaaaaaaaggaaaataggagaaggtggaaatgggtgaagagagaagtcccctcactagctgcatgagaaatctatcttactgtggttctccatgggcagcaggaccatttttcagaatcaagagggaggacagtgtgagaaggcgatgatccaaagaagacagagaggtcagccccacccgatccctcaaatgggctcttggaggcacccccaggggcagcccatttctcaaagtccagaaaattagggtcccagaagggggcagcagcaggctgggagttaggagggagagcagggtgccggccctgccaccaagttgagagctggaggggaggtggggagagaacatcacagagcagccagccctggttcactcctggcagtttcttctcaagctccttccctagnnnnnnnnnnnnnnnnnnnnnnnnnnnnnnnnnnnnnnnnnnnnnnnnnnnnnnnnnnnnnnnnnnnnnnnnnnnnnnnnnnnnnnnnnnnnnnnnnnnnnnnnnnnnnnnnnnnnnnnnnnnnnnnnnnnnnnnnnnnnnnnnnnnnnnnaaaatccttccctagagctagtatcctaaagctgcagagctagcccagacctcattggtttccttgtccttggggtgcttttcctgaatctttgggggtgaagggagtgttgctcccagtccagaggcctgattctgttcggactgggttctcaagacacgaccaggttctcaagacacgagtccccttgttcctccccattaaagggggtttgtcagaagcaagaacagcccctctccccagtcacagcctgaagggaggccccgagagcttcctccttccccccacctgctccttaccttctctgccctgctttttagaactgcagttcattgttttaagggattgggggagggagcctggggacacaaaccttttatacaatacaaagctttgcnnnnnnnnnnnnnnnncttcccttttcccntttctcggttctcttttctctcctctggaatgggctgaagacccctctgcccnnagggaagtttggggggattgttggggacaaagttcc

SEQ ID NO: 15171 - DNA, 588 bp, Homo Sapiens
atgagaatggagatgtatgcatttcgattcttcatccgcctgtagatgacccacagagtggagaactgccttctgaaaggtggaatcctactcagaatgtgaggactatcctattaagtgtaatctcactgcttaatgagcccaacaccttctccccagccaatgtcgatgcttcagttatgttcaggaaatggagagacagtaaaggaaaagacaaagaatatgctgaaattattaggaaacaagtttcagccactaaggccgaagcagaaaaggatggagtgaaggtccccacaaccctggcggaatactgcatcaaaactaaagtgccttccaatgacaacagctcagatttgctttacgacgacttgtatgatgacgacattgatgatgaagatgaggaggaggaagatgccgactgttatgatgatgatgattctgggaatgaggagtcgtgacgtgctccttcagtgcccctgtactgccctgccatctcaggccaaagggaggggagcaagtggggacctggccatggcccctcagcaaaacctattcacagcgtgttgggcgataacatcacggggatcc

SEQ ID NO: 15172 - DNA, 666 bp, Homo Sapiens
ctgagcggaagtacggaccgtgaactggagtggaatcgcgactatgggagctccggggggaaagatcaaccggccccgaacggagctgaagaagaagctgttcaaacgccggcgggtgttgaatcgggagcggcgtctgaggcaccgggtggtcggggctgtgatagaccaagggctgatcacgcggcaccacctcaagaagcgggcgtccagtgcacgtgccaacattacactgtcagggaagaagcgcagaaaactcctccagcagatccggcttgcccagaaagagaagacagccatggaagtggaagccccttcaaagccagccaggactagtgaaccacagctcaaaaggcaaaagaagacaaaagccccccaggatgtagaaatgaaggaccttgaagatgagagctaaacctcttccactagaagattctcaactggagccagccttcagactcagtggttgtttcagaggactttgacaaaagcaaggccccttttcactctccagatttcctcctacctaatggcctactgacctcccctagagggatgtctttgggagggaagaaggtacagaagaaagattggagaagggtctctctagcagtcaactccatttgtaataaagccctagcactcgcggggggaaaaaattgattt

SEQ ID NO: 15173 - DNA, 642 bp, Homo Sapiens
caggattcctttgcgatggaattgacctccaggagaaaactcaatgtctatgttaatcttcagcaaacaaaggtttttaaaactatgaatttgtgggagaaataatatgactaggaagcaggagcaggggaaccttatttcttattgcgttagttatgggaatcactgatgggctggaagatcacactgggtcagggttcagtgtttggttcttgtctactgaccttgtgagttctcagagcatcagcaagtgatgtgcacgtgtggtacccctgtctgctcaccatatgcttttgttttaggttctcccatggcgccagccagtgtgggcaattgcagtgtgggcaactgcagcccggaggcagtgtggcccaaaactgaacccctggagatggaagtaccccaggcacctatacagcccttctatagctctccagaactgtggatcagctctctcccaatgactgacctggacatcaagtttcagtaccgtgggaaggagtacgggcagaccatgaccgtgagcaaccctcagggctgccgactcttctatggggacctgggtcccatgcctgaccaggaggagctctttggtcccgtcagcctggagcaggccaaattcccaggtcctgagcatattac

SEQ ID NO: 15174 - DNA, 940 bp, Homo Sapiens
  misc_feature (332)..(392): n is a, c, g, or t
ggagtggaggatgtgccaaatattctcttcaaatgccaccttctcaatttataactaaaatagtgttatctgactaattcctctgaattttgatgtaagatctatataggcccccaaaatgatcgtagtacatgccagtcatttctcagtgaaataaatacaataccagagtacattatgggttttattgctttcttttatggtagacctgttgatggggaaaaaatacatcaaatcaaatagaatcttatatctgtatgttaaaatagagcacttacctgaagtcagtggcctggatcatagccctggatcatttcccagtctgtcctgtnnnnnnnnnnnnnnnnnnnnnnnnnnnnnnnnnnnnnnnnnnnnnnnnnnnnnnnnnnnnncaagtggctgcagtagatgatggctgagagcccttcctgttcccagatgccttggtccaaagaccccacccctctgctggtcctgccaacgtgttggtgctataagctgcttcagatataaaattggtttatctataatgtttgttcatttaatagcttctaaaaggcctttttgttatacagtgctttttttctagttttatggacttgattactgtaataatgtcttgtttttagccatgtaactacaaacagatattctcttgatgtcttagtaaatttgcatttgatatatcattgatgagattttgttgttatgtaatattctttggctacgcatctgtccagcatcttattaaccataatactgtgatcattatttggaaatatgtcctatggaaagaataaaagcatgtacttcacagctagcatgttcacagatttgaaagaagtttcattaaaagcaccattgctttctgtactgcgtcagtgcctcattgtatcatcctacttgtgttttgctcaataaatgaataaaagaccaaaaa

SEQ ID NO: 15175 - DNA, 727 bp, Homo Sapiens
agcggccgctagatggtggtgctgttctggatgcttccagtgggccccgaccaggtctggacaatgcctggcgcccgtcccccgcccctcatctacacacacgcaagaattcggagctccatggggaacagaagcaagatatccgtaaaatcaaagtctagggggtgggaatgaaaagggaaaagtgaggaacggggagccaaacccaggaagacgcctctgttcctgcacattccctctcctttatatactcagctcttggctgtctccagtatgtacccaccctggtcttccaagctgggagccactttttataacacaatcacagtttcacaaaccccaggaaggttccatgtggagagaggttaagtttcgcccttgcccggggaattatgacactcagaatatccccttggtgtaaatggaagacacctgcgctatagcagctgttgtaggcccggtccgggtgggagggcatacttcttatacatcggaatagagtctcctgccttccttggccttctcgagacaccacctgacccatggtgaaagtcacgtcttgaaacaggacctggctatacagcagataaactccagcatcctggattcggacaccatatccttgggcctgtagcctctcccacgcctaagagctggttgccacatcacctctgtcacagacggagtctccctgggggatgagcagcccataagctcctctagagtc

SEQ ID NO: 15176 - DNA, 393 bp, Homo Sapiens
  misc_feature (197)..(238): n is a, c, g, or t
acataaaaagttcagtaaaaattggataaagtaaagtgattttaagcagtaaatcaatcttatcaacatagcacaaggctggccaaaaccacaaggcagcctgctttggaatatttacatgataacaaattaaaccttgcaggagaacttaaactgtccttacaaagtcttcctgtgatcctagcatgtagaggctnnnnnnnnnnnnnnnnnnnnnnnnnnnnnnnnnnnnnnnnnnttattttcaatatattcacatatacattaaaatataatacagatcatcagggtaaagggttgtgggtggggatgcgcatgggtctgtgcgctgacagcaccgccaaggagaagacccaggtttaagagtggagtcaggtctggccagggtctttt

SEQ ID NO: 15177 - DNA, 1010 bp, Homo Sapiens
  misc_feature (872)..(892): n is a, c, g, or t
  misc_feature (908)..(908): n is a, c, g, or t
ggcgagtgcaagcttgatgcgtgtggtcgaacttaggaggatccccctcaaactgcgcccgcgatgactggcactctccgcccctacctgagtgccgtgcgggccacattgcaggctgccctctgcctggagaacttctcctcccaggttgtggaacgacacaacaagccggaagtggaagtcaggagtagcaaagagctcctgttacaacctgtgaccatcagcaggaatgagaaggaaaaggttctgattgagggctccatcaactctgtccgggtcagcattgctgtgaaacaggctgatgagatcgagaagattttgtgccacaagttcatgcgcttcatgatgatgcgagcagagaacttctttatccttcgaaggaagcctgtggaggggtatgatatcagctttctgatcaccaacttccacacagagcagatgtacaaacacaagttggtggactttgtgatccacttcatggaggagattgacaaggagatcagtgagatgaagctgtcagtcaatgcccgtgcccgcattgtggctgaagagttccttaagaatttttaaaccatctggctggatctcgtggccttccccctcagactacccatgtctccacgaaggcgtcctggagtcactccccgagcagcgcggcggcggcagggagttgggttggggtgggcatttgatgcgggaggtgggtggtgtgcttgctagctgggcaagaaagcagcagtggacctgccccaaggccacacgtgcctggtcaggctggcttctgatgttcagtcccctgggccgggacagattttttttaacgtcttgaaacttaaactctgtgcttgtaggatactgtaacctttttggcnnnnnnnnnnnnnnnnnnnnnaaacctccacctccantggctgtgactggtcccagtgattatacgttattgggttgctgtggggtctgggcggggctggagccagaaagcgacttattttttctctcatgccccccct

SEQ ID NO: 15178 - DNA, 684 bp, Homo Sapiens
atttgaccaaggctgtacaaaggctcctaaatacagtacagtcaaaaagtttcctctttgcagactcaatttatagtcaatttagtacagataaatataggaaactacttcagattattggacaaataagaatttcagtgtgtcactacctataattaagtagcagcacaccacaaccacagcaagtaaacactaatctcctctactgcctttttggggtcttttccagtcacaggagctaatttacagggataccactgggtttcaaccaatctctgaaagtccctttattatgagttttgaaatttaactaatgcatcacctacaattctgttggctagtttttttcttactcttcactaattagttttaaatacaatatgtaatgttttcaaatttttataaacataggtgttgtactaaaatgattaatggcatttgaaatacaacaaatgggtaagatgttaaccaaaacaatgggattaagagtattttagaaagcgattttttgttaactagaaaagctacaggattcacaatgaatacagatacaatatttttaaccctgctcttttattacatcagtagtatagtaagtgcctaaagtatagaagagaaagaaaattccggggagaacttacacaaactggaggttggtggtcaccccacatagtaaacagttca

SEQ ID NO: 15179 - DNA, 1229 bp, Homo Sapiens
  misc_feature (764)..(772): n is a, c, g, or t
ctgaccgcttggtgggtcatcaggaaagaggacgtcacaggctacttcccgtccatgtacctgcaaaagtcagggcaagacgtgtcccaggcccaacgccagatcaagcggggggcgccgccccgcaggtcgtccatccgcaacgcgcacagcatccatcagcggtcgcggaagcgcctcagccaggacgcctatcgccgcaacagcgtccgttttctgcagcagcgacgccgccaggcgcggccgggaccgcagagccccgggagcccgctcgaggaggagcggcagacgcagcgctctaaaccgcagccggcggtgcccccgcggccgagcgccgacctcatcctgaaccgctgcagcgagagcaccaagcggaagctggcgtctgccgtctgaggctggagcgcagtccccagctagcgtctcggcccttgccgccccgtgcctgtacatacgtgttctatagagcctggcgtctggacgccgagggcagccccgacccctgtccagcgcggctcccgccaccctcaataaatgttgccttggagttggacccgagggctcctgcaggaaatgcaagggaggggcccgggcctcccgccccccaggggtgtttttccggaggcggcgggaagacggcgttctgggagccccgatactacgccttgctcccggccccgctctccgggcccccttgtggagaacacgccttctccctagaacgccctttctctccttcttctgacgccctgagcgcccggggnnnnnnnnnacggtcacgggggggcatcgaaaatgcgagaaaatcacactgcgtcgatttcccatctaagacaagtgttgcgagttcccccccgttagccgcgcgcgaataactccctcgttgaggcctacaattttggcaacctacacgagtggcgcttcgggggagaatctcgccgcacgaccgcgcttatatgacagcaattaaaccctgcccccgcgggacacggagacgacatcaccgcctcctgggggccgcctcttaaagccccgagacatccccctcacgtcacggcgcgccctccaaccctaggagcgggggactctgaggcgccggcgcgcgcaatgcgcagattctgccacgcgccggcacgctccggcatacgggacggagcacccgcccgctctagctcagcgccgggtcgcgtcctcgcacagcggggtgtattcaagtacacaatatacta

SEQ ID NO: 15180 - DNA, 946 bp, Homo Sapiens
  misc_feature (738)..(738): n is a, c, g, or t
gcccttgaagggtgtacgtgacatcgctctatcacccaggtgtgcccagatccgtggcctgttacagaaagaactgtgctagcccctcctctgcaggacagttgatccttcctgagtgcatgaagctactcccagtttacctgaactgtgtgttgaagagtgatgtcctgcagcctggagctgaagtcactactgatgaccgtgcctatgtccgacagctagttacctccatggatgtgactgagaccaatgtcttcttctaccctcggctcttacctttgacaaagtctcccgttgagagtactaccgaaccaccagcagttcgagcctctgaagagcgtctaagcaatggggatatatatttactggagaatgggctcaacctcttcctctgggtgggagcaagcgtccaacagggtgttgtccagagccttttcagcgtctcctccttcagtcagatcaccagtggtttgagtgttctgccagttctggataatccactgtccaagaaggttcgaggcctcattgatagcttacgggcacagagatcccggtacatgaagcttaccgtggtgaaacaggaagacaagatggagatgctgttcaagcacttcctggtggaagacaagagtctgagtgggggagcatcttatgtggactttctctgtcatatgcacaaggagattcggcagctactgagctaaagcaagtgggtaaatggcatagggcccaggctangcttccagaaagcaccccaggatgtcagagaaattgggacagtaacatatcttatgtaagctgacctcgtctctctggggggacgggggatttaggagaaccttttctgggctcagttcctgcatcgtaaggctgtgatggagtgcctgtcctcttactcttacgtaacgaaaaatgaacagacggatgaggagggtggagccacgat

SEQ ID NO: 15181 - DNA, 420 bp, Homo Sapiens
aggcgatctagaggatccctagtttgggatggctgatgggagaagatggcgatctgcgtccatcaggaggggcataatgttagggtgttccaccttgggtgatgctaaattgaatcacttggttattgtggtgaccattgtaaaggtacattttcccctgtataattgatacctcttctgtaggattatatttaaatccttgtagaagatcctattccacaatagcttttcatccaatagttttagcatctatcgatgaacgttacgtgaaaaatctatgaactgctctttatgaacactttttaaagcctttataaaactattttctcttactgtattttcactttttgcttaacctaaatttggccctttttaaaaatcctaaaatcatatggcagttttagaatggtagctggttgc

SEQ ID NO: 15182 - DNA, 1186 bp, Homo Sapiens
  misc_feature (728)..(741): n is a, c, g, or t
  misc_feature (764)..(772): n is a, c, g, or t
  misc_feature (799)..(808): n is a, c, g, or t
  misc_feature (891)..(891): n is a, c, g, or t
gggttgaagaagtgtcccactccacacccctgttggcttttgctctctcggctgaaggagaagattgggcagcttactcgagcacgggccattttggaaaagtctcgtctgaagaacccaaagaaccctgggctgtggttggagtccgtgcggctggagtaccgtgcggggctgaagaacatcgcaaatacactcatggccaaggcgctgcaggagtgccccaactccggtatcctgtggtctgaggccatcttcctcgaggcaaggccccagaggaggaccaagagcgtggatgccctgaagaagtgtgagcatgacccccatgtgctcctggccgtggccaagctgttttggagtcagcggaagatcaccaaggccagggagtggttccaccgcactgtgaagattgactcggacctgggggatgcctgggccttcttctacaagtttgagctgcagcatggcactgaggagcagcaggaggaggtgaggaagcgctgtgagagtgcagagcctcggcatggggagctgtggtgcgccgtgtccaaggacatcgccaactggcagaagaagatcggggacatccttaggctggtggccggccgcatcaagaacaccttctgattgagcggttgccatggccggtctccgtggggcagggttgggccgcatgtggaagggctctgagctgtgtcctccttcattaaaagtttttatgtctcgtgtcnnnnnnnnnnnnnngtttagttgctttccggtgtgannnnnnnnnagcggcgatagtctcctacaccgcccnnnnnnnnnncgcacgagagataccctctcgggggcccgaatcttcaaccgaagccggtctcctttggaaacaggcgacgcctggccgggggngtcttttataaatttacccccggcgccgcgtgtttttcacctttcccaacaccttgacggaagacaacgcctcgccactatttactcagcgaaaaaacacagtagataggcgcgaaccccgaaaagaacggcgcgcgcggacagaataatgattcactgttatggtacgagcacaccaacggtatgcctgcccgtgcatttggcagaccgccgtccgcccgatcaccccgcagaccatgtcaatacacacgtagcaactgggcttttaacacacatcgttgcgctaatgaatcgg

SEQ ID NO: 15183 - DNA, 580 bp, Homo Sapiens
agaggaggggcaaggagacagcacaacagcaaaggctacagagtcatgggttcagggttcagaggaggggccaggagacagcgcgacagcaaaggctacagagacacggggtcagagttcagaggaggggccaggagacagcacaacagcaaaggctacagagacatgggttcagagttcagaggagggcccaggagacagcgcgacagcaaaggctacagagacacgggcatctttgaggaagagaatgggatagaaggacagggaggaagtctaactggttccagcccacagacgggccatagcacagcagcagagccgcctggggaagttgaccgctgcaagactcctagactcggaaaggaggggggcgagacggaatcacagggagaaatgtcacccaaacttcgagctttgaatccatttaatgactggtcattttccaagaactttctgaagcttcatggtttctaactgtattttcaaactgcccatacggcccttgtgacaggggctgcgggggagtgggggtgcatctgaattcactgtgcgaactcgaacccagtgtggggtaccgagc

SEQ ID NO: 15184 - DNA, 2163 bp, Homo Sapiens
acctttctctctatcggtcctcccctaccctctcaccacatgcatgcgtacggtccggaattcccgggatgctctgtgtgccaggcgctcgggagggggtagctcttctagtagtgctcggcgtcagacatggcggaggcgatggatttgggcaaagaccccaacgggcccacccattcctcgactctgttcgtgagggacgacggcagctccatgtccttctacgtgcggcccagcccggccaagcgtcggctgtcgacgctcatcctgcacggcggcggcaccgtgtgccgagtgcaggagcccggggccgtgctgctggcccagcccggggaggcgctggccgaggcctcgggtgatttcatctccacgcagtacatcctggactgcgtggagcgcaacgagaggctggagctggaggcctatcggctgggccccgcctcggcggcggacaccggctcggaagcaaagcccggggccctggccgagggcgccgcggagccggagccgcagcggcacgccgggcggatcgccttcacggatgcggacgacgtagccatccttacctacgtgaaggaaaatgcccgctcgcccagctccgtcaccggtaacgcctttgtggaaagcgatggagaagagctcgctcacgcagcactcgtggccagtccctgaaggaccgcttacctcaagcacctgcggggccagggagcattaagtacctgctgggggacgcgccggtgagcccctcctcccagaagctcaagcggaaggcggaggaggacccggaggccgcggatagcggggaaccacagaataagagaactccagattggcctgaagaagagtatgtgaaggaagaaatccaggagaatgaagaagcagtcaaaaagatgcttgtggaagccacccgggagtttgaggaggtcgtggtggatgagagccctcctgattttgaaatacatataactatgtgtgatgatgatccacccacacctgaggaagactcagaaacacagcctgatgaggaggaagaagaagaagaagaaaaagtttctcaaccagaggtgggagctgccattaagatcattcggcagttaatggagaagtttaacttggatctatcaacagttacacaggccttcctaaaaaatagtggtgagctggaggctacttccgccttcttagcgtctggtcagagagctgatggatatcccatttggtcccgacaagatgacatagatttgcaaaaagatgatgaggataccagagaggcattggtcaaaaaatttggtgctcagaatgtagctcggaggattgaatttcgaaagaaataattggcaagataatgagaaaagaaaaaagtcatggtaggtgaggtggttaaaaaaaattgtgaccaatgaactttagagagttcttgcattggaactggcacttattttctgaccatcgctgctgttgctctgtgagtcctagatttttgtagccaagcagagttgtagagggggataaaaagaaaagaaattggatgtatttacagctgtccttgaacaagtatcaatgtgtttatgaaaggaagatctaaatcagacaggagttggtctacatagtagtaatccattgttggaatggaacccttgctatagtagtgacaaagtgaaaggaaatttaggaggcataggccatttcaggcagcataagtaatctcctgtcctttggcagaagctcctttagattgggatagattccaaataaagaatctagaaataggagaagatttaattatgaggccttgaacacggattatccccaaacccttgtcatttcccccagtgagctctgatttctagactgctttgaaaatgctgtattcattttgctaacttagtatttgggtaccctgctctttggctgttctttttttggagcccttctcagtcaagtctgccggatgtctttctttacctacccctcagttttccttaaaacgcgcacacaactctagagagtgttaagaataatgttacttggttaatgtgttatttattgagtattgtttgtgctaagcattgtgttagatttaaaaaattagtggattgactccactttgttgtgttgttttcattgttgaaaataaatataactttgtattcgagtctcgtc

SEQ ID NO: 15185 - DNA, 1469 bp, Homo Sapiens
tttgagggtctgatcgaaagtgtatggagtacctgaggatcattgaagagaaatcctgagtattgtcttgaattgagcaaaacaggtgtacaggctggatgacatgtctagcattgttcagaaggcacccaacctgaagatcctaaacctttctggaaatgaattgaagtctgagcgggaataggacaagataaaggggctgaagctagaagagctctggctcgatggaaactccctgtgtgacaccttccgagaccagtccacctacatcagcgccattcgcgaacgatttcccaagttactacgcctggatggccatgagctacccccaccaattgcctttgatgttgaagcccccacgacgttaccgccctgcaagggaagctattttggaacagaaaacttgaagagtctggtcttgcacttcctgcaacagtactatgcaatttacgactctggagaccggcaagggctcctggatgcctaccatgatggggcctgctgttccctgagcattcctttcattcctcagaaccctgcccgaagcagcttagccgagtatttcaaggatagcagaaatgtgaagaagcttaaagaccctaccttgcggttccggctgctgaagcacacgcgtctcaacgttgttggccttcctcaaatgagttgcccaaaacccagcacgacgtcaattcattcgtggtagacataagcgcccagacaagcacattgctgtgtttttctgtcaaatggagtcttcaaggaagtggacggaaagtcccgggattctttgcgagccttcacccggacattcattgctgttcctgctagcaattcagggctatgtattgtaaatgatgagctatttgtgcggaatgccagttctgaagagatccaaagagccttcgctatgcctgcaccccacgccctcctccagcccggtgcccacccctctctccagagcagcaggaaatgttgcaagcattctctacccagtctggcatgaacctcgagtggtcccagaagtgccttcaggacaacaactgggactacaccagatctgcccaggccttcactcatctcaaggccaagggcgagatcccagaagtggcattcatgaagtgatcgtagtcatgcctcagaagcagtcccccctgtaaatagtccttggatattaccgtctggttgtcgtctgtcatctcctcctgtctggcccgaggccgccccgtgactgtgaccgagggagggagggctgcctgatccctctcctcgcctgccttctggaagacttcagaagattgagcctcactggtgccaggaagccaaagcttactttgtagaactgacactaaactacccgaaggacttaggtgctttgtgtacttaaccccaggacctccttactttttaatataaagagtgatgttgtatttcgtgttctgcactttttaatataaagagtgatgttgtaa

SEQ ID NO: 15186 - DNA, 430 bp, Homo Sapiens
aactcaggggcgagctgcggcgagcctttgaggggaacgacttgtcggagccctaaccaggggtatctctgagcctggtgggatccccggagcgtcacatcactttccgatcacttcaaagtggttaaaaactaatatttatatgacagaagaaaaagatgtcattccgtaaagtaaacatcatcatcttggtcctggctgttgctctcttcttactggttttgcaccataactacctcagcttgagcagttagttaaggaatgaggttacagattcaggaattgtagggcctcaacctatagactttgtcccaaatgctctccgacatgcagtagatgggagacaagaggagattcctgtggtcatcgctgcatctgaagacaggcttgggggggccattgcagctataaacagcattcagcactctac

SEQ ID NO: 15187 - DNA, 718 bp, Homo Sapiens
  misc_feature (581)..(589): n is a, c, g, or t
gttggacagaggctagggggcagtgccagcctgattcttccgacctacctgccatttgttcccgccttcagatggatggacagtttgctggctaatgataggagtggggactgggtgggggcttctcccatctacccagggctgggctgatccccctactgcaaataactgttgccccccaaccccgaaccctccagttgaggagttgagagagtgcaggctggggtcaggacaggctgcggatgcttgtgcctatggggagttactccaacccacctattctgtctaatctccatggctttgcaccaaatcctccacccctccaattgggaggggactgttcaccaccttgtggtaagggacaacaccctaaggctggtgccagtagttatgagtagcctaccaccccctcccttacagtaacccccaccccttcaggatcagtcaagggaaagcactagaacccctgggtagggaaagaaaggagggaaaaaccataaaaggaatacttataatgtgaaggtttgtaaatagtccatgatgatgtcgtggcagagtctgatttctatatagaggtgacnnnnnnnnnaagtactgtgcaagctctgtgcttctataatgtgggaaatggcttggggaggatggcccctagcttaggaagactgttgtgttatttgttcaatttcaataaaatgatttgtagatcctgcaaaaaaaa

SEQ ID NO: 15188 - DNA, 528 bp, Homo Sapiens
cgaaacatgtgtggggatagctaacaagcgtattagcatactatggagactatagagaacccagtatctctttcacacaggctattcttttcctcccacctgtacttctcttccagttctttatttgcttacctcttgaattagggcagcagctgctgcagaaggtcttttactgcatctcgctctttcactgctgtgctttcattggaaagaatggaagttagttgtgtcccctgcatgtaggaccagctgaagctgaattatagcttttccttctggactaattttctggcctaaaaagaagcatgagggcagttagatgacgacactcacactgtgggaataaccatacagtaagttacttctcccaagatgattcaggattcctttgggctttaactgccctattccaacactgatgcttttgtagaatgcactcttcttaaatgatcccatacaaccagagcatgctcatcaaactcactaacactctgcttccttctttggtactcttgtcgagcactgtag

SEQ ID NO: 15189 - DNA, 829 bp, Homo Sapiens
  misc_feature (50)..(60): n is a, c, g, or t
tcagctctatataggatacaacgaaacattctgaagatagaaagtagttnnnnnnnnnnnggcaaagaaataaatatcaccaaagaaaaaagattaatggtagcttaaatataaaactaaatcaccagttaattaaactatacagatctaatacaaaccaaaaccagcctgaaagacccaaccttaaaaaatgctaaaaaataaggcataaatctgcataatattgagttttatttccattctctcctttccctctactatgtatgctttacctgatctgcctctaggggcttacaagaaaacggtttccggtttccgtcttcaatttgacctcaaatgtcctgagcaaagtttttgttattctgctgagggttcttttgttggtaagctttagacatcattatttctactaattcagtagttttgatcgtagcgccaaatttaaattcttccactggttcttctggaaggaattaaaacttttacagtgccttgcctgcacagtattatgtttttaaaaaagaaaacccaagcaaaatctattgcttaaagaggtttcttattttttaaacaaacagaataactcttgacaattttaaaaccttgggagaaacagttcattagaacttcattttcttaccgtgaagaattaaatactaaaaacctgttctgaagcacttggttaattttctctcccagagtctaataaagcacatgtgaaagagccatttgttttagtcagaaatacatcttatgttcttctacttctaagtactcagtatgttctttaggactcattttgaagatgcaccaggcttttctcattccg

SEQ ID NO: 15190 - DNA, 429 bp, Homo Sapiens
gcagggttacgctcgacaaactccaccgggtggatacaaactcttctcacaagacagcagggtgtgtccgtgaagtcttatgccccccgtacactgccaggggtcagcacttgctttacgggcacttgtgttaattaacccctcagctaacgggcagagaagggaaaactggtgggaaggtggaagacaaaggtcaaggcgacaccacgtgtgcgcccccctacacctgccacccccacacggtctacaaaccaacagttctgcgacaaacgctctcacgcctgtgcgtccactgcctgggcggctggtcctggtccactcacctgagcaccgcatttcggaagactgggcttctctggcttcatcttcatcttttctttaggcttaggcttctgttctttacctgagcttagaaacttcattgtcgct

SEQ ID NO: 15191 - DNA, 574 bp, Homo Sapiens
atgtcctgccttctaagacaaaaaattaacttctatctggttctggtaactaggcccctggctttctcttatttaactaagtctatgccctgatgcccacccagcatcctaactaagccactcctgggagcctctaaagaggaactggctatggcatcagggggaccctgcacacttccacataggccagatagccgaagcttaaatggcaggtgaggtaagtgttggcagaataccctgcagtccctggaacttgagaacttgggaagatttcgaggcacttctacaaggatgtttctcgcctacttccctctcttccaaagaggctgtcatgagatggtttttcattgccacccaggctctgatgaagtcttaagctttctgcctgttccctccttagggtacagaagcaggctatagaaccacttaactgctgcatggatcagctcctcaaaaacagagtaccccactgctcacattgcatcgccatctgacccttttgttatgattcgttttgttctgttttgagatggagtctcactctgtcgccccagctggagtggaagggtgcaat

SEQ ID NO: 15192 - DNA, 268 bp, Homo Sapiens
cactattgtaagtgcttcatcatgtactgattcatttaatactcacagaaatctgtgagatgggtattattcttatcctcactctatggattaaaaaaactaaggcacaaagtggttaagctccttgcctgagattatagactgtaagttgaacgtgagcacttggaatacagagttcatgctgtaaactaccacactatagggcctccaatatgataatttataaaatatttgaataaaaaatgaatactagttccacattttaaaa

SEQ ID NO: 15193 - DNA, 654 bp, Homo Sapiens
  misc_feature (280)..(280): n is a, c, g, or t
  misc_feature (382)..(382): n is a, c, g, or t
tacagccctaacttatggcgagctgggtggggcgacagcttgtgcgcacttgggccccctggcatggcggcgaaggtggacctgagcacctccaccgactggaaggaggcgaaatcctttctgaagggcctgagtgacaagcagcgggaggaacattacttctgcaaggactttgtcaggctgaagaagatcccgacatggaaagagatggcgaaaggggtggctgtgaaggtggaggagcccaggtataaaaaggacaagcagctcaatgagaaaatcntcctcgtccgcagcgacatcaccaagctggaggtggacgccatcgtcaacgccgccaacagctccctgctcggaggcggtggcgtggacggctgcattgcantcgcgccggccccctgcttaccgacgagtgccggaccctgcagagctgtaagactgcaaggccaagatcaccggcggctatcggctcccggccaagtacgtcatccacacagtggggcccatcgcctacggggagcccagcgccagtcaggctgccgacgtccgcagctgctacctgagcagtctggacctgctgctggagcaccgcgtccgctcggtggcgttcccctgcatctccaccggcgtgtttggctacccctgtgaggcggccgc

SEQ ID NO: 15194 - DNA, 1955 bp, Homo Sapiens
  misc_feature (49)..(49): n is a, c, g, or t
  misc_feature (95)..(95): n is a, c, g, or t
agagccaggatgtcggtgaatcaggcctggcatttcgggcagcaagccnagcccttcaactttcttgggggcaacctggaatcaacctttctccnactgaccatgtacctcccttcgttcttgtagaagcgctggatggtggagcttgaagtgcgcagccccacaaaagccttgggcagcggtctgggttgtgcaggaagcggatcgtccaagggaataagcccatctgtgagagacagggtctgcaacaatcttcaaggcgctgccagtcccagtacatataagtggctcgccgttacagtccagcctccacagtcagcggggttgaagccatctcgtaagacattgggagctgcccactcagtgctgatcatgacattgtgtcgaggctggtaccagaagtcatagcccaaacggtgcagcacccccaggtctctcgcaatgtccccttcacgctcgatcgtctccccatccagcagcactgaccccctttgccaattgcccttgacgtctcccagggagctgatcatcacttccccgctggccaggcagtggctggtgtggagaaaggccagttcgcacttggcatggatgtcaattgggctcaatgaccttgtgcagctttggggcccggggctcagagcccacgtccaccacatagatgcgagaggagatgagactgggcagcaccagcttggtgcgcgacttggtgctatcaccgaagcagctgctgcaggtgttccatcctgagtgatgcagctcgtccttcaggttgggcatgggcagccggtggatgacctggcaatactggggagacattggggtcaacatccacagtggccagataatctggggcctcagatgcctgtgtttcggtaaatgcagggcaggtagacgatctcttccctgggtcctttcatggcctccagaggggtggagtagccgggtccacaattcccacatttcgtagccatgctgccgactggtacactttgatcccggcaggtttgctgtgctggagtgtggtgggtacacctggggcaccatatctgggccaagctgcatgctcatggaggaatcaggggccattccaaggtcataagaaggcaccatggtaggcatctggagctctggggtaggaagtggttggtccctttccacggtcatcttgatggtagctgggacataacccctgccatccttacccatctgttcaggcttgtagtggctccggaaagcctcatccttgggcttcttgggatagagatttttgagctgagcaagatcccggattcggtcccccagtgagcgaatggacaggtctttggcagagaatggctggatgttctctatctgtggagagccatcctggccccggatgacatgggcaatggtgatgcccccaatctctgagtcgctgaagcggaggagaaaggttccgtcgggctcattgagaagaaggctagtaacgtactgtttgctgatgaagccaatgatcagccggtcagaccagtagctccggagacagcgtttggtgaggtccaggacaccatcaaaccactgccaaaaggtgaagccacggcccagcaggatctccttgttgaactgcgaccaggacacagaacggtgctggaaggcctccatactgaggctgttgtcattgaagatcttctgggccaggaagaggaagtgctctgggagcagcccccggttggtccccacctcagccatgaacttcaggttcagagtttcacacatcttctcccagggcacacgctcagccaccacaaagggcacgcggtccatctcagagaaggcattgtcccacaggatagtggctttggcattgttgaaatggtcgccaatccgaccatttcaaatgaggtacaacaccacaccgtggctcccctcttggagaattacaaagtacagtagcttagccagttgtacagtga

SEQ ID NO: 15195 - DNA, 614 bp, Homo Sapiens
ccagaatgttgaacagtcgctctcctagcccttctctgtgcctcagcctctggcaatgcattcaggccaggtcttcctcctatagtggagagtatggaagtggtggtggaaagcgattctctcattctggcaaccagttggacggccccatcaccgccctccgggtccgagtcaacacatactacatcgtaggtcttcaggtgcgctatggcaaggtgtggagcgactatgtgggtggtcgcaacggagacctggaggagatctttctgcaccctggggaatcagtgatccaggtttctgggaagtacaagtggtacctgaagaagctggtatttgtgacagacaagggccgctatctgtcttttgggaaagacagtggcacaagtttcaatgccgtccccttgcaccccaacaccgtgctccgcttcatcagtggccggtctggttctctcatcgatgccattggcctgcactgggatgtttaccccactagctgcagcagatgctgagcctcctctccttggcaggggcactgtgatgaggagtaagaactcccttatcactaacccccatccaaatggctcaataaaaaaatatggttaaggctaaaaaaa

SEQ ID NO: 15196 - DNA, 1555 bp, Homo Sapiens
ggggtcgtgggggattgtgggaaaagatggcggctgccgcacaatcccgggttgtccgggtcctgtcaatgtcacgttctgccattactgcaatagccacatctgtgtgtcacggcccaccctgtcgccagcttcatcatgccctcatgcctcatgggaaaggtggacgttcctcagtcagtgggattgtggccactgtgtttggagcaacaggattcctggggcgatatgttgtcaaccaccttggacgcatggggtcacaggtaatcataccctatcggtgtgataaatatgacatcatgcaccttcgtcccatgggtgacctgggccagcttctgtttctggaatgggacgcgagagataaagattctatccgacgagtagtacaacacagcaatgtggtcatcaatcttattggacgagactgggaaaccaaaaactttgattttgaggatgtttttgtgaagattccccaagcaattgctcaactgtccaaggaagctggagttgaaaaattcattcatgtttcacatctgaatgcgaatattaaaagctcttctagatatttgagaaataaggctgttggagagaaagtagtgagagatgcatttccggaagccattatcgtaaagccgtcggacatctttggaagagaggatagattccttaattcttttgcaagtatgcatcggtttggtcctataccccttggttccttgggctggaagacagttaaacaaccagtatatgtcgtagatgtatccaaaggaattgttaatgcagttaaggatcctgatgccaatgggaaatcctttgctttcgttggtcccagtcggtacctccttttccacctggtgaagtacatctttgctgtggctcacagattgttcctcccattccccttgccgctttttgcctatcgatgggtagcaagagtctttgaaataagcccatttgagccctggataacaagggataaagtggagcggatgcacatcacagacatgaaattgcctcacctgcctggcttagaagaccttggtattcaggcaacaccactggaactcaaggccattgaggtgctgcggcgtcatcgcacttaccgctggctgtctgctgaaattgaggatgtgaagccggccaagaccgtcaacatttagtgcctcctgagcagctcttggttttggcgtcttttgggtcggcccatgtggtttgagcacccagccaggcggtctctttagaggatcctgtacacagttccactattaaaacatttcaggttgaattctgcagtattttcttccttgatttacaaaatgagaaatgtagtcacttagaacttgagcatgatttttgttaaacatatttaataatgatatatatactatttattctctgaaatgccagagagtttgaattttcctatgacaaaccacttctagcatacgttctagaagacaaggaccctttttaatgtcaaagtattgtaaagaccccaagtgatatgtgattgttttttaatttccattaaatgagagagcatacagtatcccct

SEQ ID NO: 15197 - DNA, 1582 bp, Homo Sapiens
atgggattgactctttcctggacaaagtggatgaagtatcaactgaacctatcccagagtcatggaggtctgaagtcactttttccactcctgccttatacatttatacttctggaaccacaggtcttccaaaagcagccatgatcactcatcagcgcatatggtatggaactggcctcacttttgtaagcggattgaaggcagatgatgtcatctatatcactctgcccttttaccacagtgctgcactactgattggcattcacggatgtattgtggctggtgctactcttgccttgcggactaaattttcagccagccagttttgggatgactgcagaaaatacaacgtcactgtcattcagtatatcggtgaactgcttcggtatttatgcaactcaccacagaaaccaaatgaccgtgatcataaagtgagactggcactgggaaatggcttacgaggagatgtgtggagacaatttgtcaagagatttggggacatatgcatctatgagttctatgctgccactgaaggcaatattggatttatgaattatgcgagaaaagttggtgctgttggaagagtaaactacctacagaaaaaaatcataacttatgacctgattaaatatgatgtggagaaagatgaacctgtccgtgatgaaaatggatattgcgtcagagttcccaaaggtgaagttggacttctggtttgcaaaatcacacaacttacaccatttaatggctatgctggagcaaaggctcagacagagaagaaaaaactgagagatgtctttaagaaaggagacctctatttcaacagtggagatctcttaatggttgaccatgaaaatttcatctatttccacgacagagttggagatacattccggtggaaaggggaaaatgtggccaccactgaagttgctgatacagttggactggttgattttgtccaagaagtaaatgtttatggagtgcatgtgccagatcatgagggtcgcattggcatggcctccatcaaaatgaaagaaaaccatgaatttgatggaaagaaactctttcagcacattgctgattacctacctagttatgcaaggccccggtttctaagaatacaggacaccattgagatcactggaacttttaaacaccgcaaaatgaccctggtggaggagggctttaaccctgctgtcatcaaagatgccttgtatttcttggatgacacagcaaaaatgtatgtgcctatgactgaggacatctataatgccataagtgctaaaaccctgaaactctgaatattcccacggaggataactcaacattttccagaaagaaacttgaatggacaggccacttgataaaatccaactttaatttgattgaagattgtgaggaaattttgtaggaaatttgcataccagtaaagggagacttttttaaataacagttgagtctttgcaagtaaaaagatttagagattattatttttcagtgtgcacctactgtttgtatttgcaaactgagcttgttggagggaaggcattattttttaaagtacttaataaattaaatgaacacc

SEQ ID NO: 15198 - DNA, 759 bp, Homo Sapiens
  misc_feature (710)..(718): n is a, c, g, or t
ccacaaaccccctcgacattgttttgctggagctggtggctggccttcctgaggggtacatgttcatatggaatggtgaggtgtcacccaacctctttgaagaaatcgacaaggatggcaacggagaagtcctcctggaagagttctcagagtacattcacgcccaggtggcatctggcaaagggaaactcgctcctggctttgatgctgagctgattgtgaagaatatgttcaccaaccaggaccggaatgcagatgggaaggtcacagccgaggaatataaactcaaagaccaggaagccaaacacgatgaactctaaacctggcatgaaccagatggtgccaggagtacgtgacaccaagccacctgtgtggcaagacgtgcagtgagggtgcaagggtctcttagaagttgcatcattagccagtagtaggtgggtcacatagtacctggtgtacacatcggggtgggttgatatatggggtgagaagtttgggctgatcgccagtgatagtaaacaaaatctgtgcagagggccttagcatgggatgtgtccagtattgaaaaggctgcactgccaaccatgatttgtgagccttctgggaaattttgttattaaaggaatatatagtgtcagacggaagttataatcatcttggaggaaccataagaaaaggtgtccagggtatctatataaagagggttaaannnnnnnnnaacttgctggttaaaacattttagaaatattctaagagacg

SEQ ID NO: 15199 - DNA, 1368 bp, Homo Sapiens
  misc_feature (141)..(207): n is a, c, g, or t
  misc_feature (327)..(365): n is a, c, g, or t
  misc_feature (909)..(909): n is a, c, g, or t
  misc_feature (915)..(915): n is a, c, g, or t
cccaccaccttccaccacctccaccgcccacagcccacgtggcccccaggagcacagcaggggggcgcccagcagaaagccatggcggccatggacggccagagatgagactggacgccgccgggcgctgggctggagctnnnnnnnnnnnnnnnnnnnnnnnnnnnnnnnnnnnnnnnnnnnnnnnnnnnnnnnnnnnnnnnnnnnttcccgaagatcgcactggaagattttataaaagaatttttgtgggtcggggggacagtaaacttcctgggccacgtgggtccttcaggagtttttcaggcaagtttttcctctgttttnnnnnnnnnnnnnnnnnnnnnnnnnnnnnnnnnnnnnnnctaatgtgcgtgagaatgggcctggcacacctggggtgctcgggggtagggctgccatgctgcagagctgatggagtgatgttgtgggcacaaggcatctgtcagctgcctcctttaacagccatgccttctggaatctggaagaggacaccactcctgcagtcaccgggcagccacatagcagctgcaggtcccaggagggcctgaggtcaaagctgtggaaggccctcttggtatcagggctctctccccatggcctcttccccacctctgattgctggttgtggccccatagctcatcacccctgtctcctgctgaatgtgcagggctgatgtggcactgaggagctgactttggtcaaaggccaagctctgcccagcaagggacttgactgcccctcccgctgcgggtccaggtccaaagtggagagcctgccctttgggtttagttcccgaaatcagaatcccattctcaccaagggcgaaaattttaatttaaaaacttaaaaaagagaattttatacccgagcaaccccgacgaagnaaaccntcccttggtcggccgccctcggccctcgaaaaacttttctaaaaccattccttttggccgggcgggccccaggtagggtaagtggaacatggcccatagcctgttttccctaggaagatccctgggtacatggactaatggctttgggaattcctcacccaaataaaaaaacgccccggggggggaaaaccgaagcggttcttgaaccaaattcccggattggaagttccctgaagggccatttactgggaatcctattccacaggggaagtcccaaagccagagccttggattattcaaaatttaacggcccccgggcccctggccacttccatttcggaaaatacctggggtgggaaatttccctttaaaggccttttcctgggcgcgactctggggaaagccccttccaccaaaaggggggatagtggatgaaaacccctgaaaatcccg

SEQ ID NO: 15200 - DNA, 656 bp, Homo Sapiens
  misc_feature (293)..(324): n is a, c, g, or t
  misc_feature (434)..(447): n is a, c, g, or t
gcccgagagtctctctcctttggtacccccgggttccctgagctccgaggaaactgatccttcatgtttcagatagctgttgtgtttgttctctttggtccggtgccgggccggtggaaggtccgagcaggctccaggaggctctccagtagtctagctggaccttgctgtgtcgcccgcaggcagccctgcagacaccggtgaggtgggatgatttcaggaggtcccagcccgggactgcccgcccctctgccctgggaaccagtccaaggggctgtcagttgaatttgccnnnnnnnnnnnnnnnnnnnnnnnnnnnnnnnnatttggttctccttcttaaggaattatgaagctaagaaaagttttgtgtttttgggggttggtggacaaagttctagctgattaaatatggtctaacttattgatactannnnnnnnnnnnnnaatgttgtactgtggagaaaaactattttgagccatggggttggtgtttacaagaactttccacttttgccaaaatgttacaattgaaaggcatctatctgcgtcttcagtttcctgatattttcttaaaagatctagtgtcctttttgtacactaaacaggtgaatgctgacttttttcattctccaataaatttcactgaactgaaa

SEQ ID NO: 15201 - DNA, 872 bp, Homo Sapiens
tcatcccatttcctggctgaaattggtgacaccaggccttccgatagacagccccaatgacagcggtcttgatcctcatgccactgacgaagcagatgtggaagtactggtgcagcacgagggtctgcaggcaggcagtgacaaacagcagcacggtgtagaagtagccctgccagtctggggccttcgtgtcgttcacgaacttgggtgccgatgaatagctcgctattcatcggcacctccacccgctccttctgccatcccgagccccatgaacgagacgccctcctggccggctccctgaacaacaccctgcacctttccaatgagcaggagcgtggcgactggcctggcgaggctcccaagccccccgagccctattcacaccacaaagcgcatggccgcagcaaacacccatctggctccaacacccagcctgggatggagagcgacccctacgaagcagaggactttgtgtgtgactaccacctggacacggccttgaagccaaccttctttggaggagcaacagcagcagccttggccgacgcgtccaactcccaaggctgccgtggagggcaggggggtggtgcttgcctggatgtggccccgagtgcctcccctccctccctctgtgggggagtctcccgcctgaacctgaagatggagcagggcccccgcttcgccctggagcctcttcctgtgcctggctcaagctggctgcctgtcagtcttggggaatctggcccaggtctcctcagcctctgccccagttctgggagaagtttctactggtgtatattttttactggaaatgagccttttaggaatgaatgtagactggtttgtattaaaatgtgtcaattgctaag

SEQ ID NO: 15202 - DNA, 420 bp, Homo Sapiens
  misc_feature (100)..(109): n is a, c, g, or t
agttaactgtaaatattttaatgttagtttgctcatctatgatctgagatcatgccgaagtgagaaaaatctccccaaaatacaatttaatgcattgggnnnnnnnnnnctttaacagtaattccagccacaatctttagatcacccttgtaatgtgttacgggtccatttttcctggaatcgtttaatctaaagcagtttcccctgttttggagattttgtagttaattttaattttggctattgtttggaaaagatgagctgtctgtgtagatatgaagtatagttttttccataaaacagatgtttattttgtattaaaaaataccactgtacttgttttacaccatttgtatacatgtggtgatattaatgctaaactgtaaaattcaggaattaaaatgtgaccctgtaaatcca

SEQ ID NO: 15203 - DNA, 1660 bp, Homo Sapiens
  misc_feature (1290)..(1321): n is a, c, g, or t
attagaatgtttatctcctgcaacgagccggacgtttcgaatagaggaaatccctttggaccaggtggacatagacaaagagaatgagatgcttgtcacagtggcgcatttccacaaagaggtcttcggaacgttcggaatcccgtttttgctgaggatacaccagggcgagcattttcgagaagtgatgaagcgaatccagagcctgctggacatccaggagaaggagtttgagaagtttaaatttgcaattgtaatgatgggccgacaccagtacataaatgaagacgagtatgaagtaaatttgaaagactttgagccacagcccggtaatatgtctcatcctcggccttggctagggctcgaccacttcaacaaagccccaaagaggagtcgctacacttaccttgaaaaggccattaaaatccataactgatttccaagctggtgtgttcaaggcgaggacggtgtgtgggtggccccttaacagcctagaactttggtgcacgtgccctctagccgaagtcttcagcaagaggattcgctgctggtgttaattttattttattgaggctgttcagtttggcttctctgtatctattgactgccctttttgagcaaaatgaagatgtttttataaagcttggatgccaatgagagttattttatggtaaccacagtgcaaggcaactgtcagcgcaatgggggagaagaggttagtggatcgggggtccctggctcaaggtctctgggctgtccctagtgggcacgagtggctcggctgccttcctggggtcccgtgcaccagccctgcagctagcaagtcttgtgtttaggctcgtctgacctatttccttcagttatactttcaatgaccttttgtgcatctgttaaggcaaaacagagaaactcacaacctaataaatagcgctcttcccttcattgtgtgcattgtcggcccttcctcgggttctcctcctccagctgcctgggggctttttaataaacttgtctcacctcgtcagccactactgtctgcagcccctttgcaaagtggatgcactgaatacagtccggacagacattgtgggggtctttttattaaatcaagaacattgttaaattcaattaaggtttactctgctgccttggcagacttacgatctcaacagttcatacgagcaggtgaaaggattataaatagaatttcgttaaagtggaacagacgacaagaaagccttttagcaagagggcatgctcactagtggttagtaagctgtcgactttgtnnnnnnnnnnnnnnnnnnnnnnnnnnnnnnnntgaattgtatatttaatgaatgaacatgtacaatttgccactgggaggaggttcctttttgttgggtgagtctgcaagtgaatttcactgatgttgatattcattgtgtgtagttttatttcggtcccagccccgtttccttttattttggagctaatgccagctgcgtgtctagttttgagtgcagtaaaatagaatcagcaaatcactcttatttttcatccttttccggtattttttgggttgtttctgtgggagcagtgtacaccaactcttcctgtatattgcctttttgctggaaaatgttgtatgttgaataaaattttctataaaaattat

SEQ ID NO: 15204 - DNA, 976 bp, Homo Sapiens
  misc_feature (938)..(938): n is a, c, g, or t
ctaagcgatcccagtttatcctgcacagtgaagcgctccgggggcagtttgagcggagttgaggcagaagccagtcaggatggtggtgccttcgctgaagcttcaggacctcatcgaaagagattcgcggggccaagactcaggcccaggagcgggaggtgatccaaaaggagtgtgcccacatccgggcctccttccgcgacggggacccagtgcacaggcaccggcagctggccaaactgctctacgtccacatgtttgggctaccccgcccactttggacagatggagtgcctgaaactgatcgcctcctccagattcacagacaagagggtgggctacctgggggccatgcttctattggatgagaggcacgatgcccacctgctcattaccaacagcatcaagaatgacctgagccaggggattcagccagtacaaggcctggccttgtgcactttgagcaccatgggctctgctgagatgtgccgagacctggccccagaggtggagaaactgctcctgcagcccagtccctacgtgcgcaagaaggctattctgactgcagtgcacatgatccggaaggtccctgaactctccagtgtcttcctcccaccctgtgcccaactgcttcatgagcgtcaccatggtaaggctgtggggccccccatcctttgcttcaggtctatggacagaagaattgaaaatcggatgggaaccccagctcacaggagaagggtagtgcacacacacaggcacacacgcaatagactctcttgcccctggcccccaccattcacttccccgacgctgaccccaggcatcctgctgggcaccatcacgctgatcacggagctctgcgaacgaagccctgcagccctcaggcacttccgaaaggtgggctggtgaaggggcaggccctgtgcctggaagacagngtcagttgggaaggaatggtgctttagctggagaggat

SEQ ID NO: 15205 - DNA, 918 bp, Homo Sapiens
  misc_feature (530)..(564): n is a, c, g, or t
  misc_feature (713)..(779): n is a, c, g, or t
tccaatttattttcttcctgcactactgtttgtatttgatcctttgtctattcagtcacttaattagaaattaaattgtcaagcctcttattctgacttcaaagaattaatgtatcttccaacaataaaatcacttctgattttaatctaggaaaacctaaattgtggctatggatccaaagctgtttgtttctttgaatatcaatattttcaacaggatcttgtatttaaaattcccacctacattgttaaatatgttattttttcatatctcttttggttttgataatctgaagtgtttttttctcgttttggccttccaaactgcatttggttaggtgaattaagaaaaatattgccatcaagaattacttgtgttttcacagagatagactctttgctttatagagattgttgtgtatttaatatgaatatcccagctttagaaaagaagtaaactggatacaaaaagttccattgaggaacagttatttacagtataaaagatttgtttactttacaaaaggctnnnnnnnnnnnnnnnnnnnnnnnnnnnnnnnnnnnatttaaagtgactcagtgacagctggggtggaatggcaagaacacttacaaacaaactcatgggctgctgcaaatttgaagatacagttgggtaaataaaaccaataacgacacttaataccaatataaaaatagccttcagctgttgnnnnnnnnnnnnnnnnnnnnnnnnnnnnnnnnnnnnnnnnnnnnnnnnnnnnnnnnnnnnnnnnnnngtgcgaagcgcagtataagcacaaacccaaagcaacaatgcgacacacagccacagatgacgacacaagaagcagacatataaacacaaagaaccacagtcaccccaaagtacgacaaaagaaggacagaagtaacacg

SEQ ID NO: 15206 - DNA, 714 bp, Homo Sapiens
tagcggacggagcgacgatggcgcgcctcaccctgtctctaccagggaggtgctagcttggtgaggttactcctgctcctccaacctttttttgccaaggtttgtacacgactcccatctaggctgaaaacctagaagtggaccttgtgtgtgtgcatggtgtcagcccaaagccaggctgagacagtcctcatatcctcttgagccaaactgtttgggtctcgttgcttcatggtatggtctggatttgtgggaatggctttgcgtgagaaaggggaggagagtggttgctgccctcagccggcttgaggacagagcctgtccctctcatgacaactcagtgttgaagcccagtgtcctcagcttcatgtccagtggatggcagaagttcatggggtagtggcctctcaaaggctgggcgcatcccaagacagccagcaggttgtctctggaaacgaccagagttaagctctcggcttctctgctgagggtgcaccctttcctctagatggtagttgtcacgttatctttgaaaactcttggactgctcctgaggaggccctcttttccagtaggaagttagatgggggtctcagaagtggctgattggaaggggccagcttcgtttcaggggtctgccgtccttcctggtcagagaaggcgagcgtgtttctctagcctgtgatgtctcctgctgttaataacactttctca

SEQ ID NO: 15207 - DNA, 579 bp, Homo Sapiens
gggcagcacatctcaagaaacagactcttgtacacctataacatctgaggtgtcagacaccatggtgtgccagtcttcctcaactgtaggtcagtcattcagtgaacaacacattagccaacttcaagaaagcattcgggcagagataccctgtgaagatgaacaagagcaagaacataacggaccactggacaacaaaggaaaatccacggctggaaattttcttgttaatccccttgagccaaaaaatgcagaaaagctcaagggtgaagattgctgaccttggaaatgcttgttgggtgcacaaacatttcactgaagatattcaaacaaggcaatatcgttccctggaaagtcctaatcggatctggctataatacccctgctgacatttggagcacggcatgcatggcctttgaactggccacaagggactatttgtttgaacctccttccgggggaagagtcccctcaagatgaaaaatccctttggcatttgatccaaaaacttctggggaaaagggccctcccaagctcattggtgggcgggaaaaaatttccaaggaaattttttccccc

SEQ ID NO: 15208 - DNA, 1103 bp, Homo Sapiens
cggcgcggcagcggcaggaccgccgtggcgcctagagtagcgacccggggggagcgcaggggcacgctggctgcagggacccggtgacagcgtgagaggtactaggttttgacaagcttgcatcatgcgtgagtataagctagtcgttcttggctcaggaggcgttggaaagtctgctttgactgtacaatttgttcaaggaatttttgtagaaaaatacgatcctacgatagaagattcttatagaaagcaagttgaagtagatgcacaacagtgtatgcttgaaatcttggatactgcaggaacggagcaatttacagcaatgagggatttatacatgaaaaatggacaaggatttgcattagtttattccatcacagcacagtccacatttaacgatttacaagacctgagagaacagattcttcgagttaaagacactgatgatgttccaatgattcttgttggtaataagtgtgacttggaagatgaaagagttgtagggaaggaacaaggtcaaaatctagcaagacaatggaacaactgtgcattcttagaatcttctgcaaaatcaaaaataaatgttaatgagatcttttatgacctagtgcggcaaattaacagaaaaactccagtgcctgggaaggctcgcaaaaagtcatcatgtcagctgctttaatatactaaatgcattgtagctctgagccaggtctgaagaactgttgcccaattcaacagtgccagcattccaactttgttaaacctaccaacatcttaaatggactttcctgtggtggtaccctttaagaggcggatgaaagctactatatcagtttgcacattctaatcactttccagtatcacaagagagatttttacttatataatagtcctagagtttgcagctggtaaaaccagaggctacatccagtattacttctaagagacattcttcattcaccaatgttgtacatgtatgaaaatggtgtactgtatactttaacatgccccatactttgtattggaagagatacaataatgtaaatcctataaagcaccactattttagcataatacaaagacaatccaagggctatctatat

SEQ ID NO: 15209 - DNA, 766 bp, Homo Sapiens
  misc_feature (30)..(31): n is a, c, g, or t
  misc_feature (174)..(174): n is a, c, g, or t
gtaaaagttctgatttccagaagtttaaannttcatcactttcagctgcatgaagttgtgtgtcatccgcatctgtcatgctgctctcctgggattcatctgttcccatgatctgttcttcttgggttattggctcctcatcatctggaagataacgcttatcaattgcctctntaatctggttattggctcctttaggatctaaatccatagcccaagagaaattcatcagggcgaggtgcgtcagacctaagcttctcgtaaacctttcctattaagaagtaaacgagggattctttgggaacaatttgtttcaattcttcaagttcttgtaaagcagacttatatttttcatttgcaaataaaactgaggctctgtgaaatttgcatagagggttcttgggatcaatgacaatggcttggtttagggtatccaaagccttctctgattttttcagtgcatgttgaactactccaatgtggcaaagtaaaactgaacttggagggttgatatcaagcgcttttgggaaatgcatttctgcaaggctgaatttctctggctggtaataaatcattcctaaaccataccatgcattataatgtctaggattgactctgatagcatttcgaaaacaagctaatgcttggtccaattcttcagttaagacaaactcatgccctaatagagtataggcataagcgtaattcggatcaactgggatagctctctggaagaatttaattgcaatatcatgttcccgttgca

SEQ ID NO: 15210 - DNA, 1389 bp, Homo Sapiens
  misc_feature (989)..(989): n is a, c, g, or t
ggggcctagcctgcgagtgttctgagggaagcaaggaggcggcggcggccgcagcgagtggcgagtagtggaaacgttgcttctgaggggagcccaagatgaccggttctaacgagttcaagctgaaccagccacccgaggatggcatctcctccgtgaagttcagccccaacacctcccagttcctgcttgtctcctcctgggacacgtccgtgcgtctctacgatgtgccggccaactccatgcggctcaagtaccagcacaccggcgccgtcctggactgcgccttctacgatccaacgcatgcctggagtggaggactagatcatcaattgaaaatgcatgatttgaacactgatcaagaaaatcttgttgggacccatgatgcccctatcagatgtgttgaatactgtccagaagtgaatgtgatggtcactggaagttgggatcagacagttaaactgtgggatcccagaactccttgtaatgctgggaccttctctcagcctgaaaaggtatataccctctcagtgtctggagaccggctgattgtgggaacagcaggccgcagagtgttggtgtgggacttacggaacatgggttacgtgcagcagcgcagggagtccagcctgaaataccagactcgctgcatacgagcgtttccaaacaagcagggttatgtattaagctctattgaaggccgagtggcagttgagtatttggacccaagccctgaggtacagaagaagaagtatgccttcaaatgtcacagactaaaagaaaataatattgagcagatttacccagtcaatgccatttcttttcacaatatccacaatacatttgccacaggtggttctgatggctttgtaaatatttgggatccatttaacaaaaagcgactgtgccaatcccatcggtaccccaagagcatcgcatcacttgccttcagtaatgatgggactacggcttgcaatagcgtcatcatnatatgtatgaaatggatgacacagaacatcctggagatggtatcttcattcgccaagtgacagatgcagaaacaaaacccaagtccacctaatcatcctgtgaaagtggtttctctatggaaagctttgtttgcttcctacaaatacatgcttattccttaagggatgtgttagagttactgtggatttctctgttttctgtcttacaagaaacttgtctatgtaccttaatactttgtttaggatgaggagtctttgtgtccctgtacagtagtctgacgtatttccccttctgtcccctagtaagcccagttgctgtatctgaacagtttgagctctttttgtaatatactctaaacctgttatttctgtgctaataaacgagatgcagaacccttgg

SEQ ID NO: 15211 - DNA, 1301 bp, Homo Sapiens
  misc_feature (179)..(268): n is a, c, g, or t
tcctgtgaagtaccctcctggctgtgacacctggtgcgggcctggcctcactcaagaccaggctgcagcctccacttccctcgtagttggcaggagctcctggaagcacagcgctgagcatggggcgctcccactcagaactctccagggaggcgatgccagccttggggggtgggggnnnnnnnnnnnnnnnnnnnnnnnnnnnnnnnnnnnnnnnnnnnnnnnnnnnnnnnnnnnnnnnnnnnnnnnnnnnnnnnnnnnnnnnnnnaagtgagtatgcttggggccctgcattggcctggcctccagctcccactccctttccaacctcacttcccgtagctgccagtatgttccaaaccctcctgggaaggccacctcccactcctgctgcacaggccctggggagcttttgcccacacactttccatctctgcctgtcaatatcgtacctgtccctccaggcccatctcaaatcacaaggatttctctaaccctatcctaattgtccacatacgtggaaacaatcctgttactctgtcccacgtccaatcatgggccacaaggcacagtcttctgagcgagtgctctcactgtattagagcgccagctccttggggcagggcctgggcctcatggcttttgctttccctgaagccctagtagccggcgcccatcctagtgggcacttaagcttaattggggaaactgctttgattggttgtgccttcccttctctggtctccttgagatgatcgtagacacagggatgattcccacccaaacccacgtattcattcagtgagttaaacacgaattgatttaaagtgaacacacacaagggagcttgcttgcagatggtctgagttcttgtgtcctggtaattcctctccaggccagaataattggcatgtctcctcaacccacatggggttcctggttgttcctgcatcccgatacctcagccctggccctgcccagcccattcgggctctggttttctggtggggctgtcctgctgccctcccacagcctccttctgtttgtcgagcatttcttctactcttgagagctcaggcagcgttagggctgcttaggtctcatggcccagtggctggtctcacccaactgcagtttactattgctatcttttctggatgatcagaaaaataattccataaatctattgtctacttgcgattttttaaaaaatgtatatttttatatatattgttaaatcctttgcttcattccaaatgctttcagtaataataaaattgtgggtggaaattcttaaaaaa

SEQ ID NO: 15212 - DNA, 931 bp, Homo Sapiens
cctggaataaggcaagggggagtgtagaacagaccagaagcctgagccagacggagagccacctcctctcccagggacagacatggctcagcggatgacaacacagctgctgctccttctagtgtgggtggctgtagtaggggaggctcagacaaggattgcatgggccaggactgagcttctcaatgtctgcatgaacgccaagcaccacaaggaaaagccaggccccgaggacaagttgcatgagcagtgtcgaccctggaggaagaatgcctgctgttctaccaacaccagccaggaagcccataaggatgtttcctacctatatagattcaactggaaccactgtggagagatggcacctgcctgcaaacggcatttcatccaggacacctgcctctacgagtgctcccccaacttggggccctggatccagcaggtggatcagagctggcgcaaagagcgggtactgaacgtgcccctgtgcaaagaggactgtgagcaatggtgggaagattgtcgcacctcctacacctgcaagagcaactggcacaagggctggaactggacttcagggtttaacaagtgcgcagtgggagctgcctgccaacctttccatttctacttccccacacccactgttctgtgcaatgaaatctggactcactcctacaaggtcagcaactacagccgagggagtggccgctgcatccagatgtggttcgacccagcccagggcaaccccaatgaggaggtggcgaggttctatgctgcagccatgagtggggctgggccctgggcagctggcctttcctgcttagcctggccctaatgctgctgtggctgctcagctgacctccttttaccttctgatacctggaaatccctgccctgttcagccccacagactcccaaggatttggttctctgg

SEQ ID NO: 15213 - DNA, 415 bp, Homo Sapiens
ggtctgggctggggccggggaccgagagctggctgaggacacggggctagccaggtctgcgtacatgtcctccgagtccacgctgtgtgcagagctgctgctcgacgtagcactggacactgaggagacgctgctcacgctcagggacctggatcgggagctggaaccactatagctgctaccactgccactgccgctgccgcttagcgtccgcctcctggggggggtcctggctggccgctccttcctcctggcttcccgagggtctcctggcttggtgggctcggggacaggagcagtggttttggtggcctgtggtggggctggaggcggggccggcttcttcactgacttctctcctgctttcccgggcggcggggccggctctcccttggttctgatctagatcgcgagc

SEQ ID NO: 15214 - DNA, 1198 bp, Homo Sapiens
ggagccgggagaggagaaggaggtgggcacaggggatgggtatgaggtcatggccggggatggataagaggtagtaaccggggacgggtaagaggtagcaaccggggacgggtaggaagagagagaggaggtggccgaagaggccacaacacttttgtctgctttcttgtccttctgccgcaagtggatcttggtatgcctcttgcgttcatcgctcctggcaaactttcttccacagatgtcgcaggcgaagggcttttcgcctgtgtgggtgcggatgtgggtggtgaggtggtcgctgcggctgaagttgcgcatgcagatgcggcactggaagggcttctggcctgtgtggatgcggatgtggcgggtgagctcgtcggagcgggagaagcggcgatcacaggactccactgggcaagcgtaagggcgttcgtgggggggcgtcttgctgggccggttggggtacttgcgcatgcggctgggtttgatgagctgggactggtagctggtattgagggccttcaggtcctgggagcccgactgagtggcaaaggccttaatagtagacagaggggttagcgaaggctgctgggtgcggctctccaggccctggaagggcttctggtctggggtgcccaggcccagatccccctgctgctgtggaaacaggtagtcggggatcatgggaacctggaagccacccttggcggcagggtaggcaggaggcgggtactggagcgctgtccctgccgagcccgggaaggcctggctttgtggctcagggaaaatgtcagtgttcggcgtggggaaggtgggtgccgctgagtaaatgggactgctgtcgttggatggcactgcgcagctcaggggtgggctctgggaggcggaggcggaggaggccgctggagatggtgctgaggacgaggaggccggtgggttggtcatgctcactaggccactgaccaagctgaagaggggctcgggccacaaggtgttgccactgttgggtgcaggctccagggaaaagcggccagtataggtgatggggggcagtcgagtggtttggctggggtaactggtctccaccagcaccttctcgttgttcagagagatgtcaggaaaagactctgcggtcaggtgctcgtagggctgctcgcccgtgtccgcctgaggttgaagtgctgctcactgctgc

SEQ ID NO: 15215 - DNA, 642 bp, Homo Sapiens
  misc_feature (262)..(262): n is a, c, g, or t
ccccaatcacactaccttactagattatagagatgacatgtggaagattacaggcacaattgaagtgtttaactcagggggaaaacttctcaggagaatttgggaagtttcagtcgaacaacagtctactgtaggtcctataacaccactttggtaggacacttctctcctgtcattcacaatgtattggcaaaagatgtcttcgtggtactccggaagacaaaattctgaaatcagccgtgatgacctggttcatttttanctctccgtctggtgtttacagggagggtgtttgacccgaacaagcactgtggagtccaggacccggagagcaaaaggtcctgcacgcgatcactcacctgcaaggtgagacacactgacctctaacctcacttcccatgggctacacagcttattctgaccatcagttcgcattactttatttggccttgtgtgctttattttcctggataccagggaaagctacatttgaagtctcatttaaatgtgtttttatggccctcttatgcccacttctctttgttattatattgtgtgtgttccagactcactccctgatccaccgacggaccgtcccaggcaggcagaaagaattaggggcgttaaaaggtaccgagctca

SEQ ID NO: 15216 - DNA, 985 bp, Homo Sapiens
ctgcgcggggcgccgagacagggcgtgttcgctgttcagtgccggtgttgcaggagtgagggcagctggagtgcgttctgccgaagcttgtggttgcacgcccatcgtcttaggggctaccttccgtgaccatgtccaagtctctgaagaagttggtggaggagagccgggagaagaaccagcccgaggtggacatgagtgaccggggcatctccaacatgctggatgtcaacggcctctttaccttatcccatatcacacaactggtcctcagccataacaagctaacaatggtgccaccgaacatcgcagaactgaagaatttggaggtgctcaacttttttaataaccaaatcgaggagctgcccacacagatcagtagccttcagaaactcaaacacctgaaccttggcatgaacaggctgaacactttgccacgaggcttcggctccctgccagctcttgaggttctggacttgacttacaacaacttgagcgaaaattctcttcctggaaacttcttctacctgaccaccctgcgtgcactctatctaagtgacaacgatttcgaaatcctgccgacagatatagggaagctcacaaagttgcagatactcagccttagggaataacgacctgatctcactgcctaaggaaatcggggagcttacccagcttaaagagctccacattcaggggaaccgcctcaccgttctgcccccagaactaggaaactctggatttaactggccaagaagcaaggtattcgaaagcagagaacaatcgctgggtgacccccattgcagaccagttcccagcttggcgtgtccccatgtcttagcgtatatcccgttctgagacattcaaattacctctacggtagacacatgcaggccatccagaatcaccgaaaaacatcatgagcaatcgaaaaagatcagccggaaacccttgcagatccgataccgtcaaggaacgagcacaa

SEQ ID NO: 15217 - DNA, 693 bp, Homo Sapiens
tctttcataagtgagttactaagatttctatacctggaatatcatgtatgtttcattgactggatgtctacatttcaggaaggaaaatagttttgtttatttaaacaactgaatacttataaactgttgttcctggaagttatttattccataaaaaatttgttcttttgtcatgaatttataattcctaaatgaagaccagaaagtacaaattgctgggaggaagaataggctttattaatcaactgatgtcttgatttttctaaatgggaagattgctttatttttaacactaattatgggagcagattcttagcaaacttctttggaaaagttaatgttatgatgtgcattaggctgccccatcgtgtatataaatgaagcagatttgatttttgtattcttacgtttctctgctttgtagttgtggctgtacttaaagaaatacagaatttcatatatttaaaaatgtttaaaatgtgacccacagaacattgtaaatgattaaaaactaacatgaaaatattacaacctaaaagaattcttaacttcacaagtgttttacttcgacgatgtgcctttgatttaatttgggacacttttttagaaggatacattattcgtgtttgcaacggtctttgaagagcttggaaataaaatttctgcttaattaatcatttttctatgaaaaaa

SEQ ID NO: 15218 - DNA, 2809 bp, Homo Sapiens
  misc_feature (1586)..(1608): n is a, c, g, or t
  misc_feature (1720)..(1776): n is a, c, g, or t
  misc_feature (2320)..(2320): n is a, c, g, or t
  misc_feature (2336)..(2336): n is a, c, g, or t
  misc_feature (2432)..(2432): n is a, c, g, or t
  misc_feature (2520)..(2520): n is a, c, g, or t
  misc_feature (2578)..(2578): n is a, c, g, or t
  misc_feature (2593)..(2593): n is a, c, g, or t
  misc_feature (2598)..(2598): n is a, c, g, or t
  misc_feature (2606)..(2606): n is a, c, g, or t
  misc_feature (2644)..(2644): n is a, c, g, or t
  misc_feature (2646)..(2646): n is a, c, g, or t
  misc_feature (2750)..(2750): n is a, c, g, or t
ttatgtcattgccctgaagaataatcagaagagcgagcccctgattggaaggaaaaagacaggacaagaagctctctctcagacaaccatctcatgggccccattccaggacacttctgagtacatcatttcatgtcatcctgttggcactgatgaagaacccttacagttcagggttcctggaacttctaccagtgccactctgacaggcctcaccagaggtgccacctacaacatcatagtggaggcactgaaagaccagcagaggcataaggttcgggaagaggttgttaccgtgggcaactctgtcaacgaaggcttgaaccaacctacggatgactcgtgctttgacccctacacagtttcccattatgccgttggagatgagtgggaacgaatgtctgaatcaggctttaaactgttgtgccagtgcttaggctttggaagtggtcatttcagatgtgattcatctagatggtgccatgacaatggtgtgaactacaagattggagagaagtgggaccgtcagggagaaaatggccagatgatgagctgcacatgtcttgggaacggaaaaggagaattcaagtgtgaccctcatgaggcaacgtgttatgatgatgggaagacataccacgtaggagaacagtggcagaaggaatatctcggtgccatttgctcctgcacatgctttggaggccagcggggctggcgctgtgacaactgccgcagacctgggggtgaacccagtcccgaaggcactactggccagtcctacaaccagtattctcagagataccatcagagaacaaacactaatgttaattgcccaattgagtgcttcatgcctttagatgtacaggctgacagagaagattcccgagagtaaatcatctttccaatccagaggaacaagcatgtctctctgccaagatccatctaaactggagtgatgttagcagacccagcttagagttcttctttctttcttaagccctttgctctggaggaagttctccagcttcagctcaactcacagcttctccaagcatcaccctgggagtttcctgagggttttctcataaatgagggctgcacattgcctgttctgcttcgaagtattcaataccgctcagtattttaaatgaagtgattctaagatttggtttgggatcaataggaaagcatatgcagccaaccaagatgcaaatgttttgaaatgatatgaccaaaattttaagtaggaaagtcacccaaacacttctgctttcacttaagtgtctggcccgcaatactgtaggaacaagcatgatcttgttactgtgatattttaaatatccacagtactcactttttccaaatgatcctagtaattgcctagaaatatctttctcttacctgttatttatcaatttttcccagtatttttatacggaaaaaattgtattgaaaacacttagtatgcagttgataagaggaatttggtataattatggtgggtgattattttttatactgtatgtgccaaagctttactactgtggaaagacaactgttttaataaaagatttacattccccccgcgnnnnnnnnnnnnnnnnnnnnnnngcgcatgcacgcagaacaaaaccctaacacaacgaaaaatcagcataatacaccattaataaaaaatacgccaaaaaactagccgtaaaatgtaatcacacgcgtattgttnnnnnnnnnnnnnnnnnnnnnnnnnnnnnnnnnnnnnnnnnnnnnnnnnnnnnnnnnaggggctccgcgcgcgcgcgggcggctatctataaagcgcccactattaaaaccgccttcacggccgcccctatacacacggaccacccaaatacgtcccccctctcacactcagcgacgcgccgctgttggagcgccgccagggtggactggctagacggcggccgggattcggacggcgacgaccccttctattgcggcgtggtgagcacaacaaccgagcccgcccgcatttatttattcaacaatgacacctacatacatatatattcctgcccaacacgcacccatttctgagtatgcacgcggccgcgtccgtcatcggatctgtatatacaagtgtagtagacgtgtgtgcgcctccccacacacacaccacacctccagttcgatacactatgacagagagcgcgctcgattacagcagtacagtagttcacagatagccagagtttggcgtgtataggagtcgacgggatgcgcgatcgcgggccgtgacacggaccacacgcacccgtaggagtacatatatccgccgtcgcantcctggagcgccgggncgactcgcgcacatctgcgtgataagatccacacgatctcacccgccgtccgagcccgacgcccagacatcattgtgagatgtttggcggcgatcntcaccactgagcactccagaaaatacgcgtgataacgttatacccgccgcgcatgatatgttgcgcgccgcgcgtctgtcgcggcctntgcgctcccgctaccccgcgtaggagtcgctgcctcgagttacgttttgacatcgccnacatgatctcgaccnccgtnaacgaaantgtaattatgctcacgcgatagacaccgttcctctgtngnaatgaagattactggtggatgcgcccgtccggaccagcagccccgcccgcaatttttaattgttactccgaacactttgcaccgcgtccgatagcggcccgcancaccggaaatctaccagacctgtccgacgtgagtacggtagtcggactgacggtacagg

SEQ ID NO: 15219 - DNA, 572 bp, Homo Sapiens
ctgaaaccctcccatctgctcccctgagcccacctcaatgctccctcccctgacaggctcccgagggcattgagcccctggtgtacctctgccaaactgacacagaagctgtgagggaagctgcccggcaaagcctacagcagtgtggagaagagggacagtctgcccatcgacggctggaggagtccctggacgccctgccccgcatctttgggcctggcagcatggccagcacagcattctaaactattcacccatgggttcctggtgcccctttccccccactttcagggctcaccaggcactggcagggagggtaagggctggctccagatacccctcccccacagattcctagcaatgaaaatctaatatattcttctgttgcccctggggttggagagtcagtgcctgcagtcaagtgcctcccagcctcggctcagcacatcccttgccacaaatcagtgtctggggcttggccaccctgccgctgcccagccacatcccttggttttgtattttatttacagagttttacagaaaataaaaaagcaaaatgtctttccaaaaaa

SEQ ID NO: 15220 - DNA, 726 bp, Homo Sapiens
  misc_feature (85)..(85): n is a, c, g, or t
  misc_feature (103)..(103): n is a, c, g, or t
  misc_feature (131)..(131): n is a, c, g, or t
  misc_feature (219)..(219): n is a, c, g, or t
ccccagtgtaccccttcccccatcacagggtgtggggctggcctcgctcgtgacacctctgctgatctcacaggccatgggactngccctctatgtcctgccngtgctgggccaacacgttgccacccagnacttcccagtggcaaaggctgaggctgtggtgctgacactgctggcgatttatgcagctggcctggccctgccccacaatacccaccngggtggtaagcacacagggccccagacaggggctggatggcactgaagctggtagccctgatctacctagcactgcagctgggctgcatcgccctcaccaacttctcactgggcttcctgctggccaccaccatggtgcccactgctgcgcttgccaagcctcatgggccccggaccctctatgctgccctgctggtgctgaccagcccggcagccacgctccttggcagcctgttcctgtggcgggagctgcaggaggcgccactgtcactggccgagggctggcagctcttcctggcagcgctagcccagggtgtgctggagcaccacacctacggcgccctgctcttcccactgctgtccctgggcctctacccctgctggctgcttttctggaatgtgctcttctggaagtgagatctgcctgtccgggctgggacagagactccccaaggaccccattctgcctccttctggggaaataaatgagtgtctgtttcagcagct

SEQ ID NO: 15221 - DNA, 363 bp, Homo Sapiens
agacttctcaagctgaccaggatatccaagacaaagagcctcattgccacatcccaattaagagaaattccatcttcaatcgctccataagacgcaaaagcaaagccaaggccagagacaaccccgaacggaacgccagctgcctggcagattcacaggacaatggaaaatctgtaaatgagcccctgaccttgaatatcccctggagcagaacgcctccttgcagaacagcaatgcagacagacccaggagcccaggaaatgaggtaagagatggcagatcatgaggaatgctggtctgggaaagatgcatcagaggtcattgctgcaaagacttgacagggttacgagggtgtcatgttaa

SEQ ID NO: 15222 - DNA, 771 bp, Homo Sapiens
agcctaaagtgtgcagaaccctcaattctgttaagtcaccggcaggtgcaagaaggtgaaatccagcagccgcgccagctggttgcccgccaggtagagcacgcgcagctgggccaggcctacgaaggcgccgctgcgcaagccgcgcagccggttgctagtgagcgccagctccagcaggcgcggctgcgcgcggaaggcgccggcctccagggcgcgcaggctgttgttgtgcaggtagagccggcgcagagcggcgagtggcgccagggctcccggctctaggcgggcgatgttgttgtcctgcaggaacagtgtctgcaggccggggaaagaggaggcgcttaccccgttgcgggggtcttcctctccctgggggcaccccgttctcccgcagctccacacggtgcccacctgcgtccctggcgggattcccagcgggacgacgcgcaaccgcagggcgccacactccaccgtggcgctgtagcagcggcaggctgctgggcagccggcggcgcggagcggcagtagtagcagcagcagcggcagcagtgcgggcgcctcagggccatctcccgaggcccggttcctcaccggcccttccgcggttcagccgcagacgcgtgccctcctgaaacacaggttggcaggccagtctcggcagtcgagagccagccaatagatggaatggaggcctgcacctgcgtctaacttttgacactataaataggttcaagaaactaataaaacgttctggttttctcctttgac

SEQ ID NO: 15223 - DNA, 1376 bp, Homo Sapiens
gcggccgccctccgcgtcctcgtggtgcgcgccgtccgctcggctcctggcctgccagcccccgaggcccgcagcctccgcggatccgggcccgctcggccctcccatggaaggtgctcgggtcttcggggcactgggtcccatcggtccctcctcacctgggctcaccctcgggggtctggccgtgagcgagcaccggctcagcaacaagctgctggcttggagcggcgtcctcgagtggcaggagaagcgcagaccctactctgactccactgcaaagctgaagcggaccctgccctgccaagcctacgtgaaccaaggcgagaacctggagaccgaccagtggccgcagaagctgatcatgcagctgatcccgcagcagctgctgaccaccctgggccccctgttccggaactcccagttggcacagttccacttcaccaacagagactgcgactcgctcaaggggctctgccgcatcatgggcaacggcttcgcgggctgcatgctgttcccccacatctccccctgtgaggtgcgcgtgctcatgctcctgtactcgtccaagaagaagatcttcatgggcctcatcccctacgaccagagcggcttcgtcagtgccatccggcaggtcatcaccacccgcaagcaggcagtgggacctggtggtgtcaactcaggcccagtccagatcgtcaacaacaagtttctggcatggagtggtgtcatggagtggcaggagcccaggcctgagcccaacagtcggtccaagaggtggctgccatcccacgtctacgtgaaccagggggagatcctgaggaccgagcagtggccaaggaagctgtacatgcagctcatcccgcagcagctgctgaccaccctagtgccgctgttccggaactcgcgcctggtccagttccacttcaccaaggacctggagacactgaagagcctgtgccggatcatggacaatggcttcgccggctgcgtgcacttttcctacaaagcatcgtgtgagatccgcgtgcttatgctcctgtactcttcagagaagaaaatcttcattggcctcatcccccatgaccagggcaactttgtcaacggcatccggcgtgtcattgccaaccagcagcaggtcctgcagcggaacctggagcaggagcaacagcaacgagggatgggggggtagtggttaccccgggctgggcccctccaggagtcacagatgaggcccccgcagagactggtgacacgcttctgagcaggggcccctggggacttcaactgcccagcaacatggaggatggtgtcctgaggcctccaaggacggtccccacccctctacgtttccccaataaagccttttaaaaacctga

SEQ ID NO: 15224 - DNA, 461 bp, Homo Sapiens
tctagaggtccgaatctgcaccacagcctcaacaacacacgacaaccttccacaaccaccacttccagccctctaacaactactcctctacctccatcaataactcctcctacattttcaccattctcaacgacaacccctactaccccatgcgtgcctctctacaattggactggctggctggattctggaaaaaccaactttcacaaaccaggtggagacacagaattgattggagacgtctgtggaccaggccgggcagctaacatctcttgcagagccaccatgtatcctgatgttcccattgaacagcttggtacaaacagtggtgtgtgatgtctctgtggggctgatatgcaaaaatgaagaccaaaagccaggtggggtcatccctatggccttctgcctcaataccgacgatcgacgttcagtgctgtggtataaagctcctgctagatcac

SEQ ID NO: 15225 - DNA, 1160 bp, Homo Sapiens
  misc_feature (107)..(107): n is a, c, g, or t
  misc_feature (115)..(123): n is a, c, g, or t
  misc_feature (125)..(141): n is a, c, g, or t
cccggtttccttgggaacccgctatgagcccggttccctttcccttttggggcccccgccccaaacgaaatgtttttgaaagcttttcgagggccgaagccggcccnccattttnnnnnnnnntnnnnnnnnnnnnnnnnnaccttcaggaaatcgcatagaaacaaaaacagagaaaaatacagaaatagatacaatgtccttaaaacaagcaaattttattaaaggaaaattttgcaggtttaaggtttgcaggtgaaattttgtaggtgaaaaggtttacttttcaccagtctgttctggcatgcttctaatgatgtcagagtcacctggatcaatgatagccagtgtgcacactctgtagtattttccgcatgctgtgcccagttcaatattattgccactgtagtgatggacaccagttttagccaacatagcatagtactctatttcagatttcctcaaagctgggcagttgtaagcgagaatgaccaatttcgctttgccttgtctgatcatcttcagagtctgcttgtaccccaggacgtacttcccacttttcataacgagttggagcctagagttgatcgactccagcgactttttcgtcttctttgcggccaccatcttcctgccttaggagcgggacggccccaaccaacagcagccgctaagatggccggcacacttgtatattgtcagtgaagaactgttagttggttgtcagtgaacaataactttattatatgagtttttgtagcatcttaagaattatacatatgtttgaaatattgaaactaagctacggtaccagtaattagatgtagaatcttgtttgtaggctgaattttaatctgtatttattgtcttttgtatctcagaaattagaaacttgctacagacttacccgtaatatttgtcaagatcatagctgactttaaaaacagttgtaataaactttttgatgctagctgtttactggtttttgtttttgatgtcataaatagaccttgtttaatagtcacaagccgttgggatatcatacccagctgaaaaagaacaaactgcttaacataagtatatgtatcgtaataagagttttttaccagctaagtgattcaatgtaagtggtttttaaaataaaatactgtagagatcaa

SEQ ID NO: 15226 - DNA, 325 bp, Homo Sapiens
aaaactctggcgttagaggatatagaaaaatataagtacaattgttacaaataacgcagacttcaaaaacaaataaatcacaacccaaacaaaccaaaatttaaatgatcagaattggcagcacaaagaaaacgccctctcctgacttgtattgtggcagtctgaacgcccccagaaaattgtgccaaagagtttagaaaaataaatatacaataaaagtaaacacatacacacaaaacagcaaacttcaggtaactattttggattgcaaacaggataattaaatgttcaaacaatctgataaaataaacatttggaaactgaa

SEQ ID NO: 15227 - DNA, 1950 bp, Homo Sapiens
  misc_feature (1418)..(1418): n is a, c, g, or t
  misc_feature (1584)..(1658): n is a, c, g, or t
gtttccggaacctccgggtgtcatccgcggggaaagaacttggtcctgatgtctgaccatggagatgtgagcctcccgcccgaagaccgggtgagggctctctcccagctgggtagtgcggtagaggtgaatgaagacattccaccccgtcggtacttccgctctggagttgagattatccgaatggcatccatttactctgaggaaggcaacattgaacatgccttcatcctctataacaagtatatcacgctctttattgagaaactaccaaaacatcgagattacaaatctgctgtcattcctgaaaagaaagacacagtaaagaaattaaaggagattgcatttcccaaagcagaagagctgaaggcagagctgttaaaacgatataccaaagaatatacagaatataatgaagaaaagaagaaggaagcagaggaattggcccggaacatggccatccagcaagagctggaaaaggaaaaacagagggtagcacaacagaagcagcagcaattggaacaggaacagttccatgccttcgaggagatgatccggaaccaggagctagaaaaagagcgactgaaaattgtacaggagtttgggaaggtagaccctggcctaggtggcccgctagtgcctgacttggagaagccctccttagatgtgttccccaccttaacagtctcatccatacagccttcagactgtcacacaactgtaaggccagctaagccacctgtggtgggacaggtccttgaaacctggagcactgagcaactcagaaagtattcccacaatcgatggattgcgccatgtgatgatgcctggtcggctgtgcccacagtttctccagttagccagtgccaacactgcccgggcagtgcagacatgtggatattctctgtggaaaactgatgaggaatgaatttaccattacccatgtcctcatccccaagcaaagtgctgggtctgattactgcaacacagagaacgaagaagaactttacctcatacaggatcagcagggcctcatcacactgggctggattcatactcaccccacacagaccgcgtttctctccagtgtcgacctacacactcactgctcttaccagatgatgttgccagagtcagtagccattgtttgctcccccaagttccaggaaactggattctttaaactaactgaccatggactagaggagatttcttcctgtcgccagaaaggatttcatccacacagcaaggatccacctctgttctgtagctgcagccacgtgactgttgtggacagagcagtgaccatcacagaccttcgatgagcgtttgagtccaacaccttccaagaacaacaaaaccatatcagtgtactgtagccccttaatttaagctttctagaaagctttggaagtttnttgtagatagtagaaaggggggcatcacctgagaaagagctgattttgtatttcaggtttgaaaagaaataactgaacatattttttaggcaagtcagaaagagaacatggtcacccaaaagcaactgtaactcagaaattaagttactcagaaattaagtagctnnnnnnnnnnnnnnnnnnnnnnnnnnnnnnnnnnnnnnnnnnnnnnnnnnnnnnnnnnnnnnnnnnnnnnnnnnnttcctctcagctatccttctaatttctctctaatttcaatttgtttatatttacctctgggctcaataagggcatctgtgcagaaatttggaagccatttagaaaatcttttggattttcctgtggtttatggcaatatgaatggagcttattactggggtgagggacagcttactccatttgaccagattgtttggctaacacatcccgaagaatgattttgtcaggaattattgttatttaataaatatttcaggatatttttcctctacaataaagtaacaactaactt

SEQ ID NO: 15228 - DNA, 841 bp, Homo Sapiens
aggtcaaggtgagcccagccgtcctcccatagcaggagctctatacctccaagtggacagtcacctttgctgctgaccctgaggacatctgctggaagaacctctctatccagggcctccgcgtggtggctacagtggctgggcatcaacttcaccctcttcctggggctatttttcctgaccacaccctccatcatcctgtccaccatggacaagtttaatgtcaccaaacccatccatgcgctgaataacccgatcatcagccagttcttccccaccctcctgctctggtccttctcggccctgctcccctccattgtctactactctacactgctggagtctcactggaccaagtcgggggaaaaccagatcatgatgaccaaagtctacatattcttgatcttcatggtgctgatcctgccctccctgggtctcaccagtctagattttttcttccggtggctctttgacaaaacttcctcggaggcctccatcaggttggagtgcgtcttcctgcctgaccagggtgccttctttgtgaactatgtcatcgcctcggccttcatcggcaatggcatggagctgctgcggctgccaggtctcatcctctataccttccgcatgatcatgaccaagacggctgctgaccgcaggaatgtcaagcagaaccaggccttccagtacgagtttggagcatgtatgcatggatgctgtgtgtcttcactgtcatcgtggcctacagcatcacttgtcccatcatcgcgccatttggcctcatctacatcctgctcaagcacatggtggaccggcacaacctctacttcgttacctctaccgc

SEQ ID NO: 15229 - DNA, 866 bp, Homo Sapiens
gggggggaaaacaaaaggagacgaaggacgcatgcgtttggtgagtcccggattctggtgggttcttccgctcaggctgggtgaagcgcttccgggtcgccgccggcagcagcctcccggcgcgatgaagacactgaggctcagagaggttaagtgactcagccaaggtcaaacagctagtaagtggtggagccaggactcaaagccagtctaggagccatgtccactttgttcccctcactcttccctcgtgtgactgagactctgtggtttaatctggatcgaccctgtgtggaagagacagagctgcagcagcaggaacagcagcatcaggcctggctccaaagcatcgcggagaaagacaacaacctggttcctattggcaagccagcctcagagcactatgatgacgaggaagaagaggatgatgaagatgatgaggatagtgaagaggactcagaggatgatgaggatatgcaggacatggacgagatgaatgactacaatgagtcaccggatgatggagaggtcaatgaggtggacatggaaggcaacgaacaggatcaggaccagtggatgatctaggtagacaaggcagggtggcctcagggagattccaggccagcccaaactaccctgcatcccaacccccaacccctgcccacagaaccagctgatggccccagtgcctgaaagtgcccttgggcacctcctcagctgctgccaggatctggtctctttggccccctcccaggccatcagtctgcacttgaaatccccagggcctgaaacctactccacctttctgggccagtacctccaccccttggattgcccgagtccggggccaaagtttctctttaaaa

SEQ ID NO: 15230 - DNA, 1690 bp, Homo Sapiens
  misc_feature (441)..(450): n is a, c, g, or t
  misc_feature (1311)..(1311): n is a, c, g, or t
  misc_feature (1313)..(1313): n is a, c, g, or t
  misc_feature (1339)..(1339): n is a, c, g, or t
  misc_feature (1494)..(1519): n is a, c, g, or t
cagaaggtgtaaaagaccgcctggatctgctcgcgcggtccgtctgttgctgagactcggggtacgttctgtgacccagctccctttagtcacgtttgcttggctctggtaccacatagttgggattaccgaagagtccccttccttgcgtgtcagcacggatgctgtgactgccacctgcgtcctcgtcaagtgcccgagctcgccgccgtgtgtgctgcgctgagtgagttatgaggtgcctttcccggaaccctcctctcgcctggacccaagagaggcgacagctgtggctggggctcttggtttccagagggtctggactggtttgggtgctttaaaatagatatttagttcagtggtgcttatgggggagatgggactagaacttaagtgtgagacttgggtggatgggaaagttaaatattggtctcttcaagnnnnnnnnnnctttggctttgttaccacttgtcactgtctccatgttaaaatgccaaaaatgatgtagttgttgttgcttttttccctattttccaccccagtcgctccttaccgtgactcctgcccttggagggcatgtagcagtgtctgtcctgccagtcccaaggccctgtgggaggagactggcctgcatctctctaagacttagtctgacgccacgcgcatctcttgttctgtgttcaatcagtagtccaggggagaagcttctgctacttcagagctttgctaaactaacctaatttgtccaaatcaccccaaaaccaccatctctgacgtaagcttccatgcgacagcctgatccgtttccctggacaggtctctttcctggaatgcagcctttgcaggaacctccctgcgcctagcaccacttgagatctcggtggcctcatgtaaacgtggcagccagcctcttctagaaccctagcccagggactggaccaggaaagggaccttcaaagtgaagactgccttgtcccgcagctccttctggcttagattgaaacatgggcttcctaatgggttaaatcctttaaaacaaggagttgtgggggaagggtgtcgtgcactcctagagaaaggtacacagttgcccggttgggaatgtgcttggcgctgaccctgcgggcatctgactggtcttccagctcaggaaaaagaatttgaaagaggcttagcgtgaaggggaatcaaagaggaggttgtgatttggtcgaaggtgcctggtttagtgctgtaattgtcttattattttttttatatatatatttcttggagtaaacattttaaataaacaacattgtctactgcccncnccacaaatatggcacacacaccaacncccttgttcggccgcccttcggccctcaaaaaagcttttctaaaccatttcgttttggcggcccggggccccagaaggtaaagtggaacagtgggccataaccttgtttccctaaggaaaaaccccgggtccatggacctagaggcctgtgaatnnnnnnnnnnnnnnnnnnnnnnnnnngggcggaaaacccgaagcgttcctggaacaaaatccccgaaggggatttctctgaggggcctttacgtggggatttaatccaaaagggggagtccccaagccgaaggcctcgaatatataaatttaagcgccgccggccccatggcgcatattaacttcggcagtgtattg

SEQ ID NO: 15231 - DNA, 855 bp, Homo Sapiens
cagaggaaatggccagtgatgaactgagggagttgaggaatgccatgacccaggaggccatccgtgagcaccagatggccaagactggcggcaccaccactgacctcttccagtgcagcaaatgcaagaagaagaactgcacctataaccaggtgcagacacgcagtgctgatgagcccatgactacctttgtcttatgcaatgaatgtggcaatcgctggaagatggaatcggcttcctgagatccacagaggagaggaaaaacattctgcacttggaccacgcctctttggaaagtgcttccacagatagtatttcctttgaacctggccacagccaaggatgagaaacaggaaggctgagccctgtcagaaaggagttgaacctaaatgccaccaggccatccttccctcctaaggaagctctgaaagtcttacccaagtctgtaactcagactgccccagctcctgcaaaggcagaagttttgttttcacgcatgggagccaaacaaagactcctcccagagtgctccttcctgccaagtgtcctgaaggaacagagtgtggtcacgtgcctattgtcagtttccaactgctctctgacttgcacgtgcaccatgtgatgtctgggccaccaggcaggctgcaggtgctccaaaagttctaaggtacttagcaagaagtacaagataagtcaggatccctggtttcaggtcccattctgccctactcatcctgagcatgttactcacctcattgagcaaaagagtaataataatgcctttctcccaggtttgatgatgtgaggatcattttgatatgagggttatcatgtatgcataaacactttgcaaac

SEQ ID NO: 15232 - DNA, 745 bp, Homo Sapiens
  misc_feature (507)..(582): n is a, c, g, or t
tagcggcgcccttttttgtaaacacctgtcatgctgcagatctctagaatcttccagacactaaatcgcacgtaggtggcgttgttccactcggctatcaggccacagcagccccctggtgcggcccgagaccgggcagagtggacctcacctggaaactcaccttcagcgcctcagccctggactgttagaggtgctgcagcggctcctgctctctgatcttattgcttataaactttggtgacggtagtgtgtaaggccgtatttttagcatctgacaggtgtttacaaaaaagtggttgtcgcactgggaagtggagtgatggcctcgtctccagtgctcctctgggctcttgagttgctgcttgaattgccgtgtagacatttgcttggagagtccacttgttatttgacggaggtaggtttcaacccagagttaatgtcaagcatgctaatttaactagtcactcacagatgacttttctttaataaagtcccttttcctannnnnnnnnnnnnnnnnnnnnnnnnnnnnnnnnnnnnnnnnnnnnnnnnnnnnnnnnnnnnnnnnnnnnnnnnnnnccttgtcggccgccctcggccctcgaaaaagttttctaaaccatctcttttggcgccggcgggccccagtaggttaagggaaacagtggccaataccgtgttctccaaggaagaatcctgtggccagtgaacatagggcctgtggaatctctcccacccaaat

SEQ ID NO: 15233 - DNA, 615 bp, Homo Sapiens
tgacacgccgaccgactgctgcttcagctacacctcccggcagattccacagaatttcatagctgactactttgagacgagcagccagtgctccaagcctggtgtcatcttcctaaccaagcgaagccggcaggtctgtgctgaccccagtgaggagtgggtccagaaatatgtcagcgacctggagctgagtgcctgaggggtccagaagcttcgaggcccagcgacctcggtgggcccagtggggaggagcaggagcctgagccttgggaacatgcgtgtgacctccacagctacctcttctatggactggttgttgccaaacagccacactgtgggactcttcttaacttaaattttaatttatttatactatttagtttttgtaatttattttcgatttcacagtgtgtttgtgattgtttgctctgagagttcccctgtcccctcccccttccctcacaccgcgtctggtgacaaccgagtggctgtcatcggcctgtgtaggcagtcatggcaccaaagccaccagactgacaaatgtgtatcggatgcttttgttcagggctgtgatcggcctggggaaataataaagatgctcttttaaaaggtaaa

SEQ ID NO: 15234 - DNA, 1275 bp, Homo Sapiens
  misc_feature (155)..(155): n is a, c, g, or t
  misc_feature (256)..(297): n is a, c, g, or t
ggggttgtccccaacaaagggcctaagggcccacgggaaaggaggcagggaaccccggaaaggatggggggaaaaggccaaccatttgcccataagggaaaagccacgtgccagaaggggactatcaataaccaggaaggaaggtcccactttcnttattggttggtataaggagatgggaggttgaggcgcctggtgggaggaaggaaaaccccggtggtggaatcagagggggagcagtgctgacagtcggagnnnnnnnnnnnnnnnnnnnnnnnnnnnnnnnnnnnnnnnnnnctctgggaggggaaaaacggaggtggtttgctaaaattgttgtctacttcagtagcagatctttcagaaaggacctgtatgttgctgttctcatttgcccgtcgcctgccttctactcggctgatagttatagtctgaccgataacatcaattgccccaggtaatctccttagatcaggtgattcggccctcccatatcgatcctgccacttcccaacgcttgaattggcttttctggaggcagtacttgtctgagactgagaagaagtgctgtttctgctcggtggaagcccagtcttgaacaaagaaggaggagaagtaaactcagcttttgtagatggaagggcagtttctttctctgagtttccagttcttccctccgtaattttatttgtagtagaggttactggtataacttcaagtcccattcgtatcctcttttgtttttcacagtaagctttccaggtatcttcattaaacccataattaaaataatcagaaagatcagcaccaggtttacgccatggtttatcttcaaaagaatccaaatctacctctaagagtggaactccattaatgcttccaggtgcatcaaggtctactcctttgacttttgtccctgtagttccataaactcttccccctgtcttgatgttaagatttacaggtgctgtaccataactcccatactgtggtgctcccgttttaatgtctcctatagtgacatgaacatcatcttcatcatcatcgctgtcactatcactatcatcttcggtctcagtcactttcggttttggtacaccattttcagcagtttcatcttcaattccagatggaggattagcactggcattttcttcttctggcctttcaacttcattttcatctaggtcctttgccaaatcactgtgcacatgcacgtcccatgggccgccatagagccactcttcctcctcatccctccgtcccgactaactt

SEQ ID NO: 15235 - DNA, 982 bp, Homo Sapiens
aacggcagtaactatacggttctaaggtagcgaggcctgggtggcgaaattcggcacgaggatgatcggagacatcctgctgttcgggacgttgctgatgaatgccggggcggtgctgaactttaagctgaaaaagaaggacacgcagggctttggggaggagtccaggagcccagcacaggtgacaacatccgggaattcttgctgagcctcagatactttcgaatcttcatcgccctgtggaacatcttcatgatgttctgcatgattgtgctgttcggctcttgaatcccagcgatgaaaccaggaactcactttcccgggatgccgagtctccattcctccattcctgatgacttcaagaatgtttttgaccagaaaaccgacaaccttcccagaaagtccaagctcgtggtgggtggaaaagtgttcgccgaggtgtgcatggtttcccagccacgtccctgttttcaaagatagtttcactttggtctctgaattgaaatgctgtctactgaaagggtttcaggagcgtttatgtaaggggctgtgatgaaattgcattccccatagataaaagaaaaatcatttctatccagagatctgagcagaaggattggcttgttagtttaacacagccgtatttttggacattcagtgttacttgctgagtctgacagcctctgggcccggccaggggccctgttaacaaactgctttcacatcccaacagggtctgcttggccactcagtgcagctgcgattaaccctaaaggctttaaggaacgggccacctgtaacagagacaccagccttcctgtatagacactaaattgttagcaagagtgttgagctagttcctggtgaagtgtttccacagaagacatgtggagcagttgtggggatattaagggaaactttcctctgccttgacccctttgttaaataaaatgactttgggagccattcattgtacagttgc

SEQ ID NO: 15236 - DNA, 673 bp, Homo Sapiens
  misc_feature (211)..(330): n is a, c, g, or t
ccttttgtgctctcttctgtctctgtgtttgtgctgttcttcttcctcggacaattgaaaatcacattggttttctcctacttagggccagaactgcgcagaatggtcttcaaggcccttcataatatcccccagtttagtagttggacttagggaaacaaaggaacctttaatagaaattggacagcaagaaagcgagcttagtgatacnnnnnnnnnnnnnnnnnnnnnnnnnnnnnnnnnnnnnnnnnnnnnnnnnnnnnnnnnnnnnnnnnnnnnnnnnnnnnnnnnnnnnnnnnnnnnnnnnnnnnnnnnnnnnnnnnnnnnnnnctgaagttctcaggatccacgtgcagcttgtcacagtgcagctcactcagtgtggcaaaggtgcccttgaggttgtccaggtgagccaggccatcactaaaggcaccgagcactttcttgccatgagccttcaccttagggttgcccataacagcatcaggagtggacagatccccaaaggactcaaagaacctctgggtccaagggtagaccaccagcagcctgcccagggcctcaccaccaacttcatccacgttcaccttgccccacagggcagtaacggcagacttctcctcaggagtcagatgcaccatggtgtctgtttgaggttgctagtgaacac

SEQ ID NO: 15237 - DNA, 1083 bp, Homo Sapiens
taccaggccaagaaccccttcaagccaaagcagcccacaaggggccttgcccagcccaggcacaaacagaagccgggtttttgccagtaatgaatagattccaggcggataaggcacaggtgggaaaaggggttgggtgcccagccccctcagtcccagtgagctctgtgccacctccctgccagcatccggtacagatggggcggaatgtggagaaggttggccacagtccagagccaggagcccatggaacaacttggaaggtgactcaggtgaggctgtcaatgagggaatcccgcatgctggtggcaatggtgctaggctgggcttcattcagcttgaagacactctccaccactgacagctctgtgctggttgtgtccaggccacagaaggcacaccagtcattcaccaccatcccagcagcaatcacctcactgcctcggttcacagtccccgccacaagggggacttgaagaagagaggacagctcatcctggtcttcaattgaagtcttgggatgcaccagccctccctgattgctgaagacacagtagcttcctactagcacctggtcggccactgtctgtctgaagacttccaccttgagcacatctgccagaatttcttctgtctccctgtccaagtctgggtggaccaaggccacgtagtcattgcaggtggtgacattgcccaaggctgagagccgctcctccacccgcctaatctgcactgtgtctgggaggctgttgcgaatgtgttgcagctcctggtcggtggtattgttgggtaccaggagaccgtgcctgttccccacacacatgcgcccgatgatgcggcagccggcgatagacgcgtgcaccacggggatggtatcggagagctcgccctcgaacacactgtagaagttctctgagcctccgatcgctaccagacagtaggtgttggtgagcttggcaaagcagccgatctcacagttgttctcgaacgaagctcggaccgccatgaggccaagtaaccagtaacaagctccgcacgcggcgactgtaccttggactccctaaaaaggtttccgtttccccc

SEQ ID NO: 15238 - DNA, 574 bp, Homo Sapiens
tcaaatatatgtgctagtattggaaaaaatagaagatgaatcattgattgaatagttataaagatgttatagtaaatttattttattttagatattaaatgatgttttattagataaatttcaatcagggtttttagattaaacaaacaaacaattgggtacccagttaaattttcatttcagataaacaacaaataattttttagtataagtacattattgtttatctgaaattttaattgaactaacaatcctagtttgatactcccagtcttgtcattgccagctgtgttggtagtgctgtgttgaattacggaataatgagttagaactattaaaacagccaaaactccacagtcaatattagtaatttcttgctggttgaaacttgtttattatgtacaaatagattcttataatattatttaaatgactgcatttttaaatacaaggctttatatttttaactttaagatgtttttatgtgctctccaaattttttttactgtttctgattgtatggaaatataaaagtaaatatgaaacatttaaaatataatttgttgtcaaagta

SEQ ID NO: 15239 - DNA, 318 bp, Homo Sapiens
cggaagttctgcatacaagaaggcattgcccctttggtgaccgggcaaggtcaggtctaagaagcgcctctggtgagaagcggttgtcaggctctgatggctgcgggaggagtgactcctcccaggatgagggtctgtgtcctctcagtgctcactcaagttccgtatttccaagtccttccagggggcgtaacgcacgtgagaactgccatttctgtcacagatacgtggccgcatgcatttccaggaaatgtccttggttcgcgaactacagctggcacaatccagcccagggcgttctgtgagctgtagtctcca

SEQ ID NO: 15240 - DNA, 1034 bp, Homo Sapiens
gcttgcctgatcctccaaatcaccacaggactattcctagccatgcactactcaccagacgcctcaaccgccttttcatcaatcgcccacatcactcgagacgtaaattatggctgaatcatccgctaccttcacgccaatggcgcctcaatattctttatctgcctcttcctacacatcgggcgaggcctatattacggatcatttctctactcagaaacctgaaacatcggcattatcctcctgcttgcaactatagcaacagccttcataggctatgtcctcccgtgaggccaaatatcattctgaggggccacagtaattacaaacttactatccgccatcccatacattgggacagacctagttcaatgaatctgaggaggctactcagtagacagtcccaccctcacacgattctttacctttcacttcatcttgcccttcattattgcagccctagcagcactccacctcctattcttgcacgaaacgggatcaaacaaccccctaggaatcacctcccattccgataaaatcaccttccacccttactacacaatcaaagacgccctcggcttacttctcttccttctctccttaatgacattaacactattctcaccagacctcctaggcgacccagacaattataccctagccaaccccttaaacacccctccccacatcaagcccgaatgatatttcctattcgcctacacaattctccgatccgtccctaacaaactaggaggcgtccttgccctattactatccatcctcatcctagcaataatccccatcctccatatatccaaacaacaaagcataatatttcgcccactaagccaatcactttattgactcctagccgcagacctcctcattctaacctgaatcggaggacaaccagtaagctacccttttaccatcattggacaagtagcatccgtactatacttcacaacaatcctaatcctaataccaactatctccctaattgaaaacaaaatactcaaatgggcctaaaaaaa

SEQ ID NO: 15241 - DNA, 1373 bp, Homo Sapiens
  misc_feature (1237)..(1245): n is a, c, g, or t
agaaggaggatgagggaaagcgcagcggcaaagagtaggcaggccagccacacgagggcccagcgcttgtggatgtatttgtccatggggcaggcccatagcgctcccaagtcatcgtcccatagcgtggaggctttgctgggtagtgaagtacagccactgggttccaaggcacagagggatctgttgtcctgggggcctcgtgtctccaacagtagcacatcgtctttgagaggccccagggagtcagcccacaagcactcctgcagctgcagcttctccgagctgttcacgtccacagtgacattctcccaggaaagcggtgggaccagtggctggcaggggtccccacccggagcccgccagcacagtgccgcttctgcgggcagcgagcaacggtgcgtccagcagccagctctgcagggtcagcagtcgcagtcggcggcttgccagaggttctggtgtgcgcgggggtcctccctgaaggggcagatgttcgtcctaacggagtcaggttccagaggccacacctgaatacagaggcaggggaaccaggtctgtgtggttcaaggtaatgatctgcggtccagtctgattccagtacagggagaggccgaagtgctgctcctcagagacattcagaaccagatgcacgttgtcaccatctgctgacacgttgagccaggcagggcaggcagctgctgtgtgtcgttgagttccttctcgtacctgggctgagtataggaccagattcgtacctcactccctagggcagcctcgaagcagtcatataccacagagcccacagactgaccaaactgcacaagggcagcaggcacttgcacctccagcaggacgcagcgggcagtagggtaggcctggaaggagagcacgacttgggcctggagagaggcatgcacggccaagtggacagccacacgcagacagaggtcacagtcggtctccttctggcacctcagcaccagctctgtctgcaggtgcgtaggcgccagcacggggcccggagcaggcacgatgtccccaggcaggcagagtatgtcactgtcccagaggcggcaggagaggcccggagagcagtgggtagcgtcctgaggccccacaagcctctccagagaaaggaccactgggcttcggcccagtgccaaggacagcaagaaccagggcacaggcatcttctaggtgccaggtggcacccaggcctgaggccctgtgctgnnnnnnnnnaaggggggcagacaccccagtcagcccgtgtctgtgggtggcaggggctggaatccctcttcagcctccagagggggcggagggggctgtgctgggtagtttgtgcactctctgtcctgggagtcctg

SEQ ID NO: 15242 - DNA, 843 bp, Homo Sapiens
ggatgagcatagcacctgcagcaagatggatgtgggcagcaaagaggtcctgatggagaggcgggggactactccgcagctccccggggccgaatttggcattccctgctgcccagtgcacctgaaacgccttcttatcgtggtggtggtggtggtcctcatcgtcgtggtgattgtgggagccctgctcatgggtctccacatgagccagaaacacacggagatggttctggagatgagcattggggcgccggaagcccagcaacgcctggccctgagtgagcacctggttaccactgccaccttctccatcggctccactggcctcgtggtgtatgactaccagcagctgctgatcgcctacaagccagcccctggcacctgctgctacatcatgaagatagctccagagagcatccccagtcttgaggctctcactagaaaagtccacaacttccaggccaagcccgcagtgcctacgtctaagctgggccaggcagaggggcgagatgcaggctcagcaccctccggaggggacccggccttcctgggcatggccgtgagcaccctgtgtggcgaggtgccgctctactacatctaggacgcctccggtgagcagggtcagtggaagccccaacgggaaaggaaacgccccgggcaaagggtcttttgcagcttttgcagacgggcaagaagctgcttctgcccacaccgcagggacaagccctggagaaatgggagcttggggagaggatgggagtgggcagaggtggcgcccaggggcccgggaactcctgccacaacagaataaagcagcctgagatcgtccctgtggctgaggat

SEQ ID NO: 15243 - DNA, 863 bp, Homo Sapiens
  misc_feature (792)..(796): n is a, c, g, or t
  misc_feature (800)..(800): n is a, c, g, or t
  misc_feature (802)..(803): n is a, c, g, or t
  misc_feature (806)..(807): n is a, c, g, or t
  misc_feature (815)..(818): n is a, c, g, or t
gggggctgggaggcgggacgaattattggttgggggaaacccacgaggggacgcggccgaggagggtcgctgtccacccgggggcgtgggagtgaggtaccagattcagcccatttggccccgacgcctctgttctcggaatccgggtgctgcggattgaggtcccggttcctaacggactgcaagatggaggaaggcgggaacctaggaggcctgattaagatggtccatctactggtcttgtcaggtgcctggggcatgcaaatgtgggtgaccttcgtctcaggcttcctgcttttccgaagccttccccgacataccttcggactagtgcagagcaaactcttccccttctacttccacatctccatgggctgtgccttcatcaacctctgcatcttggcttcacagcatgcttgggctcagctcacattctgggaggccagccagctttacctgctgttcctgagccttacgctggccactgtcaacgcccgctggctggaaccccgcaccacagctgccatgtgggccctgcaaaccgtggagaaggagcgaggcctgggtggggaggtaccaggcagccaccagggtcccgatccctaccgccagctgcgagagaaggaccccaagtacagtgctctccgccagaatttcttccgctaccatgggctgtcctctctttgcaatctgggctgcgtcctgagcaatgggctctgtctcgctggccttgccctggaaataaggagcctctagcatgggccctgcatgctaataaatgcttcttccaannnnnaaanannaannaaaaaaannnnccttggtggccgcctcgggccctccagaagctttcttaaaccttc

SEQ ID NO: 15244 - DNA, 1894 bp, Homo Sapiens
  misc_feature (1107)..(1201): n is a, c, g, or t
  misc_feature (1205)..(1206): n is a, c, g, or t
  misc_feature (1208)..(1209): n is a, c, g, or t
  misc_feature (1220)..(1228): n is a, c, g, or t
  misc_feature (1315)..(1327): n is a, c, g, or t
  misc_feature (1408)..(1416): n is a, c, g, or t
  misc_feature (1444)..(1457): n is a, c, g, or t
  misc_feature (1570)..(1584): n is a, c, g, or t
  misc_feature (1586)..(1598): n is a, c, g, or t
  misc_feature (1600)..(1614): n is a, c, g, or t
  misc_feature (1616)..(1618): n is a, c, g, or t
  misc_feature (1620)..(1625): n is a, c, g, or t
  misc_feature (1627)..(1627): n is a, c, g, or t
  misc_feature (1629)..(1637): n is a, c, g, or t
  misc_feature (1639)..(1639): n is a, c, g, or t
  misc_feature (1641)..(1641): n is a, c, g, or t
  misc_feature (1643)..(1645): n is a, c, g, or t
  misc_feature (1647)..(1648): n is a, c, g, or t
  misc_feature (1650)..(1651): n is a, c, g, or t
  misc_feature (1656)..(1656): n is a, c, g, or t
  misc_feature (1663)..(1678): n is a, c, g, or t
  misc_feature (1685)..(1685): n is a, c, g, or t
  misc_feature (1695)..(1799): n is a, c, g, or t
  misc_feature (1824)..(1824): n is a, c, g, or t
  misc_feature (1850)..(1850): n is a, c, g, or t
gggctcgctcaatttctcacagggctgcgcaggtttcccccgtctgcgaatggaccactggaggggttcaaaggttcgcgtcccagtacgggaatgagcctctttgatctcttccggggctttttcggctttcctggacctcggagccacagagatcccttttttggagggatgactcgagatgaagatgatgatgaggaagaagaagaagaagggggctcatggggccgtgggaacccaaggttccatagtcctcagcacccccctgaggaatttggcttcggcttcagcttcagcccaggaggagggatacgtttccacgataacttcggctttgatgacctagtacgagatttcaatagcatcttcagcgatatgggggcctggaccttgccttcccatcctcctgaacttccaggtcctgagtcagagacacctggtgagagactacgggagggacagacacttcgggactcaatgcttaagtatccagatagtcaccagcccaggatctttgggggggtcttggagagtgatgcaagaagtgaatccccccaaccagcaccagactggggctcccagaggccatttcataggtttgatgatgtatggcctatggacccccatcctagaaccagagaggacaatgatcttgattcccaggtttcccaggagggtcttggcccggttctacagccccagcccaaatcctatttcaagagcatctctgtgaccaagatcactaaaccagatgggatagtggaggagcgccggactgtggtggacagtgagggccggacagagactacagtaacccgacacgaagcagatagcagtcctaggggtgatccagaatcaccaagacctccagccctggatgatgccttttccatcctggacttattcctgggacgttggttccggtcccggtagccttgttaaccctcagaggccttcaagtcctttccacctctcacccattgcccaccattaataagcttagcttctcttgccacctcaggggcttggatatgtggaatagtgaactggggccatgtcagtttgtcactcacccaaactgaccaataaaacctttatttatgctannnnnnnnnnnnnnnnnnnnnnnnnnnnnnnnnnnnnnnnnnnnnnnnnnnnnnnnnnnnnnnnnnnnnnnnnnnnnnnnnnnnnnnnnnnnnnnaggnngnnacccaaaaccnnnnnnnnntattcccaaacccttgcgttgggggcgcggccacaagtggttgggggcccccgggcccccccggaatcctttagaaaaccttgtccnnnnnnnnnnnnnccgcaaatctaaaaaaaaaaaacggccaggggtgcccccaggaaaacaaacggaatgcaaaaggggtgtggctgccccccnnnnnnnnnccccccgggggagccccaggggcttctnnnnnnnnnnnnnngggccggcccgaccgccttgcgggttctgccgaaggcgcagggtcctcaaaaagaaacccccccgcctcaccagtgcacaaactgccgcccggagcagctctaaacaaaaaannnnnnnnnnnnnnngnnnnnnnnnnnnngnnnnnnnnnnnnnnngnnncnnnnnngncnnnnnnnnngngngnnngnncnnggggngtggccnnnnnnnnnnnnnnnncctggcngcgcccgggnnnnnnnnnnnnnnnnnnnnnnnnnnnnnnnnnnnnnnnnnnnnnnnnnnnnnnnnnnnnnnnnnnnnnnnnnnnnnnnnnnnnnnnnnnnnnnnnnnnnnnnnntccggtgccgcggtgcgctggtggntgctggcgcgctgcgtgcgcgcggcngttcggcgtccgttggcgtcggtcgctgcctgcccgcccgcgaa

SEQ ID NO: 15245 - DNA, 443 bp, Homo Sapiens
ggggccgcgacctcggctcgagaaggtgctttagtctgaagatggcggcctcagcagcgcgaggtgctgcggcgctgcgtagaagtatcaatcagccggttgcttttgtgagaagaattccttggactgcggcgtcgagtcagctgaaagaacactttgcacagttcggccatgtcagaaggtgcattttaccttttgacaaggagactggctttcacagaggtttgggttgggttcagttttcttcagaagaaggacttcggaatgcactacaacaggaaaatcatattatagatggagtaaaggtccaggttcacactagaaggccaaaacttccgcaaacatctgatgatgaaaagaaagatttttgagactgcagcctattaataaagttaacataactgagaaaaccaacaagaaaaaggagaaaataaaacatgtcg

SEQ ID NO: 15246 - DNA, 637 bp, Homo Sapiens
  misc_feature (388)..(507): n is a, c, g, or t
  misc_feature (516)..(529): n is a, c, g, or t
aactatgcttcgtggtgttctggggaaaacctttcgacttgttggctatactattcaatatggctgtatagctcattgtgcttttgaatacgttggtggtgttgtcatggtgccaatgggtcatgtttggttagaaggtgacaatctacagaattctacagattccaggtgctatggacctattccatatggactaataagaggacgaatcttctttaagatttggcctctgagtgattttggatttttacgtgccagccctaatggccacagattttctgatgattagtaagcatttattcttttgacttgattattgtctccttttcatgtgaatttattactcccgttgaaaccgtgtacttaccaataaactatttgctattcnnnnnnnnnnnnnnnnnnnnnnnnnnnnnnnnnnnnnnnnnnnnnnnnnnnnnnnnnnnnnnnnnnnnnnnnnnnnnnnnnnnnnnnnnnnnnnnnnnnnnnnnnnnnnnnnnnnnnnnnttggggggnnnnnnnnnnnnnnaaaaattttttaaaccctttgtttggggcccgggcccaaaaaggaaagggaactgggccttcccgtttcccaaaaaaaccggggcaaggaatagggttggattccccc

SEQ ID NO: 15247 - DNA, 507 bp, Homo Sapiens
  misc_feature (35)..(35): n is a, c, g, or t
  misc_feature (43)..(43): n is a, c, g, or t
  misc_feature (66)..(66): n is a, c, g, or t
accccataaaagatctgtgcctgaggtggattagnccaaaggnggaaaagacttgcagttgagatnggaggaaggcccactgtctccctgaactgccccctggggaacttgaatgtcccgggtattaaaacacggattgtaccattggtccagttctgagatgggagaaataccgccctatggtgggaggcgagacatgtttacagcaatgctgccttgttatcctttactccactggagatgtctgggtggagagaaacataaatctggcttacatgcacgtccagtcatagtaccttcccttgaacttcattatgtcatagattctattgctcacgtttgttgctgaccttctccttattatcaccctgccctcctactacattcctttttgctgaaataatgaagataataatcaataaaaactgagggaattcagagacctgtgccagtgcaggtccttagcatgtaagcgcaggtcccctgggcccgctgttgtttctctat

SEQ ID NO: 15248 - DNA, 914 bp, Homo Sapiens
ctagagatcccagctgtctcgattagttcttgaaaagatggtttccacttattgtgaacttcaataggaccaagttcaaaggcaaatcacgataaaaactgccattgtcttaaattctgcaggctaagagtttcagacaagctgcggtgaaaagccacggttgagaaacccagtgaggcacagggacacagcacggacactttgggttttggagttggaggaaattggagtaaaaagttgattttgtgtgcaatacttttagacgctctaggaagacccaaaatcatgatagccgtagcagtctgtgaaaaagtcactgtagcctgctgtcgccgagttgcctccgtacccatagcttccatacccagcaccggcattcatgtagcctccatggttggcgccaccaaatcctcgcccgcgccctcgtccccggatgctcccgcctcttccccgccctcgaaggttggggggtgggggcacttcgttgtgcatggggcctcccatgccgaagccagggttatgtggcttagcagcaaatctcggtccccctctgacgggtactggggctctcttcttctttgttggcatcaagggcgagaggggtgtcagggaaaagcttttctagggcagcaagagcagcgtaggccttcgccacctttttgttggaaccagcaccttggaacttctgtccatccacttcgacctccatgacgaagcgcttgtcgtggctgcccccggtctcggagatgagctcgtacttgagcccacgcctcttctcgttcagctccatgactgggttcttgccgtgctttgtcaggatcggcccctgctgttttacgttctcggcagtggcatctgagggaaaggccgcactaggggtggagacagcttctaccactggggcaggggcacca

SEQ ID NO: 15249 - DNA, 531 bp, Homo Sapiens
ccgtctcttagaaagtccattagatttgatggtcaaaaacttgaaatcaagagagactttcctttcagccattctgctcttaggtaggaatttgttacttgatatttgattttctttctgtttgactttgtaaatttctgccaggtgcgccatttatatgatactggcgaaacaaaagatattcacctggaaatggagagcctggtgaattcccgaaccacccccaaattgactcgcaatgagtctgtagctcatcacagcatcatgaagcattcaccaacccagagctctccaatcctgccacttaggagtttttaacggagtttcattcagtagggatgattgcttaaatcactggccaactcatctccagccccctaccctccctggagattggaagccatcgaggagaccccagctgccagctatcttattaacatgcaaaatgaacccttatcactaggagatgctcaagggttttaggagctgtgtgccaggaactggtaacaaagaccaaatatttattttgta

SEQ ID NO: 15250 - DNA, 816 bp, Homo Sapiens
  misc_feature (98)..(98): n is a, c, g, or t
  misc_feature (168)..(168): n is a, c, g, or t
ccactcaaagcgggcaacatgaatggcacgattaaggaccacacgccgcccgttctgaaaggccaatgatgccacgatatgtccccacaaaaggtgtnataggagattatcccctcaccctggttgtggccagactaacttgcaggacaaggaggacaaaataaaggnaagtcttttcccgctaatggtgacatcggccggcttcggctggtcaggaacttggtcacaggtttttcaaaggggctacgccttcatcgaatacaagaaggagcgtgccgtgatcaaagcttaccgagatgctgatggcctggttattgaccagcatgagatatttgtggactacgagctggaaaggactctcaaagggtggatccctcggcgacttggaggcggtcttgggggaaaaaaggagtctgggcaactgagatttgggggacgggaccggccttttcgaaaacctattaacttgccagttgttaaaaacgacctctatagagagggaaaacgggaaaaggcgggagcgatctcgatcccgagaaagacactgggactcgaggacaagggatcgagaccatgacaggggccgggagaagagatggcaagaaagagagccgatcagggtgtggcccgacaatgactgggagagagagagggacttcagagatgacaggatcaaggggagggagaagaaggaaagaggcaagtagaggcccaacagcagaaccccaaagtgaagttacagtggaaatgagtggagggggattgtctttcaacgcagcgtgagtctaatggttgaataaaacttactgatgatcc

SEQ ID NO: 15251 - DNA, 881 bp, Homo Sapiens
tgcgctgcaaaatgtgcaggctcgaatacggatggtcctcacctatctgtttgctcagttgagcctctggtctcggggtgtccaccgtgggctcctcgtgctgggatccgccaacgtggatgagagtctcctgggctacctgaccaagtacgactgctccagtgcggacatcaaccccataggcgggatcagcaagacggacctcagggccttcgtccagttctgcatccagcgcttccagcttcctgccctgcagagcatcctgttggcgccggccaccgcagagctggagcccttggctgatggacaggtgtcccagaccgacgaggaagatatggggatgacatatgcggagctctcggtctatgggaaactcaggaaggtggccaagatggggccctacagcatgttctgcaaactcctcggcatgtggagacacatctgcaccccgagacaggtcgctgacaaagtgaagcggtttttctccaagtactccatgaacagacacaagatgaccacgctcacacccgcgtaccacgccgagaactacagccctgaggacaacaggtttgatctgcgaccatttctgtacaacacaagctggccttggcagtttcggtgcatagaaaatcaggtgctacagctcgagagggcagagccacagtccctggacggcgtggactgaggccggttccttcctggaggcctcctgtcctcggggaccccagcacctcatcatcagcattgctggagccaagggtaggagccctacactaggagcccaggatgggacggcgcatcagccgagagggagggaacttttcagtcaaattcctcaaaaagaggctggaataaagcctgggcttaaaaagaaaaccaaa

SEQ ID NO: 15252 - DNA, 1783 bp, Homo Sapiens
  misc_feature (945)..(945): n is a, c, g, or t
  misc_feature (967)..(967): n is a, c, g, or t
  misc_feature (1307)..(1429): n is a, c, g, or t
gggcggctggctaggctgtcaagtactcccaggaaggcggacctggacccagagatgcccgcagagggcaaggcagagcgcaagccccatgactgtgagtcctctactgttagtgaggaagactacttcagcagccacagggacgagctccagagcagaaaggccattgacgctgccactcaaacagagccaggagaggagatgccagggctgagtgtgagtgaggtgggaacacaaaccagcatcaccacagcatgtgctggtacccagactgcagtcatcaccaggatagcaagctctcaaaccacgatttggtccagatcgaccactactcagactgacatggatgagaacattctctttcctcgaggaactcaatctacagaagggtcaccagtctcaaaaatgtctgtatcgagatcttccagtttgaagtcttcctcctctgtgtcttcccaaggctctgtggcaagctccactggttctcccgcttccatcagaaccactgacttccacaatcctggctatcccaagtacctgggcaccccccacctggaactgtacttgagtgactcacttagaaacttgaacaaagagcggcaattccacttcgctggtatcaggtcccggctcaaccacatgctggctatgctgtcaaggagaacactctttactgaaaaccaccttggccttcattctggcaatttcagcagagttaatttgcttgctgttagagatgtagcactttatccttcctatcagtaactgctccgtgttcagactcctggtttcttccaggcttacagtggacatcatcagcttcctgctttaaaaaatatcttatgtccctaattgcctttcttttacctgactttgtcacctttgttgtctttgaattctttaggctgcatattattttacatgctttgttttgtcatggatatnaccaggtattgggttttatggntttaaacactatgggataaagggggtttggttttgcacaatttttaatagtcatgcactacataatgatgtttttgggtcaatgacagaccacgtatatggttggcagtctcataaaattataatactgaatttttaccaatacccttttctatggttaagatacaaataccattatgttacagttgcctacagtattcagtgcagtaacatgatgtacaggtttgtagcctgttttgcatttttcttaggttgtatgctcttctgttttaaaggtttgaatcaccagcatttttgtgatcaaaatcctatttagaaaaaataaaactactttctgtttnnnnnnnnnnnnnnnnnnnnnnnnnnnnnnnnnnnnnnnnnnnnnnnnnnnnnnnnnnnnnnnnnnnnnnnnnnnnnnnnnnnnnnnnnnnnnnnnnnnnnnnnnnnnnnnnnnnnnnnnnnncctttcattttggcccgcgggcccaaaaaggaaggggaacttggcctaaaattgtttcctaggaaaatcttggttttgccgtccgcgcttgctttctaaaaattattaaaacccccggtgtggagcgcgaggggtctccaaaaaaatccaaaagggaagttcttaagtgtttttcctggaaaaaaaccccccgggaagccacaagggggtgttttttccccaaataaaaaccacccccgggggattaaccggaggtatttgtaaaaaatcttttaaggggttttctggccggacttgttaaagcctctcccaacgcgggggtttgtaaacccgggaacttcaccaacaagactt

SEQ ID NO: 15253 - DNA, 502 bp, Homo Sapiens
cggcaagtagcagataagtgctcttctaatttcagtttcctagctttcatgtagaatgaacaattatagtaataaaggctgaaggaaaacaaagatattattgagatacaacagggacagtctaaaacagcatcagaaagcaagttcatgctgttcaacattagcaggcaagggaaatagggaaagaaatacgcaaacgtggctatcacagaaaagccagcttattactttaggttctgtgggagactacaggtcacataaaagcagtctcaataataatgtgaccacatgtgcaatcaacatttacaaaatgaaattatatatcatgtataacacaaatgttttgcctatactttaatttacaaagccacataccgaatgactgaaatgtacataaacattcttttatgatagaccagaacatctatattatcatgacttagaaaaagaaaacagatgcaaaatagtgttgagaatttctggcctgaaattacaagactaa

SEQ ID NO: 15254 - DNA, 408 bp, Homo Sapiens
gggtgctctaagctgcagcaagagaaactgtgtgtgaggggaagaggcctgtttcgctgtcgggtctctagttcttgcacgctctttaagagtctgcactggaggaactcctgccattaccagctcccttcttgcagaagggagggggaaacatacatttattcatgccagtctgttgcatgcaggctttttggcttcctaccttgcaacaaaataattgcaccaactccttagtgccgattccgcccacagagagtcctggagccacagtcttttttgctttgcattgtaggagagggactaagtgctagagactatgtcgctttcctgagctaccgagagcgctcgtgaactggaatcaactgcttcaggctcctttccctctcctttatagaatattagccgtgt

SEQ ID NO: 15255 - DNA, 762 bp, Homo Sapiens
ttgcagtttcacatgtttatttttggcaggaaggaaatcattgcaaaccttttgattgacaatactcgcccctggaaacgtgcacattccgcatgtagcatttcctaagtaatgctggattgtttatcacattcaaatgtccagcagaaatccatgactacccagacaccagcatctccactacccggggtgggggagggtgtgtcagtctgcagagaagctcctgggagaatggaacaggaacagacatgatcaaagttacagtacagtaggaacagaggcagccagccaattttgcacagttaactgcaagtacgtcaagccattcactcttctcgaaccctggcatgccaactgtccagcacagcacctttaaaagcagaggcacaaacgtaggattgtttgaccatagggctgtgtggttctggattttttattagaaagccatctttaaaaatacagggttgtaaaatgttgccaggttacagacttacaggttttctttaaaacaccaaaagttcaaatgctgcaaccatgacaagtcagcatcattagggcatcctcgtgtccccagagacatctcatcaaaattgcaccccgtcaaaggagcttcctcaccatcacctgtggcaggtggcatccctttttcagtatgcaaatgctttatttacaaacagctaatgcatggaaccacagaccaacacgtaggattccagaacaaatggaagacagagcattaacaacattgggagtgcctgtgca

SEQ ID NO: 15256 - DNA, 650 bp, Homo Sapiens
gcggccgcaagccgccagggggcgccgcagagcgcgtgcgcgcaacggggaccactgtccgctcgggcccgggcgttgctgccgtctgcacacggtccgcgcgtcgctggaagacctgggctgggccgattgggtgctgtcgccacgggaggtgcaagtgaccatgtgcatcggcgcgtgcccgagccagttccgggcggcaaacatgcacgcgcagatcaagacgagcctgcaccgcctgaagcccgacacggtgccagcgccctgctgcgtgcccgccagctacaatcccatggtgctcattcaaaagaccgacaccggggtgtcgctccagacctatgatgacttgttagccaaagactgccactgcatatgagcagtcctggtccttccactgtgcacctgcgcgggggaggcgacctcagttgtcctgccctgtggaatgggctcaaggttcctgagacacccgattcctgcccaaacagctgtatttatataagtctgttatttattattaatttattggggtgaccttcttggggactcgggggctggtctgatggaactgtgtatttatttaaaactctggtgataaaaataaagctgtctgaacgttaaaagaaaagaagtggaggagttgatgaaacccc

SEQ ID NO: 15257 - DNA, 416 bp, Homo Sapiens
ccccaggacctaccaccctctgtccttgcagtggaactagaggaggatggaagagcccgacctctggtcctgcacatgtccaccctcctgcggatgatccccaaccatggcagaggacaaagagagagtcagcactggaaccaagtttgccctcaagctctggctgcaacatctgggcagaacacccccaccgtgtaaaagtgcagcttacctggacccagggccagcaaaggaagaatggaacatggaccctcttccccctgcagatcatggctaaggccttacatcctcctctgtcatactggagtaggaggcaggggaagtcatctttggagtattttggtttttcttatttatgtacaaaaaagtccacatccccaatccaaaataaagttctctgtccatctctgaaaaaa

SEQ ID NO: 15258 - DNA, 1067 bp, Homo Sapiens
gaccagaattagagataccttgaactggtagaggctgcagctcccaatgctgggggactcccaaaccaccaaggcttccagaagaggcagcagcaaatccagagtttgtttgaaaactaaagttctgagcattatcactgctgctgttattgactgggaaagcctggcgacataaatgttgctgcttgactgctgccaaatccaaatgcaggtgctgcttgatttactccatcctgttacatcagagagcaaagctactttagttgatatatttagacttttcagttcatttaccctgttcctccattgatttattaaacgttggacagaatttagataactctgtaagttattgctggttaagaagttatggtattcaagcctcaattcctctggtgaaatgtctgtaaaacctgaaatattaggtttctttttcactggtgaataaacagaaaacatccactgccctgatgattcccaaacctccatatcttttacaattccttccagaagtttcttttcatctttctgctcatcaggactaagtgaagcaaatgggttctcagacaatccaaagccttccttcctgttagttgaagctccagaatcaaaagaactgaaatatggcttttcttgatctctgctgcccccccatggtgtggatttggagaaactggatggctggatgacattggaatatctctggctagttgtattccatccacgtctattattacctgaaggctgctgctgcggttgctgccgtcctcctcctgcacccctagcaccgggatgttcgttccagcaccgatctccaaagcggcaccggccttgaaggaagaattgacaaatggccattgcgacggcgtcgctgacggagggcgtcttcagtctgcaccgttcgatgcctgttactgggcagagagccctaaggcaacctcggcgcccggccgggctactgtgacgtcatcttctcgcgcctgggaaggcctttttccgcctctcacccggcagtgccatgagacgcatggacttgagccaatagacttgagaagagcggaccgctc

SEQ ID NO: 15259 - DNA, 683 bp, Homo Sapiens
ctccagaagaatagaagattcagtgatattcctagacattggtgctcagtgagcaggagaacagtaatcatgttgtcgtctactgagaagggcaaggatgaaggaatgagcaggtttgggcaaagaactaagaattgagtttttgaatgtttgtttttagactctaagcagaatccaaatggagatgctcagtaaggagatggatatctaggtcgagagctcaggcaagaggctgagagtaagaacataaatccaggagtcaccagaatacgctaggtatttaaagctaagaaattagatgaggttctttttaaaatcttacttaataaaaagtacagaaatttttctaagtgctttacaaatattaactcaaccctcttaacaactctctgaggtaagaactattattactcttatattccatattaaagataaggaaactgagacacagattatctaagcaactaggccaaaaatcacactaccggtaagcagcaaacctgggactgaatccaagcagtgtggccccagtctgaattcttaacactaagctaaattgcttcctaatactctaagggaacaaaacaagtggaaggagagaagaggctccggaactgagccgcagggcactcaacttttagaagttgcaaaaaggggaagccataaaattaaaaggagctagt

SEQ ID NO: 15260 - DNA, 842 bp, Homo Sapiens
  misc_feature (817)..(817): n is a, c, g, or t
ggggcgcacgcccggaagcggcgagggtagccatgacggcctccgtgctgcgaagtatctcgctagccctgcgcccgactagcgggcttctgggaacttggcagacgcagcttagagagactcaccagcgagcgtcattgttgtctttctgggaactcattcccatgagatcagaacctcttcgaaaaaagaagaaggtagatcctaaaaaagaccaagaagcaaaggagcgcttgaaaaggaagatccgaaaactggaaaaggctactcaagagctaattcctattgaagattttattacccctctaaagttcttggataaagcaagagagcggcctcaggtggagctcacctttgaggagactgagaggagagctctgcttctgaagaagtggtccttgtacaagcagcaagagcgtaagatggagagggacaccatcagggctatgctagaagcccagcaggaagctctggaggaactgcaactggaatccccgaagctccatgctgaggccatcaagcgggatcctaacctgttcccctttgagaaggaagggccacattacacaccaccgatccctaactaccaacccccctgaaggcaggtacaatgacatcaccaaggtgtacacacaagtgggagtttaagagatagacttgcaggcctgctatcccttaaacatgctgccccctgagagtagggaatgaacccagggtttcaaggtcttgccttccccccagaaatcaaggcatggctggttaataaaataactggctcttcagcccacaaaaatacaagacccgcatgatatttccngtatttctttgtgtcgcgccccgcc

SEQ ID NO: 15261 - DNA, 487 bp, Homo Sapiens
cgagggaggtccagccagcgcgttacacctgccctcgctgtaatgcgccctactgctcgctgcgctgctaccggacgcatggcacctgcgcagaaaacttctaccgtgaccaggtgctgggagagctccgcggttgcagcgctcctcccagccgcctagcaagcgccctacgccggctgcgtcagcaacgcgagaccgaggacgagcctggggaagcaggcctcagctccggcccggcgcccggcggcctatcgggactctgggagcggctggcgccgggcgaaaaagctgccttcgagcggctgctgagccgcggtgaggccgggcggctgctgcctccatggcggccgtggtggtggaaccgcggagccggaccgcagcttctggaggagctggataatgccccgggtagtgacgccgcggagctggagctcgcccctgcgaggaccccgccggattctgtgaaagatgcctccgccgcggagcc

SEQ ID NO: 15262 - DNA, 1018 bp, Homo Sapiens
  misc_feature (649)..(653): n is a, c, g, or t
  misc_feature (655)..(663): n is a, c, g, or t
  misc_feature (665)..(667): n is a, c, g, or t
  misc_feature (670)..(671): n is a, c, g, or t
gggacagccttccactaacatcccataggagcctctctccctactgctgctacacaagaccctgagactgacctgcaggacgaaaccatgaagagcctgatccttcttgccatcctggccgccttagcggtagtaactttgtgttatgaatcacatgaaagcatggaatcttatgaacttaatcccttcattaacaggagaaatgcaaataccttcatatcccctcagcagagatggagagctaaagtccaagagaggatccgagaacgctctaagcctgtccacgagctcaatagggaagcctgtgatgactacagactttgcgaacgctacgccatggtttatggatacaatgctgcctataatcgctacttcaggaagcgccgaggggccaaatgagactgagggaagaaaaaaaatctctttttttctggaggctggcacctgattttgtatccccctgtagcagcattactgaaatacataggcttatatacaatgcttctttcctgtatattctcttgtctggctgcacccctttttcccgcccccagattgataagtaatgaaagtgcactgcagtgagggtcaaaggagagtcaacatatgtgattgttccataataaacttctggtgtgatactttcaannnnncnnnnnnnnnannnaannaaaaaattgtccggccgccctccgcccctcgaagaaggctttcctaaaaccatttcgttttgggcgccgcggggcccagttagggtaaagtgaaacatgggtcaatagcctgttttccctaagggaaatccctgggccaatgaactaagggccttgggatttcctcccccaaattaaaaaaaccgcccccgggcggccaaacccggaggcgtgttcttgaaaccaaaattcccaaaatgggaagtttcttggaagggtccaatataactggggaatcctaattcaaaacagggggaagtccccaaaggccgaaaggccttccgaataattcaaaaaatttaaagggg

SEQ ID NO: 15263 - DNA, 1513 bp, Homo Sapiens
  misc_feature (815)..(848): n is a, c, g, or t
  misc_feature (1433)..(1433): n is a, c, g, or t
ggagagtctggaaatcgtgaaagagcttgaccgatgaaatgggcctggctgtcgtatcggtaatttggtgaatgttgcttaagatcagcctggaaaggtagttagtcagatccgaagtgacatatttgcactgccaaaggaggctctggaggttaaagtatgtgttttaatttcgttgttgaggccatataatgcagagttgacggaccgaccttatgagtcaccttggagcggagtagtggagacttaaagacagactaccctggagctggcttcaaactagttcttaatattgtgactcgaactccccatccccagaaattctcagatcttagaagccaaagactggcaaggatactagagggaactactcgagtaggcgaggtcagactacataccgaataggagtccttccaaaaatatacagaaggctgaggccggggtgctagagaaccttgccgtgctggaattcacgttgacgcccccacggagctctgctgcagagccctcgagtcccgcacttccggccgccaggtggcgctggttctgttgccaactcggagagactgagctgggccacgcaagatggcgccgtccgccttgctgcgtcccctttcccggctgctggcccccgccaggctcccgagcgccccttcagtgcgatcaaagttctacgtgcgagagccgccgaatgccaaacctggactggcctgaaagttgggttcacgttgggcaccactgtcttcttgtggatctatctcatcaaacaacacaatgaagatattttagaggacctccacagacgcggcgacgannnnnnnnnnnnnnnnnnnnnnnnnnnnnnnnnntccaagaaacttttctagaaccacttccgctttgggcgccgcggggcccccggtacggttaaggggaacccatgcgcgtcttacgttgggcttttacgcccaggcgagaacctcgcgtgggcctcctttgcccccacacgcgggcgcttcggcgcattctacctcccacctccgatcccggtagcagagatcccgggcgccacggggggcgggggccaacaaacccccccagaaggccgggccctttcctgtgggaaaaacatagactgagctcccccaaccaggctcggcgccaggtattttcttcgcgcgcgggtttccccccttttagaactgcgggcgggtctctttcacctccggcctacccgggtaatttttcttatcgagcgcgcccggggcattcgcggagtattattcccccgcccgtaacggttttcccccgccgccccgggggatcacactcccccgctttcgccgatgagccacccgcgcgttgtttaccgcgtctcccctcccggagaccccctttcgcggcccccgggattattgccgcacggacccctcctcccccctataccgccgccnttgcattccgatctcctccgcacctccgccgcctttgtggccgtccaagcgccacctcgtgctaaagcccctggcaatca

SEQ ID NO: 15264 - DNA, 657 bp, Homo Sapiens
ttttgttttaaaaaagtgacattgctttattactattggcaggtggggcctgcatgaggtggttagtgtgctcaggggatgggtgggctgtggagatgatgacagaaaggctggaaggaaagggggtgggtttgaaggccagggccaaggggtcctcaggtccgcttctgggaagggacagccttgaggaaggagtcatggcaagccatagctaggccaccaatcagattaagaaattctgagaaatctagctgaccatcactgttggtgtccagtttcttcatcatgcggtcaaggacaccagggtccttctgattctgcagagaaaataataattacacctttatatcgcatcttctaatgtgctttcaaatatgctgccacattttattctcacaggagtataaggtacaggatagggattattaatattcccatttgccagatgcagaaacagactaaaagaggtgaagtgacctgcctaagggccagacctgggccttgaaccaaaggttttcccactcctagtccagggctctttccatgatataaggggctattcagtttggtaaagccagtggaacactttctttcaagtgttgcatgcacttcccaatagataaactatataaaagtacagcgggtacagggtgaaaa

SEQ ID NO: 15265 - DNA, 806 bp, Homo Sapiens
cacagcccctgactgccgcagcccccacagagcccgccgcacaccccacgtcccccacgccagcgcccagccatggaggccatcaagaagaaaatgcagatgctgaagttggacaaggagaatgccatcgaccgcgcggagcaggcggaggcggataagaaagactaggccctgtctaggaaatgggaatttacatcctaaaacctagttgttcatttgtttagagtatctatagcaaaataggttacatgtagtttgaaataaggtatcctgagttactttggcaacaagttcttttacccttacccgtggtatttgaaaaaaaatcaaggtaactgtctgaatactttaatatcagcttgttttgtgaattctctgaatactgtcaacactcttatctaagtttgcctttatgaagcagtggcagcattttgaattacttttcaaagaatactgttcatatgcattgtttttgtgtttcaaactaaatacaggcagttttgtgccagctgtgatattgtgcataccatatggaccattttaaagaaaattttaaaatttcaaatagattcaacaattacattacttgctttcacattttaaaggcactttaaaaaaatctacttctcttgtaggttttgcggctagttggctattcaagaaacctcgcccctctgaatgtcatactgtaatctttaaggaagaaagctacatgaattaattgtactctatgggaaaatttctttggaaagatattttgtaaaacttttttttccaagtaaaaactttatgaaacttggtctcaa

SEQ ID NO: 15266 - DNA, 683 bp, Homo Sapiens
tagcggtccggatgggcatttcaaaacacaatcatgccttccaacagtccccaagtcatactcattccagcattacccaaaagtccaagtccaatgtctcatctgagacaagttatgtaccttctgcctatgagcctgtaaaatcaaaagctagtcacttcctagatgcaatggggatacaggcatagggtaaatacacccattacaaatgggaaaaatgggccaaaacaaagggactgcaggccccatacaagtctaaaatccaatagggcagtcattaaacctcagagttccgaaatgatctcctttgactccatgtctcatatccaagacatgctgatgcaagaggtgggtttccacaaccttgggcagctttgcccctgtggctttgcagggtgcagcctccctgctgatagctttcacaagttggtgttgcgtgtttgtggcttttccaggtgcatggtgcaagccatcagtagatctgtcattctggggtctggaggatggtggccctcttctcacagctccactaggcaatgccccagtggggactctgtgtgggggctccaaccccacatttcccttctgcactgccctagcagagattctccataagggctcaacccctgcagcaaacttctgcctggacatccaggcgttttcatacatcctctaaaatccag

SEQ ID NO: 15267 - DNA, 1255 bp, Homo Sapiens
  misc_feature (404)..(505): n is a, c, g, or t
  misc_feature (1182)..(1182): n is a, c, g, or t
tagccatggtgacactatagacccgtgtttacaaaaagcaggctggtacaggtccggatatcccgggatatcgtcgaccacgcgtccgagcggagaaaacaggataaagccattcctccttccacctagatggattgccaatcttctgccatcaatttggggaaacctgcctttgtgcccccgaggctgcctctcctcagcatagctgacttgtcatagtggatgaggtctgggctggagcagtagaagccaaggccttttttctgcaagtaatgatgtaggttatttgcagtctctgtaaccaccatccaggccagtacgcagtatttagctggggaccaagggatgggattccctactctaagaaaatacctttattttaattattattattttttgggacnnnnnnnnnnnnnnnnnnnnnnnnnnnnnnnnnnnnnnnnnnnnnnnnnnnnnnnnnnnnnnnnnnnnnnnnnnnnnnnnnnnnnnnnnnnnnnnnnnnnnntaaaataatgaagtggaatcaaggtggcaagaaaatttagaatcgtttctgataaggactgtcccttatcctaaatgtgtcttgaaggcacacgttatttccattgtcattctgactttagaaaaggcaggttggggcatgagtgggcattttcctaatgacttgctgctaggaggttataggcagggaacagtctgggagtctctaatccagagagactttcagattccctctcttcacatgaacctccattagttagattttgggaaagtgagcatgaagaagggactcagagctgccaggtacccgaggctcaggtctgacatccttgggccccttctgccacaacttgccacttcacggacttgaattatgttgcttcttcctggaaatctggcctgcagcacaggcctttcctctccaaaaagctgctgctcatttctggccccatctgctggctatctttgccatcagccatcacaggtttggcatcatcagagtctcagctagaggagctgtcactcctgccttaacgtttgcctgcgacctgaccaggggcatgacgacctgggatgtcaagtgaccattggggaacttggcacaggccaaatgattgaaggtttaattccttcttcagacccacttgatttgaccagtgggccatgggaaatagttanaattgaaaccaaaaaacctaccagggaactgcgggcataattcggggattctacctaacaaaaaattgggcgc

SEQ ID NO: 15268 - DNA, 760 bp, Homo Sapiens
ctgttccagagaaaaaagtaatcaaagatcacctgtatttagttcatcactgaatcaccaagatgaaatagagtgcaagataattaaccggggggaccaccatgaggaaaagtggagtagaagtgggaggagcctgagagagccctcagaccacgatgcagatctgattcctgagaaggagaaagaggagagagttttagatagtgatgcagttctcagagtttccacaaggctggtggggcgtcctcaagcccctcacccatgagagagaagcagagtcccccagaactgggcttttcattcccctggtgggagcccatgagaagcgagttctctgtgcaacggacttagtaaatacagaatgcactagcctgggccttctgccaatcaagtccctgccacagagacccaacagacttatttatgcctaccacaactgagacactgagaaaaagatgcaaccatgaaaagatagaaagttctaatgacacgcaaaaatagcaatcagactttctcaaatttcaaagccttcagaaatagctgagtgcagacaggccagggtggaattgacagaagactgatcaccaactagcaacacagtgagagagaaaaaattgcaactttcccacaaaactaatgcattccttgaagcaacaagtagagactgcttcatgctgagagctggaacctggggcaccccactgtaaaataacatcacattcattccttctcttttctttccatgacggacgattcagca

SEQ ID NO: 15269 - DNA, 1957 bp, Homo Sapiens
  misc_feature (158)..(198): n is a, c, g, or t
  misc_feature (222)..(287): n is a, c, g, or t
  misc_feature (471)..(480): n is a, c, g, or t
tcaagagcttagaccttttcaattgcgaggtaaccaacctgaacgactaccgagaaaatgtgttcaagctcctcccgcaactcacatatctcgacggctatgaccgggacgacaaggaggcccctgactcggatgctgagggctacgtggagggcctnnnnnnnnnnnnnnnnnnnnnnnnnnnnnnnnnnnnnnnnnaagatgctcaggtagtggaagacnnnnnnnnnnnnnnnnnnnnnnnnnnnnnnnnnnnnnnnnnnnnnnnnnnnnnnnnnnnnnnnnnngaagaaggttataacgatggagaggtagatgacgaggaagatgaagaagagcttggtgaagaagaaaggggtcagaagcgaaaacgagaacctgaagatgagggagaagatgatgactaagtggaataacctattttgaaaaattcctattgtgatttgactgtttttacccatatcccctctnnnnnnnnnntccaatcctgccccctgaaacttatttttttctgattgtaacgttgctgtgggaacgagaggggaagagtgtactgggggttgcggggggagggatggcgggtgggggtggaataaaatactatttttactgccactctttatttttttcccctactttttctttgtgtccggtttttgtccctgtaaatgcgatagctaagtacacactaagtgagcatttgttcctgactctcaaagaggatggtttggagttctcttacgtttcctggtatttcccaagtctcttgggttggttggaaggctgtggctggtctcagtttggttactcaatgcccaggaggggctgagcaccagccatatcttttgctttggttcacatgatgatacctgcttttctcaggcctgctagaggcatccaacgccctggtttgtaaatagcaacctaaaggcgtattttggcactggtctggggacattccccatctctcatcccttttcccccttcacagatggtggtgggcttcgctctacaaagaggactctgatgttactcttgagcttatgagccagagagctgaaaaccgcaggcttgttgtgttaagttacaaggaaaatggatttggtaattaaaattagaagaaacacaccttcaaacttcaacttctttacgcagcacaaaacaaactgtcctatcttgttctgtaaaatattagaacgctttgttttacaaaaaatgatgagagaattcttccacatgtacttctgtgcttagaacatttttacggacctaagcgctggagacgttgctgcatgtcggctgggttttttctttcatacacccgagcacggaaaaactaacgcaaaattgtattttcttacctagtggaaatctgaaatgactgcaaattcctagtgaatgtacaggtttgctttcgtgtccctcttctggttgctttagaagtgacgtgtaatttctgaacccatgtttcatctgtataaaagaacatctgcaccagtttttctcctgcccctcagaagagccaaactttgagttttatgtctgtttgtcattgataaatttcaataaatctttttatacaatttttttggggatggcttctttgagtccaacaggccattgatcttttcaagatgcattccagatgaactgctaggtgagggggaagcttcatttttgttacctgatagaatagcttttcttatgagatatatataatgtgatactatgtttggatatttttggtcttaaagcaagactcagtggtgtatcttcattaaaagcttcctttaaaaaagttacagagttactaaaaaaacaagtacccaaacaatcaagttgggccaaccttggaaccttgttttgaatatctttcattgttttgtttgtcgtattgtaaaaagaatgtatggttgaaaactcaggaatgtttataaaacaaattatttcacaaaaa

SEQ ID NO: 15270 - DNA, 1407 bp, Homo Sapiens
  misc_feature (40)..(40): n is a, c, g, or t
  misc_feature (43)..(43): n is a, c, g, or t
  misc_feature (88)..(88): n is a, c, g, or t
  misc_feature (169)..(169): n is a, c, g, or t
  misc_feature (529)..(570): n is a, c, g, or t
ccggccggtgtttcaggccctttaagaggcgacgctggancgnagccattttccccccttcggccgcggcgaggaggagccggagcgngagtgacaccgagccggacccagcgcgacctgcggcggctccgggtgactcgggccagtgtagaggtcctcaggccgccgnaggagcagctgggccaattccctggccgggagcggaaggggatggcgtcgggcctgggctccccgtccccctgctcggcgggcagtgaggaggaggatatggatgcacttttgaacaacagcctgcccccaccccacccagaaaatgaagaggacccagaagaggatttgtcagaaacagagactccaaagctcaagaagaagaaaaagcctaagaaacctcgggaccctaaaatccctaagagcaagcgccaaaaaaaggagctgggggacagctctggggaggggccagagtttgtggaggaggaggaagaggtggctctgcgctcagacagtgagggcagcgactatactcctggcnnnnnnnnnnnnnnnnnnnnnnnnnnnnnnnnnnnnnnnnnnggcaaatccaagcggaaggaggaggatgaagaagaaggatgatgatgatgattcaaaggagcctaaatcatctgctcagctcctggaagactggggcatggaagacattgaccacgtgttctcagaggaggattatcgaaccctcaccaactacaaggccttcagccagtttgtcagacccctcattgctgccaaaaatcccaagattgctgtctccaagatgatgatggttttgggtgcaaaatggcgggagttcagtaccaataaccccttcaaaggcagttctggggcatcagtggcagctgcggcagcagcagcggtagctgtggtggagagcatggtgacagccactgaggttgcaccaccacctccccctgtggaggtgcctatccgcaaggccaagaccaaggagggcaaaggtcccaatgctcggaggaagcccaagggcagccctcgtgtacctgatgccaagaagcctaaacccaagaaagtagctcccctgaaaatcaagctgggaggttttggttccaagcgtaagagatcctcgagtgaggatgatgacttagatgtggaatctgacttcgatgatgccagtatcaatagctattctgtttctgatggttccaccagccgtagtagccgcagccgcaagaaactccgaaccactaaaaagaaaaagaaaggcgaggaggaggtgactgctgtggatggttatgagacagaccaccaggactattgcgaggtgtgccagcaaggcggtgagatcatcctgtgtgatacctgtccccgtgcttaccacatggtctgcctggatcccgacatggagaaggctcccgg

SEQ ID NO: 15271 - DNA, 839 bp, Homo Sapiens
  misc_feature (775)..(775): n is a, c, g, or t
  misc_feature (780)..(780): n is a, c, g, or t
ggggaaggcgcacggggcgaagatggcggcggagcgacaggaggcgctgagggagttcgtggcggtgacgggcgccgaggaggaccgggcccgcttctttctcgagtcggccggctgggacttgcagatcgcgctagcgagcttttatgaggacggaggggatgaagacattgtgaccatttcgcaggcaacccccagttcagtgtccagaggcacagcccccagtgataatagagtgacatccttcagagacctcattcatgaccaagatgaagatgaggaggaagaaaagtcccaacgagctggtggatgatctctttaaaggtgccaaagagcatggagctgtagctgtggagcgagtgaccaagagccctggagagaccagtaaaccgagaccatttgcaggaggtggctaccgccttggggcagcaccagaggaagagtctgcctatgtggcaggagaaaagaggcagcattccagccaagatgttcatgtagtattgaaactctggaagagtggattcagcctggataatggagaactcagaagctaccaagacccatccaatgcccagtttctggaagtctatccgcagaggggaaggtgccagcagaactttcggaggctaactcacggtggacaggtgaactttggatatggaggaccatccgggaccgaggacttttgtgaagcccaaaggagccttccaaggcttcactggcgagggtcagaaactgggcagcactggccccccaggtggtgagtaccagctcntcagncccacagggcaggaaatgggaagccaagccagctccttcatctttaatcacgaatcaga

SEQ ID NO: 15272 - DNA, 2235 bp, Homo Sapiens
  misc_feature (1693)..(1693): n is a, c, g, or t
  misc_feature (1956)..(1956): n is a, c, g, or t
  misc_feature (1982)..(1982): n is a, c, g, or t
cgatcgactcgctccggctcccctcgccgtcctggacacggcggagtgcggagccgcccggtaagatgctctgacctttgaccctgccgttcagctctagggcccgtgcaggccacaccatgaacacctccccaggcacggtgggcagtgacccggtcatcctggccactgcaggctacgaccacaccgtgcgcttctggcaggcccacagcggcatctgcacccggacggtgcagcaccaggactcccaggtgaatgccttggaggtcacaccggaccgcagcatgattgctgctgcaggttaccagcacatccgcatgtatgatctcaactccaataaccctaaccccatcatcagctacgacggcgtcaacaagaacatcgcgtctgtgggcttccacgaagacggccgctggatgtacacgggcggcgaggactgcacagccaggatctgggacctcaggtcccggaacctgcagtgccagcggatcttccaggtgaacgcacccattaactgcgtgtgcctgcaccccaaaccaggcagagctcatcgtgggtgaccagagcggggctatccacatctgggacttgaaaacagaccacaacgagcagctgatccctgagcccgaggtctccatcacgtccgcccacatcgatcccgacgccagctacatggcagctgtcaatagcaccggaaactgctatgtctggaatctgacggggggcattggtgacgaggtgacccagctcatccccaagactaagatccctgcccacacgcgctacgccctgcagtgtcgccttcagccccgactccacgctcctcgccacctgctcggctgatcagacgtgcaagatctggaggacgtccaacttctccctgatgacggagctgagcatcaagagcggcaaccccggggagtcctcccgcggctggatgtggggctgcgccttctcgggggactcccagtacatcgtcactgcttcctcggacaacctggcccggctctggtgtgtggagactggagagatcaagagagagtatggcggccaccagaaggctgttgtctgcctggccttcaatgacagtgtgctgggctagcctgtgacccctcgggactgcctggtgcaggtggtggcagctggagggacccatgcagcacccaggtcagagcagaccctcccctgccggcctgcgccagctggacctgatggccccctgtggcgccttgacctgctgggccaggctgccctgggactctcagcccccagttgcttatccagatgtgacagagctcgacccaagccaggctgcacactcctggactgggctagcctgcactgcctgggaaagtcggccgagggcccaaagctgctgaggggtctgaggctggtgcccacccccaagctagtgtgttctctgcccctccctgcccgcgtttcagggcctcggtccatagagaacaccaccaccatggccaggtggaagggtttattagtccctgccagcagctgtcctccctggtgcaggtggcctggccagcccactggattggggacgggccaggctgggccaggtcgggggctcagtctgggaggtaataaaagcagaccgacacggagaaggacaccgacgagcgagagggtaagcctgtgccggccgacgctcgcgcctcagagaaccttcccgaanaccactgtcgtttgggcgccgcgggcccccgtaagcgcaagtggacacatgggtccatagcctggtggtcctcagggagacccctgggcccatgaccaggtgggctttggaaccccctcgcccaaatgaaagaaaacgcccgcgggcgggcagaacccgaaggcggtttctgaaacaaaaatcccggcgatggggcaggtcgctgccaggccccatttaacgtggggatcctatccaacgcagggaattcccgagcgcgggancttcccgaattatcaaaagtatcccnccccgtgccccctggcccacttccctccccgaagaacggggcgtgggaaattgtctctgtaaggcatttcctcgtcccgaaccatgggcaagccgccttccaccaaaagcggggacgtggaagtaaaacctggaacatcgccgccgcgcggtaaatcgaacggaccccttgtggggccgcctgtggcggaataaaacaattcggcgccccagtgggggaaacaacccgggggggcacaaacaaaaaagggcgc

SEQ ID NO: 15273 - DNA, 1165 bp, Homo Sapiens
ggggccggaagagtcaggttctgtgtatgtctccgcgtcttccgcggagcgggtgtgcagggcctgcagcattgaactagatgtcgtccccgcaggccccagaagatgggcagggctgtggcgaccgcggcgatccccctggggacctccgtagcgtcttggtcacgaccgtgctcaacctcgagccgctggacgaggatctcttcagaggaaggcattactgggtaccggccaagaggctgtttggtggtcagatcgtgggccaggccctggtggctgcagccaagtctgtgagtgaagacgtccacgtgcactccctgcactgctactttgttcgggcaggggacccgaagctgccagtactgtaccaagtggagcggacacgaacagggtcgagcttctcggtgcgctctgtgaaggccgtgcaacatgggaagcccatcttcatctgccaggcctccttccagcaggcccagcccagccccatgcagcaccagttctccatgcccactgtgccaccaccaaaagagctgcttgactgtgagaccctcattgacccagtatttaagggaccctaacctccaaaagaggtacccattgggcgctcaaccgaattgctgctcaggaggcccccattgagatcaagccagtaaacccatcccccctgagcagctgcagagaatggagcccaaacagatgttctgggtgcgagcccggggctatattggcgagggcgacattgaagatgcactgctgcgttggccgcctatatctccgactatgccttcttgggcactgcactgctgcctcaccagtggcagcacaaggtgcacttcatggtctcactggaccattccatgtggttccacgcccccttccgagctgaccactggatgctctatgaatgcgagagcccctgggccggtggctctcgggggctggtccatgggcggctgtggcgtcaggatggagtcctagctgtgacctgtgcccaggagggcgtgatccgagtgaagccccaggtctcagagagcaagctgtagccagaggtaccagcttcgcctggggcttcaagaacctcccatctatccccattcctgagacaggagttacagtcccttttggccctcacatccaataaagagactgataccactggcgaggc

SEQ ID NO: 15274 - DNA, 384 bp, Homo Sapiens
ccagttcctgcttcttgaaacaaccttctctatctagagcagattctgcatgagaggcccctctttaattcatattctgaaacgtgcttgttattgttgacgtacaaaaacttatgaataattcaataaatgaatcttgaaccatcctattaatcattcagtggtctaggtacccaactctagaggaaagcttttctgaaatacacggtaagtatcccccaaccctccctcaaaggaaccaattatgaacactatacagtcttctctcccttctagctcaccagatgtgctttttgatccaataaatggtctaaccccagatgaagaggcactttccaatgagagaatttgtcagaaaaggagattttctgattctgaagaaag

SEQ ID NO: 15275 - DNA, 330 bp, Homo Sapiens
cctgcctcaatcaatcaatcaatcaataacaaaaacttaaatagctattaacctcagtcttctttccttcatataaattctattctaagaccaaatagaaaaataaatgtaactaactttgcagagctattgacattgagagacctaacaacagactgcaatggggattgtaaaataacttttcagccttgcacttgctcatatatgttttgagaaaaatgtaagttaggtataacttattgtttaaactattataaggcagtgtttacataaataaatcatctctttcttggaaacattgagacaatattcagtttacttactgaccat

SEQ ID NO: 15276 - DNA, 824 bp, Homo Sapiens
ggatggtggaccatacgagcgctttctccacagaggaactgccacctcctgtccacttatcaaagccaggggaacacatggatgtgtatgtgcctgtggcctgtcacccaggctacttcgtcatccagccttggcaggagatacataagttggaagttctgatggaagagatgattctatattacagcgtgtctgaagagcgccacatagcagtggagaaagaccaagtgtatgctgcaaaagtggaaaataagtggcacagggtgcttttaaaaggaatcctgaccaatggactggtatctgtgtatgagctggattatggcaaacacgaattagtcaacataagaaaagtacagcccctagtggacatgttccgaaagctgcccttccaagcagtcacagctcaacttgcaggagtgaagtgcaaccagtggtctgaggaggcttctatggtgtttcgaaatcatgtggagaagaaacctctggtggcactggtgcagacagtcattgaaaatgctaacccttgggaccggaaagtagtggtctacttagtggacacatcgttgccagacaccgatacctggattcatgattttatgtcagagtatctgatagagctttcaaaagttaattaatgactgcctctgaaaccttgacaactaattcagattttttagcaataaccaaatgtagtaggcttaaaaaaaatcttaactccgggacacaggctactgactagctgtggcgggattcgaagaatgcatacgccttatgttgactgaaagagtatctaacaagttcttgttctacagagctgacctttc

SEQ ID NO: 15277 - DNA, 2093 bp, Homo Sapiens
  misc_feature (663)..(706): n is a, c, g, or t
gggaagagctgcgggccgggtgcggacggcggaggcggcgggactggtccctgcagctcttcagtgggtcatctgtgtgtcacagcctcagaagaccagcgagatggctgccaacaagagtaagggccagagctccttggccctccacaaggtgatcatggttggcagcggaggcgttggcaagtcagccctgacgcttcagttcatgtatgacgagtttgtagaagactatgaacctaccaaagctgacagttatagaaagaaagtggttcttgatggggaagaagttcagatagatattctggacaccgctgggcaagaggactacgcagccattcgagataactactttcggagtggggaagggtttcttcttgtgttctcaatcacagaacatgaatcctttacagcaactgccgaattcagggaacagattctccgtgtgaaggctgaagaagataaaattccactgctcgtcgtgggaaacaagtctgacctagaggagcggaggcaggtgcctgtggaggaggccaggagtaaagccgaagagtggggcgtgcagtacgtggagacgtcagcgaagacccgggccaacgtggacaaggtgttctgtgacctaatgagagaaatcagaacaaagaagatgtcagaaaacaaagacannnnnnnnnnnnnnnnnnnnnnnnnnnnnnnnnnnnnnnnnnnncacgatgttgcttactatgagtgtcaaggtgacggatgaagccagctgctcctaaggacacagggctgggttggtaaagagaaggctatggttcgacttcttgcttgtgcttcccactctccccgacttcattcactcaaacttctttaaatggggaaaaatatttgtgactcagtggctggcagaagaaataagcccatgcaagtggaagggctgcttgtcaggaggttgtggaatttctttcttctccccttcttccctcccaaaagcttagctatgtataaagtgccacagataggaaacagctgttaattacaaagagaaagaattgtcatagcatcttatttgttcctagttttataacattaccatccttcgtttgaactacagatgtgtagtgggttttggcggagggagtggacgtaagatgccctcccacttttatcagtttagtagtagtactgagaaaaatcccttcagctctaagaacactgaaaaatccaccgattttttgggtaagcttcttggcaataccctgtggatccgaaacagctaaaaaaatgaatttgaattgcgccagataggtcaataccaagcttctgattcctcctcaccatatgaaaagtgaaagttgtgagttgttttcctcttatttaaacattggcctattataatctgtggtggttatttttctcctgtaagcatcctgatttttctgtaggaacttttctttggcagaccaagtgaagactcaggaatggtgtgcattataaatgacacacattgccacttggggtagatatttttaagttctttggctaagtcctctcctaactggcctgtcctctggttagggcccctccctctccaactagtgggtgaatggcttggggtctggtctggatcaggactcactgggagcgcggagggtcctaacgggagccctccttgcgtcaagtggtgcagcaacagtatctccttttgcccaaaaagaccggtggggttggagtctaaaacggtggatatcttcccggaaaatcccttggaaagccccaggagcccctggtggcccgagacacctttccggctgaccctctcttcataagaaaagggcctcccggcgaagttcctgagaattagtaaaaggtgatccaacgttaggagacggagcttgggaccatttcgcgcccccttttgaccgtcggaaggaaatgggggagtggcggggtgtcgacagataaggcgcagtttgccgagccagaccgcgcggcgatacgttcggaacaaaagacatttgtcctgcgatgtgaacctcttcctgtcaagccttgctcggcccgtactccattctctcaacactgcggcgctagctggggataattcttca

SEQ ID NO: 15278 - DNA, 751 bp, Homo Sapiens
cgtttaaataaatttatttcttgtagctttgctctgtttagattatgtggtttttgttcagttatgagaacaatctttaaaggatggtggattgttggctagcttaatgaatggaataggaaagtggaaatgtaaaacgtcaggaaacatacattcagagctagatcagtttgttcactgagcctaaactggctaataatccattaaacacaatctcctcagaaaaagcacgaagattctaactgatacacagggtttcctcattcaaataaaagtagatagaccaactaacctagaagctagctgaaatacaaagaagaaatccccattagaatatcccagtttcaagataaaatgcatgcatttaaatgcggtccatctggttgaaagcatgtggcattcaatttctgacattcatccccgaagaaggcaaagcacaacactaacacatctctgaaatgcaaattccattaagtgcaaatttctaaaacacaaggtcaacctagaaacacgttttaaatttcaacaagttctctttttaaattagtatgctcagtatataattttcaaacacaatctgaagtgattttctaacgtttgttctcagtctaacttttgctccctcataaaaatatactctcatgggtccattttcagtcttctaatttttgcaattattagctcaaaatatctaaccttttaggaacatcttttctttccacattttcaaatatgaaaaaggctttgctta

SEQ ID NO: 15279 - DNA, 1008 bp, Homo Sapiens
  misc_feature (986)..(986): n is a, c, g, or t
ggggcggtggcgcgagttggactgtgaagaaacatggcggccgcgacgttgacttcgaaattgtactccctgctgttccgcaggacctccaccttcgccctcaccatcatcgtgggcgtcatgttcttcgagcgcgccttcgatcaaggcgcggacgctatctacgaccacatcaacgaggggaagctgtggaaacacatcaagcacaagtatgagaacaagtagttccttggaggcccccatccaggccagaaggaccaggtccacccagcagctgtttgcccagagctggagcctcagcttgaagatgatgctcaaggtactcttcatggaccaccattcgctgttggcaagaaacggctttacttacaaaacagactctttaccttctgctgtgtttgaagtatgtttagtcagcatgctcaggaaataaatgtgaattgccccttggtactttagcacccgattgtataaaatccttgttcggccgccttcggcccctcgaaaaactttttctaaaaccaattccgttttgggcgcgcggggcccccagtaaggtaaagggaaaccttgggtccaatagcctggttttcccttagggaagatatccctggggccaatggaactaaagggggctttgggaatttccttccccccaattaataaaaaaaccccccccggggggggacaaaaaccgggagggcgttttcttggaaacaaaatttcccccaaaatggggagtttctcttgagggggccaatttacctggggaaatccttttcccacacaggggaagctcccaaagcgaaagccctcgaatttttcaaaattttaccgccccccggcccctgtgccacattttattttgccaaaaaaagctgggtgggaaaatttcccttttaaaacatttttttgtgccggaacattgtggaagaaccccttttccccaaaaacggggttttttgatggaacccctgtgaaaatcncccctagggggggtttttctac

SEQ ID NO: 15280 - DNA, 890 bp, Homo Sapiens
  misc_feature (564)..(581): n is a, c, g, or t
  misc_feature (625)..(641): n is a, c, g, or t
gggccagcgcaggcgcggtggcgcgagttggactgtgaagaaacatggcggccgcgacgttgacttcgaaattgtactccctgctgttccgcaggacctccaccttcgccctcaccatcatcgtgggcgtcatgttcttcgagcgcgccttcgatcaaggcgcggacgctatctacgaccacatcaacgaggggaagctgtggaaacacatcaagcacaagtatgagaacaagtagttccttggaggcccccatccaggccagaaggaccaggtccacccagcagctgtttgcccagagctggagcctcagcttgaagatgatgctcaaggtactcttcatggaccaccattcgctgttggcaagaaacggctttacttacaaaacagactctttaccttctgctgtgtttgaagtatgtttagtcagcatgctcaggaaataaatgtgaattgcccttgaaaccacacaactcaaacaacccaaaatacccccaacaccataaaacatccccccaccccacataaatcaaaatgaagaacgaacgcccttacatggtgcgcgnnnnnnnnnnnnnnnnnntccttccatatccccaccgccacaccgacaagttgttgttcggnnnnnnnnnnnnnnnnnagaaacttttttacaaaccatcttgttgggggcgcgcgggccccaccctaggaaaggacatgagggtgccattttcatgctcccccacaaaacacccctgaggatactaaaacagcggcttttgctctttcccccaaaataaacaaacaacccgcgcggggggaacacaacaggtttgcttgcttataacatcacctccaaatgtgggggtcctttgcagcgagctatttctctgtcgagtttatatac

SEQ ID NO: 15281 - DNA, 914 bp, Homo Sapiens
gggggcgcgagttggactgtgaagaaacatggcggccgcgacgttgacttcgaaattgtactccctgctgttccgcaggacctccaccttcgccctcaccatcatcgtgggcgtcatgttcttcgagcgcgccttcgatcaaggcgcggacgctatctacgaccacatcaacgaggggaagctgtggaaacacatcaagcacaagtatgagaacaagtagttccttggaggcccccatccaggccagaaggaccaggtccacccagcagctgtttgcccagagctggagcctcagcttgaagatgatgctcaaggtactcttcatggaccaccattcgctgttggcaagaaacggctttacttacaaaacagactctttaccttctgctgtgtttgaagtatgtttagtcagcatgctcaggaaataaatgtgaattgcccttgagacctgcttctacattggttgctttgttaactctacctgatcttcacttgtcagtaatttgagaccacttcaaagccctctgcaaacaccccaaaggcagaatctgcctattttgaggtttccattaacttccaaaggaattctggttttccaaaacaggagccagagttggagatattacagtcaactttggcttctaagccagtaattccattcttaaatacctcactgtcttggccatggggaagcactatggcctcagctgggggaaagaccctggcctaggggtcttagccactccccaccctagggtatagttcaggggtatccaatcctttggcttccctgggccatgttggaagaattgtcttgggccacacataaaatacagtaaccatagctgatgagctaaaacaaaaaacaatggtttgtgcaaaaatctcataatgttttaataaagttgaagaat

SEQ ID NO: 15282 - DNA, 1050 bp, Homo Sapiens
gggctctcgctcggtctttctgccgccatcttggttccgcgttccctgcacaaaatgcccggcgaagccacagaaaccgtccctgctacagagcaggagttgccgcagccccaggctgagacagggtctggaacagaatctgacagtgatgagatcagtaccagagcttgaagaacaggattccacccaggcaaccacacaacaagcccagctggcggcagcagctgaaatcgatgaagaaccagtcatgtaaagcaaaacagagtcggagtgaaaagaaggcacggaaggctatgtccaaagctgggtcttcggcaggttacaggagttactagagtcactatccggaaatctaagaatatcctctttgtcatcacaaaaacagatgtctacaagagcccctgcttcagatacttacatagttttttgggggaagccaacgatcgaagcatttatccccagcaagcacaacgtagcagctgcttgagaaattcaaagttcaagggggaagctgttctcaaacctttcaaggaaaacccaccgaactcccaactggtacaagaagggagagtgggaatagggaagagcggccgattgaaaacccgggtggtaagaaaggttaagggagcatgagaaattggggtcattgtccaccaaggctataatgtgtggtccaaaaaagccaaaggggacgctcccgaagtccgctgggaggaaagcaaccgtgcagatgagatatgtggaaggatggcggagtgtgtgggcagattacccatcgtggaccccgctatgggaaaccccaactttttgttgggggggccttcacaccggaggaaccgcgccggccttggagtttgaaaatcttgggctgcgtctccctgccaaacataaagggttacggtctttttggggtggccggaaaggggcagggggcgggggagagcgtacccggtgtcggggcgccctccggcccgggaagaactttgtcaaaccatttccttttcgggcgccgggcccgccgagtagaagacacccttgcccactcgcgtt

SEQ ID NO: 15283 - DNA, 813 bp, Homo Sapiens
  misc_feature (145)..(157): n is a, c, g, or t
ggaattcccgggatgcgcgaggtttcaagatggcggtagctgaggggttgaccgagagacccagttgaaggcctttacgaagtgaaagaggccgggaatcgccccctacccgcttctcgtagtcctgggagcacagcagaagtgnnnnnnnnnnnnnaatgaacaagtaaaccatacaaattgtcaacatgggacggagatctacatcatccaccaagagtggaaaatttatgaaccccacagaccaagcccgaaaggaagcccggaagagagaattaaagaagaacaaaaaacagcgcatgatggttcgagctgcagttttaaagatgaaggatccaaaacagataatccgagacatggagaaattggatgaaatggagtttaacccagtgcaacagccacaattaaatgagaaagtactgaaagacaagcgtaaaaagctgcgtgaaacctttgaacgtattctacgactctatgaaaaagagaatccagatatttacaaagaattgagaaagctagaagtagaatatgaacagaagagggctcaacttagccaatattttgatgctgtcaagaatgctcagcatgtggaagtggagagtattcctttgccagatatgccacatgctccttccaacattttgatccaggacattccacttcctgggtgcccagccaccctctatcctaaagaaaacctcagcctatggacctcccaactcgggccagtttctatccttccctccttccttggacatgggggtttccaccgtttgcccccctggcagaaaaacctccctgggccttcccccc

SEQ ID NO: 15284 - DNA, 363 bp, Homo Sapiens
ggggcggcatcctgctccgtctgcaggttgtgcttccggtgcggaggtcagggacaagatggtgccaccggtgcaggtctctccgctcatcaagctcggccgctactccgccctgttcctcggtgtggcctacggagccacgcgctacaattacctaaaacctcgggcagaagaggagaggaggatagcagcagaagagaagaagaagcaggatgaactgaaacggattgccagagaattggcagaagatgacagcatattaaagtgagtgaccctgcgacccactctttggaccagcagcggatgaataaagcttcctgtgttgtgtgaaaacccccccctacccacgaaaccaaaaacttg

SEQ ID NO: 15285 - DNA, 1458 bp, Homo Sapiens
  misc_feature (798)..(798): n is a, c, g, or t
  misc_feature (1282)..(1330): n is a, c, g, or t
ataggctagtagagccgggtgtaatcggcacgaggaggggaacgaaagatggcggcggaaacgctgctgtccagtttgttaggactgctgcttctgggactcctgttacccgcaagtctgaccggcggtgtcgggagcctgaacctggaggagctgagtgagatgcgttatgggatcgagatcctgccgttgcctgtcatgggagggcagagccaatcttcggacgtggtgattgtctcctctaagtacaaacagcgctatgagtgtcgcctgccagctggagctattcacttccagcgtgaaagggaggaggaaacacctgcttaccaagggcctgggatccctgagttgttgagcccaatgagagatgctccctgcttgctgaagacaaaggactggtggacatatgaattctgttatggacgccacatccagcaataccacatggaagattcagagatcaaaggtgaagtcctctatctcggctactaccaatcagccttcgactgggatgatgaaacagccaaggcctccaagcagcatcgtcttaaacgctaacacagacagacctatggcaatgggtccaagtgcgaccttaatgggaggccccgggaggccgaggttcggttcctctgtgacgagggtgcaggtatctctggggactacatcgatcgcgtggacgagccctggtcctgctcttatgtgctgaccattcgcactcctcggctctgcccccaccctctcctccggcccccacccagtgctgcaccgcaggccatcctctgtcacccttccctnacagcctgaggaagtacatggcctacgttcagaaggcaagccgactcaaagcgagtatggagataaaatcatagaggagctgcaagatctaggcccccaagtgtggagtgagaccaagtctggggtggcacccaaaaagatggcaggtgcgagcccgaccaaggatgacagtaaggactcagatttctggaagatgcttaatgagccagaggaccaggccccaggaggggaggaggtgccggctgaggagcaggacccaagccctgaggcagcagattcagcttctggtgctcccaatgattttcagaacaacgtgcaggtcaaagtcattcgaagccctgcggatttgattcgattcatagaggagctgaaaaggtggaacaaaaaaggggaagccaaatataggccaagagcagcctgtggatgatgctgcagaagtccctcagagggaaccagagaaggaaaggggtgatccagaacggcnnnnnnnnnnnnnnnnnnnnnnnnnnnnnnnnnnnnnnnnnnnnnnnnngaagcaggatgaactgaaacggattgccagagaattggcagaagatgacagcatattaaagtgagtgaccctgcgacccactctttggaccagcagcggatgaataaagcttcctgtgttgtgtgata

SEQ ID NO: 15286 - DNA, 842 bp, Homo Sapiens
  misc_feature (225)..(283): n is a, c, g, or t
gggattcagcgtttgggtgaagacggaggcgggttctacagagacgtaggctgtcagggagtgtttatttcgcgtccgcttctgtttctccgcgcccctgtgctgccccgactcacatactcgtccagaaccggcctcagcctctccgcgcagaagtttcccggagccatggccgagtactcctacgtgaagtctaccaagctcgtgctcaagggaaccaagacnnnnnnnnnnnnnnnnnnnnnnnnnnnnnnnnnnnnnnnnnnnnnnnnnnnnnnnnnnncccagcttgatattgttggaatctggtggacagtaacaaactttggtgaaatttcaggaaccatagccattgaaatggataagggaacctatatacatgcactcgacaatggtctttttaccctgggagctccacacaaagaagttgatgagggccctagtcctccagagcagtttacggctgtcaaattatctgattccagaatcgcccctgaagtctggctatggaaaatatcttgctataaattcagatggacttgttgttgggcgttcagatgcaattggaccaagagaacaatgggaaccagtctttcacaatgggaaaatggctttgttggcctcaaatagctgctttattagatgcaatgaagcaggggacctagaagcaaaaagtaacaccaccagggagaagaagaaatgatcaagaattagatccctgtggctgaaaggagaatacccaggaacaaaagatggacctttccccgaaaaaaggacaaaaggaaaattgtaacaccaatggtggaaatcccatttatgtttaagggaaattcttccgcaac

SEQ ID NO: 15287 - DNA, 1037 bp, Homo Sapiens
  misc_feature (191)..(257): n is a, c, g, or t
  misc_feature (289)..(289): n is a, c, g, or t
  misc_feature (295)..(295): n is a, c, g, or t
  misc_feature (863)..(927): n is a, c, g, or t
ggtgggggaagatcaccggcccgctagggtgggggcgccaggggttttcttctgggagacaacgtgtgtggcccgggggtggggttggcccatagggaggggccggggggccccaagagaaagttttttgtagaaattttttcgaaggggcccagaggcggccccgaaaagggtgtgcggggggttggctnnnnnnnnnnnnnnnnnnnnnnnnnnnnnnnnnnnnnnnnnnnnnnnnnnnnnnnnnnnnnnnnnnnagtgcacttataggtgttgattttgttggtgngggggnggggtcggtaaaagcatttcctctgaatattttattcagaaaaaaacacagaaagataaggcagaaacaaaaatcccagtcacttgcagtatctgtcggctttcaatttggctctcctgtccagaagcgtctcatgcaaaaatccatctttccgagcctttttaagaattttactgtcttctttacttattttaagtttgtggtcttggaagctctgaaatttctttacataattgatttcacattgttttacatttcctttgtcttcttctggaatgtcatcttttttcttggtttctctttcagcacaggatctaatcttgatcatttcttcttctcctgctgttttactttttgcttctatgtcccctgcttcattgcatctaataaagcagctatttgaggccaacaaagccattttccccttctttgtgtggagctcccagggtaaaaagaccatcgtcgagtgcatgtatataggttccctcatccatttcaatggctatggttcctgaaatttcatcaaagtttgttactgttcaccagattccaacatatcaaactgggnnnnnnnnnnnnnnnnnnnnnnnnnnnnnnnnnnnnnnnnnnnnnnnnnnnnnnnnnnnnnnnnngttcccttgagcacaagcttggtagacttcgcataagattactcggccatggctccgggacacttctgcgcagagaggctgaagccggctcaggacgagtatgtgacccc

SEQ ID NO: 15288 - DNA, 719 bp, Homo Sapiens
tgaagacggaggcgggttctggacagacctaagctgtcggggagtgtttacttcgcctccacgttctgttcctccccgcctggtgctgctccaggtcacatactcgtcctgagccggcttcagcctctccgcggcagaagtctcccggagccatggccgagtaatcttatgcgaagtctaccaagcttgtgctcaagggaaccaagacgaagagctgggtaccaacacctaccggcgggagcctcctcagttcttttcggacgcactccacccccctcgaatccggtggaagccgtgacgcggagagccggcttcgtggcctcccaggcttcgccctgacccctgtccgggctggacggaggccggaccgcccttcctggcgcctgtgcagagaggggcagcctcccgcacggacgaccctggaaacaggatagacgggcgggtgacccgtgaccccgtacccacgagtttgggtcccttgaggcatctctccaggcctctgcctgatttgcctgaggttgactgtacatgcaaatattgagctttcctcctggcctccgtgataaacagaagtttgatatgtgttaggcgagatggaaagaaagtatcaaggagtgagctgaagccactgcccttgagaaccctctcgaggagtctggcctcatgaagatgccagaataaaatggcagtaagaagaaaaagagcaaagataagaagac

SEQ ID NO: 15289 - DNA, 826 bp, Homo Sapiens
  misc_feature (751)..(751): n is a, c, g, or t
  misc_feature (775)..(775): n is a, c, g, or t
  misc_feature (783)..(783): n is a, c, g, or t
ggggtaccattcttcaagaaacggtttgaatcagaccgcctttccttttgtcttcattgtcataaacatctgcccccgtgtggttctgactggccgcgaacccctacccgaagcttttattccatcattgtgcaccgttggtggggaatgctgtggcaacaggccacgcctccacttactggttggctttgcgcaggcgccagcggaagtgggtcgcaggaagaggaagtcccgcctctctctcctcaggcagcagcaacgcggaggaaacgggagtgaacggagagcgtagtgaccatcatgagcctcctcaacaagcccaagagtgagatgaccccagaggagctgcagaagcgagaggaggaggaatttaacaccggtccactctctgtgctcacacagtcagtcaagaacaatacccaagtgctcatcaactgccgcaacaataagaaactcctgggccgcgtgaaggccttcgataggcactgcaacatggtgctggagaacgtgaaggagatgtggactgaggtacccaagagtggcaagggcaagaagaagtccaagccagtcaacaaagaccgctacatctccaagatgttcctgcgcggggactcagtcatcgtggtcctgcggaacccgctcatcgccggcaagtaggggccgcctgtctgttgacagaactcactcctctgtcctatgaagaccgctgccattggtgttgagaataataaagctctgtgtttttttcttncggcgacccactgaagcaaaaaanaaaaaganaaaacccaccagccacccccccctaccaaaccggaaaaagcgc

SEQ ID NO: 15290 - DNA, 807 bp, Homo Sapiens
  misc_feature (526)..(550): n is a, c, g, or t
  misc_feature (620)..(648): n is a, c, g, or t
  misc_feature (674)..(702): n is a, c, g, or t
gggctcctcaggcagcagcaacgcggaggaaacgggagtgaacggagagcgtagtgaccatcatgagcctcctcaacaagcccaagagtgagatgaccccagaggagctgcagaagcgagaggaggaggaatttaacaccggtccactctctgtgctcacacagtcagtcaagaacaatacccaagtgctcatcaactgccgcaacaataagaaactcctgggccgcgtgaaggccttcgataggcactgcaacatggtgctggagaacgtgaaggagatgtggactgaggtacccaagagtggcaagggcaagaagaagtccaagccagtcaacaaagaccgctacatctccaagatgttcctgcgcggggactcagtcatcgtggtcctgcggaacccgctcatcgccggcaagtaggggccgcctgtctgttgacagaactcactcctctgtcctatgaagaccgctgccattggtgttgagaataataaagctctgtgtttttttctaggggggtaaaaaannnnnnnnnnnnnnnnnnnnnnnnncatggtcggccggcctcggcccctcgagaaagctttctaaaaccattcgttttggccgcgcggggcccannnnnnnnnnnnnnnnnnnnnnnnnnnnntttggggggggcggcctggggccctnnnnnnnnnnnnnnnnnnnnnnnnnnnnnggggcccgggggccccccctgggggaaaggaaaaacggggcacaaaggggttttcccaaggaaaacccggggccaagaaaaaagggggtgggggattcccccccc

SEQ ID NO: 15291 - DNA, 836 bp, Homo Sapiens
gggaggcagcagcaacgcggaggaaacgggagtgaacggagagcgtagtgaccatcatgttttagcacaaccccctcagaccactctgtggagaacagactgtcagggaacgtgggtggaggcagagagaccagaaagattccaggacagagatgacagaggcttaggccatggagcctcctcaacaagcccaagagtgagatgaccccagaggagctgcagaagcgagaggaggaggaatttaacaccggtccactctctgtgctcacacagtcagtcaagaacaatacccaagtgctcatcaactgccgcaacaataagaaactcctgggccgcgtgaaggccttcgataggcactgcaacatggtgctggagaacgtgaaggagatgtggactgaggtacccaagagtggcaagggcaagaagaagtccaagccagtcaacaaaagaccgctacatctccaaaatgttcctgccgcggggacctcagtcatcgtggtcctgcggaacccgctcatcgcccggcaagtaggggcccgcctgtctgttgacagaactcactcctctgtcctatgaagaccgctggcaattgggtgttgagaattaataaagctctggggttttttttcccgggccggtaaagcatgataacagaatattgtcattgtcgggcgcccctcggccccttcaaaagccttttctaaaacctttccgtttgggcgcgccgggcccccagtaaggaaaaggggaacaaggggccataacttggtttccccaaggaaaaacctctggggcctgaaaactaggggcttggggattttctcccccatataaaa

SEQ ID NO: 15292 - DNA, 802 bp, Homo Sapiens
  misc_feature (695)..(695): n is a, c, g, or t
ggggcccacagctgcctgggtaaggcccaagatggctgtcttcgccttagtactcgtgtgaagttggcggggacggttcctgtcatcttcttgggcttatttggtgtgctgttgaaggggggagactagagaaatggcagggaacctcttatccggggcaggtaggcgcctgtgggactgggtgcctctggcgtgcagaagcttctctcttggtgtgcctagattgatcggtataaggctcactctcccgccccccaaagtggttgatcgttggaacgagaaaagggccatgttcggagtgtatgacaacatcgggatcctgggaaactttgaaaagcaccccaaagaactgatcagggggcccatatggcttcgaggttggaaagggaatgaattgcaacgttgtatccgaaagaggaaaatggttggaagtagaatgttcgctgatgacctgcacaaccttaataaacgcatccgctatctctacaaacactttaaccgacatgggaagtttcgatagaagagaaagctgagaacttcggaaaaggctcatctgtcaccctggagaagggaaactgtacttttccctgtgaggaaacggctttgtattttctctgtaataaaatggggcttctttggaatttgatagccacataccttttgtttttcctctagatgctgccctctactcaggntagactatgaaagtcttggactcatccctaaatcttaagggaacctttaaggtttggggccttccacacccaccttggccttttttacagtccctaacttattcccc

SEQ ID NO: 15293 - DNA, 952 bp, Homo Sapiens
  misc_feature (545)..(560): n is a, c, g, or t
ggggacctcgggcggcgggtcacgtcggccgggcatggctgcatggagcccggccgcggcagcgcctctcctccgcgggatccgcgggcttccacttcaccatcggatgtttgccactcagactgagggggagctcagagtgacccaaattctcaaagaaaagtttccacgagctacagctataaaagtcactgacatttcaggcactaaaagaagaaatcaaagagatgcatggattgcggatatttacctctgtccccaaacgctgaccacgccctggctgcatagatgctgctgcttaagaccttggatgaacttcactgacatcattcttccctaagcagtcaccaaaaaatttatatattttgctcatatacatttccatattataattatagaagatgtataatctatttagatgttaattaaaggaaacaaacaaccccgccacgtacccccggcaccgccccaccactacctggtcgggccgccctcggcccccccgcaagaaaacgtttcccaagacccctttccgccttgggcgnnnnnnnnnnnnnnnnagttcaagggtcaaatgttggaaaacaatgcggtctccatgtaggagggtgttctcccgcgccacgggaaaagactcccccggggccctgattaacacctacggggagtcttgggagagtctcgtcccctgcccgtgtaatgcaacaacgcgcggccccggtggtgtggtgcaaaacccgaaaaacgggtttcgtcttgacacacaaacccccccaaggagagggggcgctccccccggcaggcggcgtccctctctcccctgcggaagagacaatattatacaaaggagtcacgcctcacaacaagcgcaggttctctccccactagatccctaaagttttaagccgccccccccggtctcccctgtgccgcccactctattgtcccgtag

SEQ ID NO: 15294 - DNA, 563 bp, Homo Sapiens
ggggcatacagtgacctcgggcggcgggtcacgtcggccgggcatggctgcatggagcccggccgcggcagcgcctctcctccgcgggatccgcgggcttccacttcaccatcggatgtttgccactcagactgagggggagctcagagtgacccaaattctcaaagaaaagtttccacgagctacagctataaaagtcactgacatttcaggaggttgtggggcgatgtatgaaattaaaattgaatcagaagaatttaaggagaagagaactgtccagcagcaccagatggttaatcaggcactaaaagaagaaatcaaagagatgcatggattgcggatatttacctctgtccccaaacgctgaccacgccctggctgcatagatgctgctgcttaagaccttggatgaacttcactgacatcattcttccctaagcagtcaccaaaaaatttatatattttgctcatatacatttccatattataattatagaagatgtataatctatttagatgttaattaaaggaaacaaacaactgaagcttttgaagggtcattg

SEQ ID NO: 15295 - DNA, 932 bp, Homo Sapiens
  misc_feature (126)..(126): n is a, c, g, or t
  misc_feature (168)..(168): n is a, c, g, or t
  misc_feature (170)..(170): n is a, c, g, or t
  misc_feature (174)..(174): n is a, c, g, or t
  misc_feature (178)..(178): n is a, c, g, or t
  misc_feature (180)..(184): n is a, c, g, or t
  misc_feature (187)..(187): n is a, c, g, or t
  misc_feature (190)..(190): n is a, c, g, or t
  misc_feature (268)..(268): n is a, c, g, or t
atttgggtgaggaatttccaaaggcccttagtttcagggcccagggattttctttgggaaaaccagcttatggacccagtgttcactttaccttactgggcccggcggcgccaaaacgaaatggtnctagaaaagcttttcgagggcccgaggcggccgacaaagttntntttntttntnnnnnttnttntttttgcaaaaattgtttaataaaatttataaaaatgcatctttgagaatacttttctcagcttgaattgtttccctnttccaccccaaaggaaaatacacaattatcagcacccacacatgtatacactcaaaactacagtgacattctctacacagaactagaaaaaacaaaaacctaaaattcatatggaaccaaaacagagcctacatagccaaagcaaaactactaagcaaaaagtacaaatctggaagtacacaatactcaacttcaaactatcctacaaggctatagttaccaaaacagcatggtaccgctataaaaataggtacctagaccagtggagcagaagagaacccagaaataaagccaaatacttacagccaactgatcttcaacaaagcaaacaaaaacataaagtggggaaaggacactctgtacaacaaatggtgctgggataattggctagccacatttaggggaggaatactggatcctcagatctcacacaaaaatcaactcaagatggattaaggacaaatgccaggacctgaaactacaaaaattctagaagaaatactagaaaaacctttgtagacacttgcgtaggcaaggatttcatgaccaagaacccaaatccaaatacaataagaacaaagataaataactgggactttaaagagcttttgcaaggcaaaaggaacaatcagcagagtatacagacaaacccagagagtgggag

SEQ ID NO: 15296 - DNA, 501 bp, Homo Sapiens
gatagccactgtctgccacctgggttgtagacctcgtcacaatgtgcttcaactcctgctccaagcgctctatgattgccttaactgtttctgggatcttcttcaagtttcaccaagcccttaatgaggatacccataaacagggtgctgttttcctctgggatccaattctaaatcttccttgatgtcctgcagatttatctccctcacacttgagcttccagcagtagaatagtgagaggtatcaaggaattttcgaggagtagggaggtttgtaacatcaatcagaggaacagaagcatctttcacgagggagctgattttccctttttccttgttacgctgcacaactcggctagtcgatttgatgtacaggtcacggtgtagttcatctatgagaaccaagtgaaggttcatcttcttgctgtgaagctctagtcgaaggtcactcagtccttccacctggagcagggggtgccgtggttaatcctgcgagagtca

SEQ ID NO: 15297 - DNA, 684 bp, Homo Sapiens
gggatgacattccaatatactatgcatcatctttggccaagaagtgtatggcagtgtaccagacatatgtaaatgccatgaatgacaaaatccgcaaacagatcaacatcaataatccctttgttttcaaacacattagtaacctcaagagcatggatcattttgatgacattggtcccagtgttgtaatggcctccccaggcatgatgcaaagtggcttatccagagaattatttgaaagctggtgtactgataagaggaatggtgtcattatagcgggatactgtgtagaagggacacttgccaagcacatcatgtctgaacctgaagaaatcactactatgtctggacagaagttaccactgaaaatgtctgttgattacatttctttctcagctcacacggattaccagcaaaccagtgaatttattcgtgctttgaaaccgcctcatgtgattttagtccacggagaacagaatgaaatggccagattgaaagcagcactgattcgagaatatgaagataacgatgaagttcacatagaggttcataatcctcggaatacagaagcagtgaccttaaacttcagaggagaaaaactagccaaggttatggggatttttagcagacaagtagagccgagagacaaggtagagccgagagacaagtagaggtccgccatat

SEQ ID NO: 15298 - DNA, 457 bp, Homo Sapiens
  misc_feature (428)..(428): n is a, c, g, or t
tctaatgatatgtatgcagatacagtaacaactgtgatattggaagttcagtcaaatcccaaaataagaaaaggtgcagtacagaaggtttctaaaaaattagaaatgcacgtttacagcaagaggttggagatcatgctccaggacatatttggagaagactgtgtaagtgtaaaggatgactctattcttagcgtcacagtggacgggaaaactgccaaccttaacttggagacacggactgtagaatgtgaagagggaagtgaagacgatgaatccctccgagaaatggtggagctggctgcacagagactgtacgaggccctgacgccagttcactgagactgtgcctgtatatgaactttgaaaaaatacttgactctacttttgttacctaaaataaaatgcattcgtttctctgggaaacncccaagagcccccaaaacaaaaaatatgt

SEQ ID NO: 15299 - DNA, 570 bp, Homo Sapiens
aaccttcatacatagaagccaaaatactttaactgctgtaaaccttcaaaagttaatagaagtgagatcatactggtttgtttcttattttgattggagaaaaattaaattgctgcatttcgcagtgacccatttacatggcattctcagcttagactgcgtaagaagaaatatatgtggtgaaatgttggaaccatttctctcttggtctctgtttaatgttgaaagggtgagctaataggaggcactttcaacttcactccctcacgctaccccgtccccctccagactggcagtttcaaggatgcaaattgcattgcaaaatcaaactgactcatgaagcatttgggccagtgcactgtttacttccatctgtttgcagacacatttgtgcccggcgtttgggagccctttgtatcaatgttctgacaagggtccctataaccttaacctactcgaaaccggtttgggatggatatgatggggcttctgtgctattgctgggattgggagaaataaaacatgcaatttaagtggggggaaaaaatccacccaaagggatacaggcat

SEQ ID NO: 15300 - DNA, 316 bp, Homo Sapiens
  misc_feature (17)..(17): n is a, c, g, or t
tctagcggatcccatgncgcgacgcttccatcaagggtggccgcggtagtcgagagcctggacgagggagatggaacgtgctgtgcctcaccggcgtggaggaccagcttgcaggcagacgtgcggcccacgctggagatgctgcgcaacgccggggatcaagatatggatgcgaacaggcgagaaactcgagacagcgacctgcagtgccaaaagttcacatctcgtgtctagaacacacgatattcatattttcagacaggtaaccagtcggggagaggcacattgggagctgaatgcatttggatggaagcgt

SEQ ID NO: 15301 - DNA, 837 bp, Homo Sapiens
tatcttgactggtgggcactgggtcttccaggtgggctccacggttcctagcgcgatgtcaactgctcggttatgggaccccaagaaaaaaaagtagtggagtaccttcagaagctggatacagcatatgatgaccttggcaattctggccatttcaccatcatttacaaccaaggctttgagattgcgttgaatgactacaagtggtttgccttttttaaggatgtcactgattttatcagtcatttgttcatgcagctgggaactgtggggatatatgatttgccacatctgaggaacaaactgggtattaaataaagcatctgttgagggactcttttaaaaccacagccatgaacagacgttggggctaagagacagagcagcctgcgacagtgtggacctacctgtagcagctagcaaaggcctctagcagctacagtcccttctggagtctttatttgcatgcaaaatgcaaaggagtcctggtgacctacctccaaggcagctgccctcctgaacactcccttggaaaacagtaaacatcattttggaatgtgaacaaccagagactacacaggagaaaggaaaaaagcattctgaagatgcaaaatcttgggtggcttcaccgttcagttttttaataaaaggaacaatataccccctctccttaatctcactgggccccatcccttgctggcgccccctcggcccctccgagaagattgctaagaccaattcctttggccccccccggaccctgtgtaggaaaagtggaaacattggcccctaaacctgtttttccctaaggaataatccctgggcccctgacttagg

SEQ ID NO: 15302 - DNA, 856 bp, Homo Sapiens
ccttcactgatctgtcatacgttgccatatttcactagccttactaggccccaggatcacatcgtgccgtgtctgccgtgggcgtacatcgcgatccgcacttaccgacgaccatcgatcctgtcctgactggcatctcctctcatagcgtatttgccctgcctccccgtatccgcgcgaggcatcggtgccagcacaacctgctatttgagatcactcctgaggctcttttcctgccctatcttccaaggctcagttccaagcagtccatgcgcggcatgcgttacatgccaaactgtggtttggaggtgaaccagtgtgagatcgccaggttctacaagctgcacgagcggaggtgtgagcccattgccatgacagtgcctcgaaagtcggacctgttccaggaggacctgtacccacccaccgcagggcccgaccctgccctcacggctgaggagtggctggggggtcgggatgctgggcccctcctcatctccctcaaggatggctacgtacccccaaagagccgggagctgagggtcaaccggggcctggacaccgggcgcaggagggcagcaccagaggccagtggcactcccagctcggatgccgtgtctcggctggaggaggagatgcggaagctccaggccacggtgcaggagctccagaagcgcttggacaggctggaggagacagtccaggccaagtagagccccgcagggcctccagcagggtcagccattcacacccatccactcacctcccattcccagccacatggcagagaaaaaaatcataataaaatggctttattttctggcaaaagggagaacaagaaaaaccaacacaagcgtgt

SEQ ID NO: 15303 - DNA, 406 bp, Homo Sapiens
gggtccgggaatggtaatcctgaggcctcagaacacaggtttcagattgataggcctgcaggttttccagccaccaaccagttgagcgattaaagggcccaaggccagggctctagggatggggctcagcagaggctggggtaaggggagccagggaggagctgggcctaatgcagcaccgggtccccaggatgccgtgtctcggctggaggaggagatgcggaagctccaggccacggtgcaggagctccagaagcgcttggacaggctggaggagacagtccaggccaagtagagccccgcagggcctccagcagggtcagccattcacacccatccactcacctcccattcccagccacatggcagagaaaaaaatcataataaaatggctttattttttggt

SEQ ID NO: 15304 - DNA, 1070 bp, Homo Sapiens
  misc_feature (705)..(705): n is a, c, g, or t
ggggggggaaccgggcggagcggccaacatggcggaacgcaggagacacaagaagcggatccaggaagttggtgaaccatctaaagaagagaaggctgtggccaagtatcttcgattcaactgtccaacaaagtccaccaatatgatgggtcaccgggttgattattttattgcttcaaaagcagtggactgtcttttggattcaaagtgggcaaaggccaagaaaggagaggaagctttatttacaaccagggagtctgtggttgactactgcaacaggcttttaaagaagcagttttttcaccgagccctaaaagtaatgaaaatgaaatatgataaagacatcccgcaccaaaaagattcaggaaacgcctgaaagtgaaaccactatcccggtccgacgcgcattttttgcttggtcggggcccgccttcgggcccttggagccaagtccgtctctaagaaccccttcccgttctcgggcgcccgttgcgtccccccctttcatggtttaatggttgcacccccgtcggctccccttaaagcgcttgtgtctcccctttacgggcagagaatccgtttttgggagtttcagctcgaaccctaatacagggagcgccttggggcgaatctctccttctgcccccctggtcttttttctacgcagaagatgccgctccccgccggcaatgatggctcaaaaanccttattaatccacgcgactcctcagcaaaacacacaaaactcttcccagtgaatgcgggaacaagcttatccttggacacgagccttaatatctttcccgcggtgacctgcttccgcgcctaaatgttcggcgcgctcttctccaaaacacccgaggacttcttcgccccatatcgcagtatgtatacgttgcccccgcgaccgcctgtgtccactctttaactcccagtgagtctactgggtcgcgccaaaactccaacttatagcggcgatctcttgtggtcccccacatgtgagaaagcgcgcgtgctgctaacagggtgccacgtttattactcccccccgcatatttgaccgatccgtg

SEQ ID NO: 15305 - DNA, 300 bp, Homo Sapiens
gatggtgaaaaggaagaatcctaaaaggaggaaactccaggaactcctaaaaagaaggaaactaagaaaaaattcaaacttgagccacatgatgatcaggtttttctggatggaaatgaggttagagtaagcctataactagaagttcagttttctataggagtttttagaaagatgtttgatgccttcactaataaaaggaaaaattttgagaaatctaattatgctcttaaatgtataaaagctactccatttttaaaatcaaaatttctcttatttagatttttgggatcctctgac

SEQ ID NO: 15306 - DNA, 1972 bp, Homo Sapiens
ccacgcgtccggcgcttccgagcctcacctttattctctcagcacactgcagcggacaaacataaattgcagagattcctgactgctgacatggccctggtggcgacagtctatgcgccaatcacttttcctcctgcatctgtgctgcttttcaagcaaaaaagcaatggaatgcacagcctcattgctacaggccatcttatgtcagtagatccagacagaatggtcatcaagagagttgttctgagtggtcatcctttcaaaatttttactaagatggccagttagtacgttacatgttcttcaacagagaggatgtgctgtggtttaaaccagtggaactgagaacgaagtggggccggagaggacatatcaaggaacctttaggtacccatggccacatgaaatgcagctttgatgggaagctaaaatctcaagacacagtactgatgaacctgtataaacgagtcttccccaaatggacttatgatccatatgtaccagaaccagtaccctggctgaaaagtgagatttcttcaacagtgcctcaagggggcatggagtaatggattcaaagagattctgtcttaccggtgccagtcagtactccagggatgggaggcacaagttgtgattgggcaaagtttattttctatgtcagcctgtcagtccactgccccattttgcaagacttttttttagccttgacaaaatgtctcagttaagtataaaagtttttccactacttagtccaaaaaaaactattaaatcttaatgaaatagccactctccattaagaatctgataactaagagttgacaatactaggaaacaaaatgtcttcagtatctaaagacactgaattcccaccatttccttttctgtaaattaaacagaaacagactgataagaagctggcctttcagcctgcttcacccaagttatggaggaggttaagtctacatttccaccactgagcacaatacaaatgttctttacttctggggaaacagtttgaaaatgttgagacagcacagcagccactccaacaccagctgtaggttcaatgagtagtttcatcctctcccacaacagctgggttgcacactgttgatatggaagggagtaggaattagtgaaaggggagtctagttggtttacctataaagttcagatgagaatacgtgtccagtttgaattttcttatcactgtgtacacacgcttcccaaagcttttctttaattctgactctgcttctgtcaagagggttgtcattaatacatctagggtaccctcccatgtcatgaagttacctagtcaggttcccgtgggtcacttgctactcctaagggaagtttcttctgcctaagaagttacaccatgctttgctatttcttttcttgctggagcctcaccttaatttcatcctctgtgacagtgaagatatcatccacaaggtccctgataataggccaggtgttcaagccaatgctggatttgacaccatctgctatggtttctggaggataaagattgggcatcagtttccccttcagcttggactggtagcagtcatctgcatttgagggttcagcagcatataccttcacactaggtttcagagcctgggaagaggaatattaagacatcttaacaacaaaccacaacattgcctgcatgtctaaaagaaaatatggggcctggggtgggtggctcccaccctgtaatccccacacctttgggagccccgaggcggggtggatccgcttggaggtcagggagttccaaggaccagccttgggcccaaccttgtgggaaaatggccagtgtccaacctaaaaaataggggaaaatatccccccggggcgttggggtggcaagaaaccccctggtaaaatccccaagcctttacctctcaaaaagaggcctttaggggtatagggaaaaaaattcacctccttgggaaaccta

SEQ ID NO: 15307 - DNA, 1105 bp, Homo Sapiens
ccgaaaaccagacctgataaagaaagttgcccttttcaagcctgcttccccccaaggtaagggaggagggttaagttttacatttccgcccactgaggcacaattccaaatgttctttacttttgggggaaacagtttgaaaatgtggaggccagcacaggcagccactcccaacaccagcggtaggttcaatgagtagtttcatcctctccccacaccagatgggttgcacacttaatttcatcctctgggacagtgaagattatcatccacaaggtccctgataataggccaggtgttcaagccaatgctggatttgacaccatctgctatggtttctggaggataaagattgggcatcagtttccccttcagcttggactggtagcagtcatctgcatttgagggttcagcagcatataccttcacactaggtttcagagccttaactgtaattgctattccagcaagcattcctcctccacctacaggtaccaccagtgcatccaccaaaggaacctggttcagcacttccagggcaattgtcccttgtccagctatcactgcaggctcctggttgggatgtaccatgatgccttctgtttcttctgtaactctttttgcaacattttctctggactcatcactaggttcacagtatacaattgacgctccgtaggcttgtattgcaagttttttacagtctggagctgtctggggcaccacaatataagcaggaattccttccaatttggcagcataggtgagagcctggccatggtttccactgctgtgagtaacaacagctttcggcttcctttctaaagcatcaggaaccaagcttctgacggcattgagagcaccacgaatcttaacaagatcctgttttctggaagagttcacatttgaagaaaagattgcgccctgttagttgattcaaaatggagcttgttagcactggtgtgaggtggatagaatctcgaatgttgatatgagctttttcaacatcagcaaaggagatgcaatactgagcacacatggttctcagctcaccggcgccgcgcctccagctccagcctccgcgcgcctccccggccgcaccccc

SEQ ID NO: 15308 - DNA, 510 bp, Homo Sapiens
tattaagcacattccacagtacaaagctgtcatgaataatatctgtacaatttaacagtttcaatagctgttcagacacaaatttatttcaaacagataattggcaaacataattaattacaagttagaattagactatcccagtgctttaaaacattaatatagcagtaatttacatttgctcagttatggttagcaaaataaagtccagagtatggctgggaattactattataatcccagaaagtcagaactccttgggtgccaaagtcccctgctataatttagtaggcacaattcaaaggttgtctgcatattcaaaggccatcatctcccaaggaacgaggggaacttctatattaaacatgcaaaaacaacaaaaaatccattcattcattcagaattgcctcctcccctgccccctcccttccatgcattcattcacagattcgtagtcagcataagttctgccttctggcctcttggtaggctgtaccagcaaaatggtcc

SEQ ID NO: 15309 - DNA, 1455 bp, Homo Sapiens
  misc_feature (569)..(569): n is a, c, g, or t
  misc_feature (579)..(579): n is a, c, g, or t
  misc_feature (816)..(943): n is a, c, g, or t
  misc_feature (1211)..(1211): n is a, c, g, or t
gggaagctcgtgtaacggcggcggtgtcggcagctgctgtagcgaagagagtttggcgcgatgtctcacaccattttgctggtacagcctaccaagaggccagaaggcagaacttatgctgactacgaatctgtgaatgaatgcatggaaggtgtttgtaaaatgtatgaagaacatctgaaaagaatgaatcccaacagtccctctatcacatatgacatcagtcagttgtttgatttcatcgatgatctggcagacctcagctgcctggtttaccgagctgatacccagacataccagccttataacaaagactggattaaagagaagatctacgtgctccttcgtcggcaggcccaacaggctgggaaataattgtgttggaagcactgggggggttggggtgggcttggaacacaggtgtgtacagcgtgctgtagtggaagttttgtatcatagtaatcctgtttccactttgttatactctagccaagattgactgtattagatgaaatgtgaggatcttgttcaatcggaaacccccgttacctcctctttttctttctctntcttttttcntttgtacttaaacatttttatgatgatttagatggaagttgttcttcgtcacttaatgttggttccagtccttcaactgttcatatctactttataacattcacatactaacccttcttcaagatggggtggggggtggaaatgcagtttagccatgtcctcaagataaagtcttggtaaaaataaataaatgtcctttattttaccccatttcctctccttcgcttctttaattannnnnnnnnnnnnnnnnnnnnnnnnnnnnnnnnnnnnnnnnnnnnnnnnnnnnnnnnnnnnnnnnnnnnnnnnnnnnnnnnnnnnnnnnnnnnnnnnnnnnnnnnnnnnnnnnnnnnnnnnnnnnnnnccccttctttactccggcccttttccttctcctatcttatttttatagatcccctccaccgtttttccttctcttccataccttcttctaattccattcttccatttctcttgttgtcgctcattcttttacatctatatgctctggagctgtttcgtctcttcttttaccctctcacgtttcccccatactatttctctgtcctttttgttccctatcctctttgcccctatttgtttgattctgtccttccttctttaatttgccngtcttctgcttgtacttgcagtttactttatcttcttcttgctctcttattctttcgatcctacctcctactgctctcatgtactgtttcttccctccattatatagagtctccttctactcactcaccactatttatttcgcttcctatacttcaatacaactgcctcttttctcttccctcttgtcttatcgcccatgacttttactcttcttcgccttgctagcccatatccctactactg

SEQ ID NO: 15310 - DNA, 863 bp, Homo Sapiens
  misc_feature (828)..(828): n is a, c, g, or t
cggtacgaggccccgtgttaatcaggcacgaggcggaagcgagttgcgacacggcaggttcccgcccggaagaagcgaccaaagcgcctgaggaccggcaacatggtgcggtcggggaataaggcagctgttgtgctgtgtatggacgtgggctttaccatgagtaactccattcctggtatagaatccccatttgaacaagcaaagaaggtgataaccatgtttgtacagcgacaggtgtttgctgagaacaaggatgagattgctttagtcctgtttggtacagatggcactgacaatcccctttctggtggggatcagtatcagaacatcacagtgcacagacatctgatgctaccagattttgatttgctggaggacattgaaagcaaaatccaaccaggttctcaacaggctgacttcctggatgcactaatcgtgagcatggatgtgattcaacatgaaacaataggaaagaagtttgagaagaggcatattgaaatattcactgacctcagcagccgattcagcaaaagtcagctggatattataattcatagcttgaagaaatgtgacatctccctgcaattcttcttgcctttctcacttggcaaggaagatggaagtggggacagaagagatggcccctttcgcttaggtggccatggggccttcctttccactaaaaggaattaccgaacagcaaaaagaaggtcttgagatagtgaaaaatggtgatgatatctttagaacggggaagaatggggtgggatgaaaatttattccattcagtggagagtctgaagaaaactgtggcgtctcttcaanaaaatttgaggaaggcactcccattcccctggccc

SEQ ID NO: 15311 - DNA, 2577 bp, Homo Sapiens
ggcaagaaaattgagaggcattccattcactggccctgccgactgaccattggctccaatttgtctataaggattgcagcctataaatcgattctacaggagagagttaaaaagacttggacagttgtggatgcaaaaaccctaaaaaaagaagatatacaaaaagaaacagtttattgcttaaatgatgatgatgaaactgaagttttaaaagaggatattattcaagggttccgctatggaagtgatatagttcctttctctaaagtggatgaggaacaaatgaaatataaatcggaggggaagtgcttctctgttttgggattttgtaaatcttctcaggttcagagaagattcttcatgggaaatcaagttctaaaggtctttgcagcaagagatgatgaggcagctgcagttgcactttcctccctgattcatgctttggatgacttagacatggtggccatagttcgatatgcttatgacaaaagagctaatcctcaagtcggcgtggcttttcctcatatcaagcataactatgagtgtttagtgtatgtgcagctgcctttcatggaagacttgcggcaatacatgttttcatccttgaaaaacagtaagaaatatgctcccaccgaggcacagttgaatgctgttgatgctttgattgactccatgagcttggcaaagaaagatgagaagacagacacccttgaagacttgtttccaaccaccaaaatcccaaatcctcgatttcagagattatttcagtgtctgctgcacagagctttacatccccgggagcctctacccccaattcagcagcatatttggaatatgctgaatcctcccgctgaggtgacaacgaaaagtcagattcctctctctaaaataaagaccctttttcctctgattgaagccaagaaaaaggatcaagtgactgctcaggaaattttccaagacaaccatgaagatggacctacagctaaaaaattaaagactgagcaagggggagcccacttcagcgtctccagtctggctgaaggcagtgtcacctctgttggaagtgtgaatcctgctgaaaacttccgtgttctagtgaaacagaagaaggccagctttgaggaagcgagtaaccagctcataaatcacatcgaacagtttttggatactaatgaaacaccgtattttatgaagagcatagactgcatccgagccttccgggaagaagccattaagttttcagaagagcagcgctttaacaacttcctgaaagcccttcaagagaaagtggaaattaaacaattaaatcatttctgggaaattgttgtccaggatggaattactctgatcaccaaagaggaagcctctggaagttctgtcacagctgaggaagccaaaaagtttctggcccccaaagacaaaccaagtggagacacagcagctgtatttgaagaaggtggtgatgtggacgatttattggacatgatataggtcgtggatgtatggggaatctaagagagctgccatcgctgtgatgctgggagttctaacaaaacaagttggatgcggccattcaaggggagccaaaatctcaagaaattcccagcaggttacctggaggcggatcatctaattctctgtggaatgaatacacacatatatattacaagggataatttagaccccatacaagtttataaagagtcattgttattttctggttggtgtattattttttctgtggtcttactgatctttgtattattacatacatgctttgaagtttctagggaaaggtagatcttttcttgaactaatatatcaagtgacagttgcagcccttgtgatgtgattagtgtctcatgtggaaccatggcatggttattgatgagtttcttaaccctttccagagtcctcctttgcctgatcctccaacagctgtcacaacttgtgttgagcaagcagtagcatttgcttcctcccaacaagcagctgggttaggaaaaccatgggtaaggacggactcacttctctttttagttgaggccttctagttaccacattactctgcctctgtatataggtggttttctttaagtggggtgggaaggggagcacaatttcccttcatactccttttaagcagtgagttatggtggtggtctcatgaagaaaagaccttttggcccaatctctgccatatcagtgaacctttagaaactcaaaaactgagaaatttactacagtagttagaattatatcacttcactgttctctacttgcaagcctcaaagagagaaagtttcgttatattaaaacacttaggtaacttttcgatctttcccatttctacctaagtcagctttcatctttgtggatggtgtctcctttactaaataagaaaataacaaagcccttattctctttttttcttgtcctcattcttgccttgagttccagttcctctttggtgtacagacttcttggtacccagtcacctctgtcttcagcaccctcataagtcgtcactaatacacagttttgtacatgtaacattaaaggcataaatgactcatc

SEQ ID NO: 15312 - DNA, 1079 bp, Homo Sapiens
  misc_feature (255)..(283): n is a, c, g, or t
  misc_feature (888)..(935): n is a, c, g, or t
ggggcacaaaggaaagctaaaaccatgggggcaatctaaagaaaataattatctaaatcaacatgtcaacagaattaacttctacaagaaaacttacaaacaaccccatctccagacaaaggaagagcaacggaagaaacgcgagcaagaacgaaaggagaagaaagcaaaggttttgggaatgcgaaggggcctcattttggctgaagattaataattttttaacatcttgtaaatattcctgtattctcaacnnnnnnnnnnnnnnnnnnnnnnnnnnnnngctgtcatccccactttaatcacgagatctttttctgctaactgttcatagtctgtgtagtgtccatgggttcttcatgtgctatgatctctgaaaagacgttatcaccttaaagctcaaattctttgggatggtttttacttaagtccattaacaattcaggtttctaacgagacccatcctaaaattctgtttctagatttttaatgtcaagttcccaagttccccctgctggttctaatattaacagaactgcagtcttctgctagccaatagcatttacctgatggcagctagttatgcaagcttcaggagaatttgaacaataacaagaatagggtaagctgggatagaaaggccacctcttcactctctatagaatatagtaacctttatgaaacggggccatatagtttggttatgacatcaatattttacctaggtgaaattgtttaggcttatgtaccttcgttcaaatatcctcatgtaattgccatctgtcactcactatattcacaaaaataaaactctacaactcattctaacattgcttacttaaaagctacatagccctatcgaaatgcgaggattaatgctttaatgcnnnnnnnnnnnnnnnnnnnnnnnnnnnnnnnnnnnnnnnnnnnnnnnnaccaaatgtacttcttattcattttatggaaaagactaggctttgcttagtatcatgtccatgtttccttcacctcagtggagcttctgagttttatactgctcaagatcgtcataaataaaattttttctcattgtcaaaaaa

SEQ ID NO: 15313 - DNA, 615 bp, Homo Sapiens
gggaaagttaagagtggcgccagggatttgaaccgcgctgacgaagtttggtgatccatcttccgagtatcgccgggatttcgaatcgcgatgatcatcccctctctagaggagctggactccctcaagtacagtgacctgcagaacttagccaagagtctgggtctccgggccaacctgagggcaaccaagttgttaaaagccttgaaaggctacattaaacatgaggcaagaaaaggaaatgagaatcaggatgaaagtcaaacttctgcatcctcttgtgatgagactgagatacagatcagcaaccaggaagaagctgagagacagccacttggccatgtcaccaaaacaaggagaaggtgcaagactgtccgtgtggaccctgactcacagcagaatcattcagagataaaaataagtaatcccactgaattccagaatcatgaaaagcaggaaagccaggatctcagagctactgcaaaagttccttctccaccagacgagcaccaagaagctgagaatgctgtttcctcaggtaacagagattcaaaggtaccttcagaaagaaagaaatctctctacacagatgagtcatccaaacctgggaaaatt

SEQ ID NO: 15314 - DNA, 1505 bp, Homo Sapiens
  misc_feature (1403)..(1428): n is a, c, g, or t
  misc_feature (1466)..(1466): n is a, c, g, or t
ggggggcgccagggatttgaaccgcgctgacgaagtttggtgatccatcttccgagtatcgccgggatttcgaatcgcgatgatcatcccctctctagaggagctggactccctcaagtacagtgacctgcagaacttagccaagagtctgggtctccgggccaacctgagggcaaccaagttgttaaaagccttgaaaggctacattaaacatgaggcaagaaaaggaaatgagaatcaggatgaaagtcaaacttctgcatcctcttgtgatgagactgagatacagatcagcaaccaggaagaagctgagagacagccacttggccatgtcaccaaaacaaggagaaggtgcaagactgtccgtgtggaccctgactcacagaatcatgaaaagcaggaaagccaggatctcagagctactgcaaaagttccttctccaccagacgagcaccaagaagctgagaatgctgtttcctcaggtaacagagattcaaaggtaccttcagaaagaaagaaatctctctacacagatgagtcatccaaacctggaaaaaataaaagaactgcaatcactactcccaaactttaagaagcttcatgaagctcattttaaggaaaatggagtccattgatcaatatattgagagaaaaaagaaacatttttgaagaaacacaattccatgaatgaactgaagcagcccatcaataagggaggggtcaggactccagtacctccaagaggaagactctctgtggcttctactcccatcagccaacgacgctcgcaaagcccgggcctgtggccctgcaagtcaaagtaccttgggtctgaaggggtcactcaagcgctctgctatctctgcagctaaaacgggtgtcaggttttcagctgctactaaagataatgagcataagcgttcactgaccaagactccagccagaaagtctgcacatgtgaccgtgtctgggggcacccaaaaaggcgaggctgtgcttgggacacacaaattaaagaccatcacggggaattctgctgctgttattaccccattcaagttgacaactgaggcaacgcagactccagtctccaataagaaaccagtgtttgatcttaaagcaagtttgtctcgtcccctcaactatgaaccacacaaaggaaagctaaaaccatgggggcaatctaaagaaaataattatctaaatcaacatgtcaacagaattaacttctacaagaaaacttacaaacaaccccatctccagacaaaggaagagcaacggaagaaacgcgagcaagaacgaaaggagaagaaagcaaaggttttgggaatgcgaaggggcctcattttggctgaagattaataattttttaacatcttgtaaatattcctgtattctcaacnnnnnnnnnnnnnnnnnnnnnnnnnngctgtcatccccactttagtcacgagatcttttctgcnaactgttcatagtctgtgtagtgtcatgggttctcatgt

SEQ ID NO: 15315 - DNA, 1108 bp, Homo Sapiens
ggggccgtggcgcggagaactctgcaaaacaagaggctgaggattgcgttagagataaaccagttcacgccggagccccgtgagggaagcgtctccgttgggtccggccgctctgcgggactctgaggaaaagctcgcaccaggtggacgcggatctgtcaacatgggtaaaggagaccccaacaagccgcggggcaaaatgtcctcgtacgccttcttcgtgcagacctgccgggaagagcacaagaagaaacacccggactcttccgtcaatttcgcggaattctccaagaagtgttcggagagatggaagaccatgtctgcaaaggagaagtcgaagtttgaagatatggcaaaaagtgacaaagctcgctatgacagggagatgaaaaattacgttcctcccaaaggtgataagaaggggaagaaaaaggaccccaatgctcctaaaaggccaccatctgccttcttcctgttttgctctgaacatcgcccaaagatcaaaagtgaacaccctggcctatccattggggatactgcaaagaaattgggtgaaatgtggtctgagcagtcagccaaagataaaccaccatatgaacagaaagcagctaagctaaaggagaaatatgaaaaggatattgctgcatatcgtgccaagggcaaaagtgaagccgggaaaaaaggggccctggcaggccaacaggctcaaagaagaagaacgaacccacaaaattgagaaggagggacgaggaacaaccaacatgtcgccatggacgcgaaacccattctgcactacttgcgaaaacatgcaccttgtcgggccggccctcggccccttcaaaaaagcttttctaaaaccatttcccttggccgccgcggggcccccgtcaggaaaatggaaaacctgggccccaaacgttgttttcccctaaggaaaaaccttggctcacatgcatacagaggcttggggatctcccaccccagataaaataactctcccgggcgtgcaaaccgacatcgcttttattaaacaaaatctccatagtggcaatttctggagaggctcttttctcgtggatcgtctttccaggaggagaattgcgctggg

SEQ ID NO: 15316 - DNA, 1552 bp, Homo Sapiens
  misc_feature (1401)..(1456): n is a, c, g, or t
  misc_feature (1485)..(1485): n is a, c, g, or t
  misc_feature (1509)..(1509): n is a, c, g, or t
tgcacatttcaagaagcaggaactggccagttcctgcttcttgaaagagatgaagtagaactctcgtatgctaagaatggacaagatcttggcgttgccttcaaaatcagtaaggaagttcttgctggacggccactgttcccgcatgttctctgccacaactgtgcagttgaatttaattttggtcagaaggaaaagccatattttccaatacctgaagagtatactttcatccagaacgtccccttagaggatcgagttagaggaccaaaggggcctgaagagaagaaagattgtgaagttgtgatgatgattggcttgccaggagctggaaaaactacctgggttactaaacatgcagcagaaaatccagggaaatataacattcttggcacaaatactattatggataagatgatggtggcaggttttaagaagcaaatggcagatactggaaaactgaacacactgttgcagagagccccccagtgtcttgggaaatttattgagattgctgcccgaaagaagcgaaattttattctggatcagacaaatgtgtctgctgctgcccagaggagaaaaatgtgcctgtttgcaggcttccagcgaaaagctgttgtagtttgcccaaaagatgaagactataagcaaagaacacagaagaaagcagaagtagaggggaaagacctaccagaacatgcggtcctcaaaatgaaaggaaactttaccctcccagaggtagctgagtgctttgatgaaataacctatgttgaacttcagaaggaagaagcccaaaaactcttggagcaatataaggaagaaagcaaaaaggctcttccaccagaaaagaaacagaacactggctcaaagaaaagcaataaaaataagagtggcaagaaccagtttaacagaggtggtggccatagaggacgtggaggattcaatatgcgtggtggaaatttcagaggaggagcccctgggaatcgtggcggatataataggaggggcaacatgccacagagaggtggtggcggtggaggaagtggtggaatcggctatccataccctcgtgcccctgtttttcctggccgtggtagttactcaaacagagggaactacaacagaggtggaatgcccaacagagggaactacaaccagaacttcagaggacgaggaaacaatcgtggctacaaaaatcaatctcagggctacaaccagtggcagcagggtcaattctggggtcagaagccatggagtcagcattatcaccaaggatattattgaatacccaaataaaacgaactgatacatatttctccaaaaccttcacaagaagtccactgttttctttagtaggctaactttttaaacattcccacaagaggaaatgcctgcgggttnnnnnnnnnnnnnnnnnnnnnnnnnnnnnnnnnnnnnnnnnnnnnnnnnnnnnnnnaattgcagtttaaagtgaatcgtaagagnacctcagcattgtgcacgataagngaatgtgtcagtatttcagggtctacatttatctgtaaatgtg

SEQ ID NO: 15317 - DNA, 1404 bp, Homo Sapiens
ccggttctgctactttcccattctttggtgtagctcctgcaatcctgaatgagtccggggaagagttggaaggtgaagctgaaggttatctggtgttcaagcagccctggccagggatcatgcgcacagtctatgggaaccacgaacgctttgagacaacctactttaagaagtttcctggatactatgttacaggagatggctgccagcgggaccaggatggctattactggatcactggcaggattgatgacatgctcaatgtatctggacacctgctgagtacagcagaggtggagtcagcacttgtggaacatgaaggctgttgcagaggcagctgtggtgggccaccctcatcctgtgaagggtgaatgcctctactgctttgtcaccttgtgtgatggccacaccttcagccccaagctcaccgaggagctcaagaagcagattagagaaaagattggccccattgccacaccagactacatccagaatgcacctggcttgcctaaaacccgctcagggaaaatcatgaggcgagtgcttcggaagattgctcagaatgaccatgacctcggggacatgtctactgtggctgacccatctgtcatcagtcacctcttcagccaccgctgcctgaccatccagtgaacatgatcctgacctttacctaggattcctcctgctccaaactttgcccatcctctttgccccctcaggagtgctgagggccagtgttgacccacactaccctcccttgaccagctgtctgggaccggaaaccagctttgtctccaggtagagacaacatcctgtgactgccaggcagaaaggacagggcccaggtcagcctcagtctgctgtgcctccagactgcagagctctcagaacccagaacagagacgaaaaggctacctctcctacccaagttaagtgttcaaaggggatgtgagggcctccactgaagcagggaggcagctgtgtaatcctatgtcagctctcttaggaagccccagtacttatattgggcatgcacttgcccttaaaaacaatgatttgtgagtccaggaacaatttactatttttaaaatattttgctgcttctgttctgggtctgaattcccttttgtgccagatgccagtactgtctgcccattggctccaggggctgtatgggcagattcagtctccagagggtattcagatcatctgcttctttgaaggagtaaatgtgttttgttcctagggccagaggagcttgtcttccttgtcctctgttcccaccctcccctgaacagaacccagcccataagagacattctcagatgaaactctgttttcttgccccagtcaggctcaagccctgtggttgtaggaataaagcctgtgatcgtggggttgtaa

SEQ ID NO: 15318 - DNA, 455 bp, Homo Sapiens
ttacaacccagaatcacatggaacaaggccctctgggctcttctgagtcgaagtgttatgttctcgccttttttcgtgggtgggtaagactgaggctgatgtctgggacgtgacttccccacatatccccaacagatcattaaatccactgtaagtcacttcttgtcgtctaccaattcccttccccccacttaccactcaagttatgaaaacagtgagtcatcgtttgatcgtctgtgatcccaatttgcctaagaatatacactgtcaggaatatagatcctgtcacaagaggcttcacaaagtaaaggaaccatgtgtgtttctaggctgttgtgcttttcaacagtctgtatcatttcaactagtgtaacaatgaccgtttcttttagtttcttgataaccttgttgtctactttgtttcctgattaccttgttgtctacttcgttgcctg

SEQ ID NO: 15319 - DNA, 596 bp, Homo Sapiens
ggagagcagagccaaaccccagaagcttggccttagtaacttctgcgtccatggggtggttggctttgaagattttctgcgcctcctgttgagggaggctcagctgcttccagcgctggaagaaatcctgggccgccatctcggtgggctggaagaacttgttgatggtcactgggagcttcagggtgagggcctggggggcgccaccgtaccggaagcgcacggacagcagcgggggcgtcaggaagtcccgcaggcactcgatattgagcacctgctgcacctgcgcgccgccgtccacctgcgccgccacgcgcttggtctgcacagccagctgagtctggaggtctcccgggtgaaccacagtgggtgagaaattctggaactgcaccgaggtcttgttgccatagaagagatacatgcggcccaggttctgtcggaactctgacttgactccgatctgcagcagctggttctcgaacaggaccccgttgttcttacacacaaacttattcagcaactcatcggcttccggaatgggagcgccgatgtcctcaggacctgggctgaggaaggcctcctcgggggtgggcccc

SEQ ID NO: 15320 - DNA, 723 bp, Homo Sapiens
ccacgcgtccggtgcagttctccctgctccactccaagttccatctgtgcagcgtggccacgcgggcgctgctgctgtccacctacatcaagttcatcaacctcttccccgagaccaaggccaccatccagggcgtcctgcgggccggctcccagctgcgcaatgctgacgtggagctgcagcagcgagccgtggagtacctcaccctcagctcagtggccagcaccgacgtcctggccacggtgctggaggagatgccgcccttccccgagcgcgagtcgtccatcctggccaagctgaaacgcaaagaaggggccaggggccggcagcgccctggacgattggccggagggacccccagcagcaacgaccatcaacgggggcatggagcccacccccaccagactgtgtcgacgcccctcgccctccgccgacctcctggggctgcgggcagaccccctccccccgcagcacccccggcttctgcaggagcagggaaccttctggtggacgtcttcgatggcccggccgcccagcccagcctggggcccacccccgaggaggccttcctcagcccaggtcctgaggacatcggccctcccattccggaagccgatgagttgctgaaaataaatagggaagatggagacaccctctgggggtcctctctgagtcaaatccagtggtgggtaattgtacaataaattttttttggtcaaattt

SEQ ID NO: 15321 - DNA, 1027 bp, Homo Sapiens
  misc_feature (936)..(938): n is a, c, g, or t
  misc_feature (1012)..(1012): n is a, c, g, or t
ggggcgcatgtgtgcgctgtgctttggctcttcgggtaaagatggcggagcgcgggtacagcttttcgctgactacattcagcccgtctggtaaacttgtccagattgaatatgctttggctgctgtagctggaggagccccgtccgtgggaattaaagctgcaaatggtgtggtattagcaactgagaaaaaacagaaatccattctgtatgatgagcgaagtgtacacaaagtagaaccaattaccaagcatataggtttggtgtacagtggcatgggccccgattacagagtgcttgtgcacagagctcgaaaactagctcaacaatactatcttgtgtaccaagaacccattcctacagctcagctggtacagagagtagcttctgtgatgcaagaatatactcagtcaggtggtgttcgtccatttggagtttctttacttatttgtggttggaatgagggacgaccatatttatttcagtcagatccatctggagcttactttgcctggaaagctacagcaatgggaaagaactatgtgaatgggaagactttccttgagaaaagatataatgaagatctggaacttgaagatgccattcatacagccatcttaaccctaaaggaaagctttgaagggcaaatgacagaggataacatagaagttggaatctgcaatgaagctggatttaggaggcttactccaactgaagttaaggattacttggctgccatagcataacaatgaagtgactgaaaaatccagaatttcagataatctatctacttaaacatgtttaaagtatgttttgttttgcagactttttgcatacttatttctacatggtttaaatcgactgtttttaaaatgacacttataaatcctaataaactgttaaaccccaaaaaaatacaacgaccacaaaaaacannncccttgtcgggccgccctcgggccctcgaaaaggctttcctagaccctttcgtttgggcgcgccgcggcccccntaagggtaaatggac

SEQ ID NO: 15322 - DNA, 804 bp, Homo Sapiens
aggataacatagaagttggagtctgcaatgaagctggatttaggaggcttactcctactgaagttaaggattacttggctgccatagcataacaatgaagtgactgaaaaatccagaatttcagataatctatctacttaaacatgtttaaagtatgttttgttttgcagactttttgcatacttatttctacatggtttaaatcgactgtttttaaaatgacagctgataaatcctaataaactgttaaacccaccttccagccttttaggagttgctaaaattttaacagttatttcctgctttgtatcacagttgatttctgaagactacagtggcccagcagaatgatgaaatgactttttcgttgtcaggcaattttggttaagtcaaatcttaatgccctcttcgctatcagatgttgcctgtgtttccatacaagcaaaatgctgattttggtaaaaaacatgactgcttctagagctgggaggatctgcagactttcacggattcatggaacaagaaaagaagcataggtacttttaggtgccattaggtattgatcagtgaaatcctagggtgctctatgagattgtactaggcctatgaagagtggtaagccaaataggtctccatgggagatacattatgtaaataaataaacaatggtttgctggttcctgttggtgtctccacaagtaggtaaacatgtttaaaggaacccgggttcttagattttgttagactttttaaactcaaggatgagcataagtgcttgaaataaaatgctaatacttaagtgtc

SEQ ID NO: 15323 - DNA, 720 bp, Homo Sapiens
ggatggacagctgggctcggcaccggatctacgctgccttcaaggaagtgctgggttcgggcatgcaccaccacctccagaacaatgagctactccgtgacatctttggcctgggccctgtgctgttgctggatgccactgccctgaaggcctgcaaggttccacgctttgagaagcacctgtacaatgctgctgccttcaaagcccggaccaaggctcgaagccgtgtgcgggacaagcgggcagacatcctgtgaagcaggacctgctgaagaggagactttctatgcccttggtccgtatttttaacagaagacagtgcaacaactggtctccaccagtatttgtcactttattttttttaatgacaaaaccaaaaacagacatggggtgggtagctgggggcccggacacttgggaccctgacccctttgtccctgcactcagccctgtggccccttcctgtcctgtctcaggccaggctaaatatgtgccttcctcagggctgtggggcaggcactagggggcctttcccttcctttcctttctcaggccttgctcccccaggatgacccactcttaggggggtggtggcatctggacaaatgccaccacagcaggtggggtggcaaagctacctggaatggatttgtgtgctgatttttaaggattattacagataattaaacagaacggtcagccttctgtggtcttaaaaaa

SEQ ID NO: 15324 - DNA, 1434 bp, Homo Sapiens
caggtcgtgtagtaatacgagaacagacaggccaggcagagatgtagggagtagctcatagttctggaggtggtggtgcatgcccgaacccagaacttccttgaaggcagcgtagatccggtgccgagcccagctgtccatgtagagcacctcaaagccgaagcgcactatctcttcttcgcattcaccgccctccacggagtgcagcacggcgcggaaagtagagcgctggcgccgacgatcagccttggcacggtacttgttactgtcagtggccagagtgcgcaggacactgcagagggcctccatgtcctcgtaaacaaactcctcctcaaggtcccgggcaagctcaaagagcagtgcaatggtttcaccggcagcgatccgcaggttcacactttcactggacaagagctggggcagccggggcagctgcctgtcaaggatgtggctgattggggtgctagggcagatggtgagcagcaatgcccaggcctgcagggcagcagagagcaggccgtgcaggctggcaggaaccacaggacttgtggagctgccccccaagccatagaagccggctgaaaaacactttctaagcaggcaaggcaagagaccaggtcctggatgtcagcggcagccacgtagcagcccaggccaagggcagaagcacagtggagccgggcagcagggctagctgtgctgtcactgagcacagagaccagcagaggctgcaggctgtgaaacagctcctcacccttaggtccagggcccagctgcacgcagagcaggcctagcacagcagcagccagggcttgttcctcgcccttccctttcttgaggcacttttccagggcatcggctagcgtgaggcggcgctccagcaagaagtcggggagtaggcgggacgctagggccaggcgcaggctctcaagagcaccctgccgggtcttggcactcttgtctgtgagacagtccacatactccttcagcttttcctcaaggtcttcctgctggccctgctcatccacgacatcccccccaaggctgtcctctgcagtggtgctgagaaggctggggcattcactggcggtgctgcgggcctcactggctgcctcatcgtcactggaacccgagtcagcttgggcactgctccgggcacctcctccacggcgctgaccacccttccggagcgtgttgcccttacgggcgcgaggcatgccgggaaccgggcgcggggggcgcggggtcagggacccggtgggtgtgggctccaggccaacgagacgccggccggtgcgctgcgctgagacttggccagacgacgggagccacacgccgcgcgcgccaccatcttcgcgcgacgcgtgggtcgacgatatcccgggattccgaccgtaccacctctttttttaacactggtctatattactatcg

SEQ ID NO: 15325 - DNA, 828 bp, Homo Sapiens
cctagttttagaagtttcaatagcaggtttaccatttagcttacatttttcgactgtgaacgtgaataggctgctttttgctttcttctttccagaccccacagtagagcacttttcacttatttgggggaggcttcaggggactgctctcaccttaactcagccagaaagatgccctagttgtgatcaaaggtaactcgaggtggagggtagccctggggcccctcgacatcaccgtcattgatggagcctgaaccgtgtgctcctcggcagatgctgttgttgttacttccctccaagaggctggaaaagggctcagagctgctgagcagaaaccggagggtgacccatttcaggaggtgccggtaccagcctgactaggtacaggcaagcttgtgtgggcccaacaggcccttggtagagctggtgccagatgtgggctcagatcctgggcatgatgggccgagccacctcggatcccactgattggccagccgagcgagaaccaggctgctgcatggcactgaccgccgcttccagcttcctctgagccgcagggcctgctacgcgggcaagcgtgctgcctctcttctgtgtcgttttgttgccaaggcagaatgaaaagtccttaaccgtggactcttcctttatcccctcctttaccccacatatgcaatgacttttaattttcacttttgtagtttaatcctttgtattacaacatgaaatatagttgcatatatggacaccgacttgggaggacaggtcctgaatgtcctttctccagtgtaacatgttttactcacaaataaaattctttcagcaaaa

SEQ ID NO: 15326 - DNA, 689 bp, Homo Sapiens
gctgaaagaattttatttgtgagtaaaacatgttacactggagaaaggacattcaggacctgtcctcccaagtcggtgtccatatatgcaactatatttcatgttgtaatacaaaggattaaactacaaaagtgaaaattaaaagtcattgcatatgtggggtctggaaagaagaaagcaaaaagcagcctattccacgttcacagtcgaaaaatgtaagctaaattgtaaacctgctcacaagaaaattctagaaaggcctcttcccctcctgatataccttccctatgacaggaatccagagacccaagtgaaaaagaaactgagctcctgaatctgattctggtcgagggatcgtcggtcagatcatgcatagcatcacgttgggtgcacacaggcccatctgccgctggggtttcctgcccagcatctggcccagacctgcctcttcaaggccgctggtgggcacacgagtgttttcacgggaccaaggctttgtatatagatttaagtgagatcactgagcagagagaatgccacatgaagccaggagtctgagtccgtcacctgagactttagggtggaggggaagccaagcagagacagaatgtgggatttcacaacaggaaggacggcaggaaaggtgaggctcaggagggtgcgtgcaaccaaagctgcaaaagccttca

SEQ ID NO: 15327 - DNA, 432 bp, Homo Sapiens
gtttggcaaattggctaagttcctacagctaattgtgggattagtgatatgcttttctaaagagtagaaaagtcgaagatgtctagacagaacttagtggctttgacagtgactacccttctgggtgtggctgtaggggggtttgtcctctggaaaggcatccagcgccgccgaaggagtaaaacgagtcctgtgacccaacagccacagcagaaagtgctgggcagtagagagctgccccctccagaagatgatcagctgcactccagtgcccccagatcctcgtggaaggaacggatccttaaagcaaaggtggtgacggtgtctcaggaggcagagtgggatcaaatcgagcccttgcttagaagtgaattagaagattttccagtacttggaattgactgtgagtgggtaagttaaaaagcaaaagtt

SEQ ID NO: 15328 - DNA, 914 bp, Homo Sapiens
gggtccggttcctagcgttaactgcgaccggggttcagcgctcgggtgaggagctggtggcgtcggcaggttcgaggcgattcgagctccagctaggatgatcgaggttgtttgcaacgaccgtctggggaagaaggtccgcgttaaatcttccaattgccttaactgctctgcgcccagcacggatgataccatcggggaccttaagaagctgattgcagcccaaactggtacccgttggaacaagattgtcctgaagaagtggtacacgatttttaaggaccacgtgtctctgggggactatgaaatccacgatgggatgaacctggagctttattatcaatagatgagaatcctcatcttcctgccccgctttcctctcccatcctcatcccccacactgggatagatgcttgtttgtaaaaactcaccttaataaagacttctatgttaaaacccccaaccctgtacccttgcaccgcgccctgccggctgccaaatccacgaagtcccccccgaggttttgtaacctaacaccacctgttttgtcccctttggcccctcaaaaacgtttcctgaaaacccttatcttgggcccgcgcggcccccctcccccgttagtgaaaagtgggccaaggttgcttcccatgggaaagaccgcgcaccttgaccaagggattggggaacccctcccgccaatacacaacccccccggggggtacaaccggagttgttctgcaaccacaccccctaaggcgctttttctccagggcacattacctggggctccactttccaccggtaggcccccccgtctatactttcgaacctttccaatttccccacccccgggcctgtggcaccttcacttgcggagtcacggacggcggctaatgtccctgtaatgccccttt

SEQ ID NO: 15329 - DNA, 671 bp, Homo Sapiens
ggggcctcgaactttaacttccgcttccggttcctagcgttaactgcgaccggggttcagcgctcgggtgaggagctggtggcgtcggcaggttcgaggcgattcgagctccagctaggatgatcgaggttgtttgcaacgaccgtctggggaagaaggtccgcgttaaatgcaacacggatgataccatcggggaccttaagaagctgattgcagcccaaactggtacccgttggaacaagattgtcctgaagaagtggtacacgatttttaaggaccacgtgtctctgggggactatgaaatccacgatgggatgaacctggagctttattatcaatagatgagaatcctcatcttcctgccccgctttcctctcccatcctcatcccccacactgggatagatgcttgtttgtaaaaactcaccttaataaagacttagatgttgcaaaaaaaactccccaccccaagacacctctcctgtcccaccccggtccgcaaatccattacgttttccttggcgggccgcctcggccccccaagaagttttttttcaacccttcgtttggggcgcgcggcgcccgatcaggcaaggggaacctgggccctaaccttgttctccccaggagaatcctgggttcaggcacctaggggttgtgaactcccccccc

SEQ ID NO: 15330 - DNA, 621 bp, Homo Sapiens
ttcatacagagacaacaacaaagcaacatctaagtctttattaaggtgagtttttacaaacaagcatctatcccagtgtgggggatgaggatgggagaggaaagcggggcaggaagatgaggattctcatctattgataataaagctccaggttcatcccatcgtggatttcatagtcccccagagacacgtggtccttaaaaatcgtgtaccacttcttcaggacaatcttgttccaacgggtaccagtttgggctgcaatcagcttcttaaggtccccgatggtatcatccgtgctgggcgcagagcagttaaggcaaatggaagcggtagaacgaggaagaggacattctagggcagaataccatctgccaggaccccatccgccccctctcccgggtttaactaaaaccatccgacaacacagattgagttgcctgcctcacgccaagcacccctgcgggtaccactgcctctcggctgccagtggatacttgcatttaacgcggaccttcttccccagacggtcgttgcaaacaacctcgatcatcctagctggagctcgaatcgcctcgaacctgccgacgccaccagctcctcacccgagcgctgaaccccccc

SEQ ID NO: 15331 - DNA, 928 bp, Homo Sapiens
gggcggacggtcatgggacttcagcatggcggtgtttgcagatttggacctgcgagcgggttctgacctgaaggctctgcgcggacttgtggagacagccgctcaccttggctattcagttgttgctatcaatcatatcgttgactttaaggaaaagaaacaggaaattgaaaaaccagtagctgtttctgaactcttcacaactttgccaattgtacagggaaaatcaagaccaattaaaattttaactagattaacaattattgtctcggatccatctcactgcaatgttttgagagcaacttcttcaagggcccggctctatgatgttgttgcagtttttccaaagacagaaaagctttttcatattgcttgcacacatttagatgtggatttagtctgcataactgtaacagagaaactaccattttacttcaaaagacctcctattaatgtggcgattgaccgaggcctggcttttgaacttgtctatagccctgctatcaaagactccacaatgagaaggtatacaatttccagtgccctcaatttgatgcaaatctgcaaaggaaagaatgtaattatatctagtgctgcagaaaggcctttagaaataagagggccatatgacgtggcaaatctaggcttgctgtttgggctctctgaaagtgacgccaaggctgcggtgtccaccaactgccgagcagcgcttctccatggagaaactagaaaaactgcttttggaattatctctacagtgaagaaacctcggccatcagaaggagatgaagattgtcttccagcttccaagaaagccaagtgtgagggctgaaaagaatgccccagtctctgtcagcactcccttcttcccttttatagttcatcagccacaacaaaaataaaacctttgtgtgatttactgttttca

SEQ ID NO: 15332 - DNA, 1064 bp, Homo Sapiens
gggacttcagcatggcggtgtttgcagatttggacctgcgagcgggttctgacctgaaggctctgcgccggacttgtggagacagccgctcaccttggctattcagttgttgctatcaatcatatcgttgactttaaggaaaagaaacaggaaattgaaaaaccagtagctgtttctgaactcttcacaactttgccaatagtacagggaaaatcaagaccaattaaaattttaactagattaacaattattgtctcggatccatctcactgcaatgttttgagagcaacttcttcaagggcccggctctatgatgttgttgcagtttttccaaagacagaaaagctttttcatattgcttgcacacatttagatgtggatttaatctgcataactgtaacagagaaactaccatattacttcaaaagacctcctattaatgtggcgattgacctgaggcctggcttttgaacttgtctatagccctgctatcaaagactccacaatgagaaggtatacaattttccagtgccctcaatttgatgcaaatctgcaaaggaaacggtatggttctataattttaggatgtttttcgcatctggcagtttattatccagtagtacactggcaattggtcaaactgactccttttccttaaagcagaatgttctcatagcataggaacacaattctgccatttagttgagctcctgcaaaattttacagggcctcacgaagacattaccaggggaaagccctaatggtcacgggcagacaacatgatgtggctgggacagaccatatcttgtggctacaagaatatgcgaactgactataccggtgccagaacacgtctcgaaataacccaggggcaccctcacggaagttgcactttcagacatcatggtgaccctcttcatcgtctgatctcgacacgtttatttcacccttagcacacaatctgttcgcagccaacatcttagcatctcattgcacaattggcttcagttgacctcgtaagcccacacttttcttcacctgatataaagcctcatcttataatc

SEQ ID NO: 15333 - DNA, 1022 bp, Homo Sapiens
  misc_feature (340)..(370): n is a, c, g, or t
  misc_feature (575)..(587): n is a, c, g, or t
cccggacggcctcaccatgatgaaacgggcagctgctgctgcagatgggaggaggtaagttacccggatcgcctgtctccaggccctcacctagcctggtccccgggctgctgggagaacgcagagatgaggcgctgggctggctctcaccctccacttccgaagctgcccgagtagcctgagtgagccacagcatcaaaatactccagggaaaagctcactcccattcctgacccagcttctcttctagtccttatgtcgaataagcataggaggaagatcgtttgaaagaggatttgcagctaaactccacgtggcttatttcacatttatgcgtggnnnnnnnnnnnnnnnnnnnnnnnnnnnnnnnaatgtgagaccaatgaagggtatagacttcctcagcatcacacagcaagttagagacaaaccagggccatggctggtccttctatgacatctttgcttcacctggctccacactccaccttttcttcaccagaagaccactaagttgccatctctgtattgctcaagctgacagtctccggaaagtgtcaaggaatccctaagcnnnnnnnnnnnnnaagggtcccttctcctgagcccacctctgcaactcagcttctctctccccagagccctggcagtgggggctgtgcccgtggtgctcagtgccatgggcttcactggggcaggaatcgccgcgtcctccatagcagccaagatgatgtccgcagcagccattgccaacgggggtggtgtttctgcggggagcctggtggctactctgcagtccgtgggggcagctggactctccacatcatccaacatcctcctggcctctgttgggtcagtgttgggggcctgcttggggaattcaccttcttcttctctcccagctgaacccgaggctaaagaagatgaggcaagagaaaatgtaccccaaggtgaacctccaaaacccccactcaagtcagagaaacatgaggaataaaggtcacatgcagatgcaaaaaaaa

SEQ ID NO: 15334 - DNA, 815 bp, Homo Sapiens
  misc_feature (502)..(504): n is a, c, g, or t
  misc_feature (506)..(507): n is a, c, g, or t
  misc_feature (510)..(511): n is a, c, g, or t
  misc_feature (520)..(520): n is a, c, g, or t
  misc_feature (523)..(523): n is a, c, g, or t
  misc_feature (525)..(526): n is a, c, g, or t
  misc_feature (530)..(561): n is a, c, g, or t
  misc_feature (569)..(569): n is a, c, g, or t
  misc_feature (573)..(578): n is a, c, g, or t
  misc_feature (580)..(636): n is a, c, g, or t
  misc_feature (638)..(638): n is a, c, g, or t
  misc_feature (642)..(646): n is a, c, g, or t
  misc_feature (650)..(650): n is a, c, g, or t
  misc_feature (652)..(652): n is a, c, g, or t
  misc_feature (654)..(656): n is a, c, g, or t
  misc_feature (658)..(658): n is a, c, g, or t
  misc_feature (661)..(675): n is a, c, g, or t
  misc_feature (681)..(681): n is a, c, g, or t
  misc_feature (683)..(702): n is a, c, g, or t
ggggaagtctctatggtagcgtcagcgtcggaggcggtagtgacggtggcgtttccttgaggaagagtgagggttccaacttttctgcttatctgggaggtgttgggcgcggacagtcgagatgtcagagaaaaagcagccggtagacttaggtctgttagaggaagacgacgagtttgaagagttccctgccgaagactgggctggcttagatgaagatgaagatgcacatgtctgggaggataattgggatgatgacaatgtagaggatgacttctctaatcagttacgagctgaactagagaaacatggttataagatggagacttcatagcatccagaagaagtgttgaagtaacctaaacttgacctgcttaatacattctagggcagagaacccaggatgggacactaaaaaaatgtgtttatttcattatctgcttggatttatttgtgtttttgtaacacaaaaaataaatgttttgatataacccccaacgcnnnannccnncccccaccnccncnncccnnnnnnnnnnnnnnnnnnnnnnnnnnnnnnnnctcccaanaaannnnnnannnnnnnnnnnnnnnnnnnnnnnnnnnnnnnnnnnnnnnnnnnnnnnnnnnnnnnnnangggnnnnnaaananannnanaannnnnnnnnnnnnnntgttgntnnnnnnnnnnnnnnnnnnnnaaaaaattttttttaaaccaccctttcttttgtggcgcgccgcgcccacccccgaaacacaaagaaaaacaggggcacaatttgtttttctcccacagaagaaaccccgggac

SEQ ID NO: 15335 - DNA, 691 bp, Homo Sapiens
cgatctagagtatcccctggggtaccctatctccattccagtttgagaatcaccaatctattaggtcccagcactctatgattctaatttctgctgagttatttgatattggtagaaaattaacattgacagaattaaattcctaaggataagaaatagcaaatatgcttctattttactacctttgtaaaaagaccagaaagaataaaagttgtatgcaattacacaaagagttcatgtttagaatcacaggagatgaagacaatatgtcttactttacacagttcaaaaacctatttcaaagattaagtagcttttaagaggttaatcatctatgtaaattacatattccatgcttataattaatactgaactacaataaaaatctggcttaaaacttaccgtaactgattagagaagtcatcctctacattgtcatcatcccaattatcctcccagacatgtgcatcttcatcttcatctaagccagcccagtctaaaaatagaaacagatgctgtctaaatatttctcatacattatttccacaattacaaaaactttgaaaagcttgctactgaacactcacaattcaaaaacagctaaaaccatatctatgaaaaatggtatcttccttaaatctgagcttatgctgtctagttccctcaattcttgatagggtaaaccagggcc

SEQ ID NO: 15336 - DNA, 838 bp, Homo Sapiens
atggctataaaagcagtgtgacggaaccttgccccgacagtggtgaacagctgcagccagctcctgtgctgcagaagaaagaactggctcatgagactgcacaaaaaggggaggcaaagtgtcataagagtgacacaggcatgtccaaaaagaagtcacgacaaggaaaacttgtgaaacagtttgcaaaaatagaggaatctactccagtgcacgattctcctggaaaagacgacgcggtaccagatttgatgggtccccattctgaccagggtgagcacagtggcactgtgggcgtgcctgtgagctacacagactgtgctccgtcacccgtcggttgttcagttgtgacatcagatagcttcaaaacaaaagacagctttagaactgcaaaaagtaaaaagaagaggcgaatcacaaggtatgatgcacagttaatcctagaaaataactctgggattccccaattgactcttcgtaggcgtcatgatagcagcagcaaaacaatgaccagagaatgatggaatgaactcttccaaaataagcatcaagttaagcaaagaccatgacaacgataacaatctctatgtagcaaagctttgacaaagagtgggtggccaagcagaccaagaggatgctggacatgaaggtgaaccccatccagggcttagcctccaagtgggactacgaaaagaacgagtggaagaagtgagagatgctggcctgcgcctgcacctgcgcctggctctgtcaccgccatgcaactccatgcctatttactggaaacctgttatgccaaacagttgtaccactgctaataaatgaccagtttacctga

SEQ ID NO: 15337 - DNA, 606 bp, Homo Sapiens
ccgaagatggttggcagactatctcaacaggttgtttctaggccatccctcacacaggttaaatcctcccgacacaccagccaccaggtcagcagagccacctgccactcaacacccgctcaaacacacggtttctgaccactgacaacactgacattttaaaattagccctttgtttgtaaaaagttagcaacaaaataagctaaaagcagaaggtcctctctaaaggctatggataacaggatctgacaaacagagcccaaggtgaccatagtgcttctgccacatgataacgagcgcggtgaaaccgatgaagaacatggcaccgcccacaaccgtcttccactcgttcgagcccctgttcatctcagcaaagctctccttgaacttaatgcgatacaactcgactttctcatccatggagaggctgctccaggaggccttctccttctcctccagtgccttctggctggcagacaggtgcttgacatgggccacctccggcaaggggtggtcacgccgatccatataagctgggagcgaaaagtcttcgctcttcacaacactttcatgagctcgtacacacacagaggtggaaattgctcg

SEQ ID NO: 15338 - DNA, 530 bp, Homo Sapiens
  misc_feature (479)..(479): n is a, c, g, or t
  misc_feature (514)..(514): n is a, c, g, or t
gcttctgccacatgatgacgagcgcggtgaaaccgatgaaggacatggcaccgcccacaaccgtcttccactcgttcgagcccctgttcatctcagcaaagctctccttgaacttaatgcgatacaactcgactttctcatccatggagaggctgctccaggaggccttctccttgtccttcagtgccttctggctggcagacaggtgcttgagaatatcatgtccagttttttagcaaccagccagagagggcgtgggttcatgaaaaacgggtacgagagtataaaggtcataaacagtatgaagaattactggctgaggcaaccaaacaagccagcaatcactctgagaaacaaaagattcggaaaccccgacctcagagagaacgtgctcagtgggatattggcattgcccatgcagagaaagcattgaaaatgactcgagaagaaagaatagaacagtatacttttatttacantgataaacagcctgaagagctttatgccccaagcntacaaagggcgccgct

SEQ ID NO: 15339 - DNA, 1335 bp, Homo Sapiens
  misc_feature (865)..(883): n is a, c, g, or t
  misc_feature (935)..(943): n is a, c, g, or t
  misc_feature (952)..(963): n is a, c, g, or t
  misc_feature (977)..(998): n is a, c, g, or t
  misc_feature (1107)..(1170): n is a, c, g, or t
gtcaggtgcgtgcccctgtccggcagccgaggagaccccgcgcagtgctgccaacgccccggtggagaagctgaggtcatcatcagatttgaaatatttaaagtggatacaaaactatttcagcaatgcagacaattaagtgtgttgttgtgggcgatggtgctgttggtaaaacatgtctcctgatatcctacacaacaaacaaatttccatcggaatatgtaccgactgtttttgacaactatgcagtcacagttatgattggtggagaaccatatactcttggactttttgatactgcagggcaagaggattatgacagattacgaccgctgagttatccacaaacagatgtatttctagtctgtttttcagtggtctctccatcttcatttgaaaacgtgaaagaaaagtgggtgcctgagataactcaccactgtccaaagactcctttcttgcttgttgggactcaaattgatctcagagatgacccctctactattgagaaacttgccaagaacaaacagaagcctatcactccagagactgctgaaaagctggcccgtgacctgaaggctgtcaagtatgtggagtgttctgcacttacacagaaaggcctaaagaatgtatttgacgaagcaatattggctgccctggagcctccagaaccgaagaagagccgcaggtgtgtgctgctatgaacatctctccagagccctttctgcacagctggtgtcggcatcatactaaaagcaatgtttaaatcaaactaaagattaaaaattaaaattcgtttttgcaataatgacaaatgccctgcacctacccacatgcactcgtgtgagacaaggcccataggtatggnnnnnnnnnnnnnnnnnnnagtactagttaattttgagtaattgtattgtcagaaaagtgattagtactannnnnnnnngttgtttcnnnnnnnnnnnntttttgtgtgaggnnnnnnnnnnnnnnnnnnnnnnggtgtttaaaagcaaggcatgcttgtggatgactctgtaacagactaattggaattgttgaagctgctccctggttccactctggagagtaatctgggacatcttaggnnnnnnnnnnnnnnnnnnnnnnnnnnnnnnnnnnnnnnnnnnnnnnnnnnnnnnnnnnnnnnnnaggcttggttttttaattcattaaccaagggttagcccttaagggggaggaggacggattgattccaccattccacttcccaaaatctagtttaagaaaacatgtttccccatcctggtgcttccttaggaaagggagtttaggaaatggcccccattttaaaaa

SEQ ID NO: 15340 - DNA, 1142 bp, Homo Sapiens
  misc_feature (638)..(647): n is a, c, g, or t
  misc_feature (655)..(713): n is a, c, g, or t
  misc_feature (998)..(1006): n is a, c, g, or t
agagcggtccctctcgcccctctctgagggggtgggggtgctgctctctccgaggggtggaatgccgctgtctctgaggggtgggggtgccgctctaaattggctccatatcatttgagtttagggttctggtgtttggtttcttcattctttactgcactcagatttaagccttacaaagggaaagcctctggccgtcacacgtaggacgcatgaaggtcactcgtggtgaggctgacatgctcacacattacaacagcagagagggaaaatcctaagacagaggaactccagagatgagtgtctggagcgcttcagttcagctttaaaggccaggacgggccacacgtggctggcggcctcgttccagtggcggcacgtccttgggcgtctctaatgtctgcagctcaagggctggcacttttttaaatataaaaatgggtgttatttttattttcccccgtaaagtgatttttggtcttctgttgacattcggggtgatcctgttctgcgctgtgtacaatgtgagatcggtgcgttctcctgatgttttgccgtggcttggggattgtacacgggaccagctcacgtaatgcattgcctgtaacaatgtaataaaaagcctctttcttttaaannnnnnnnnncaccaacnnnnnnnnnnnnnnnnnnnnnnnnnnnnnnnnnnnnnnnnnnnnnnnnnnnnnnnnnnnagcccggaacgcccgccgaaccccgacacccgacgccgccaccgaggtgccgccgcgggccccccgacagacgaacggacaaagcgggacacccctattggggggccccctcgcgcgccctcaaaaaccttttttctcaaacccttccgcgggggcggggcgcgcccccccaagggacaaaaagaacccaccggtcaccacgatgtttttccaccccaagaaaaacccgggcccaacaccaagaggcgcgtgttcgcctccccccccaaaaacaacaacgccccnnnnnnnnnaccacgcggggttctgatcaaaaatcacacgaggggggcgtcgcggcgatcttcttcggcgggcgcccatcaagcgcggggggtgtagcggcgcgccttcgtaattatataatgcgcgccccgccctcgtcgtggt

SEQ ID NO: 15341 - DNA, 614 bp, Homo Sapiens
atgttggagcggtgcgttctcctgatgttttgccgtggcttggggattgtacacggaccagctcacgtaatgcattgcctgtaacaatgtaataaaaagcctctttctttttggggtgggccttgtccttctgtcagctaaaatgggagctcatgagagaaggacgtcagggaaacggggttgagggtggtctcggtgcagagagaagggtgtcagggaaacggggggtgagggtggtcttggtgccagacgtagggaatggtgttgggagtggcccgagtgcctggcacagttgtctggttcattcatgtaacatgataatttttaaatcattaaaaaaattacctttcatacagataccatggaatactatgcagccataaagaggtatgagatcttgtcccctgcagggacacggatagagctggaagccattattctcagcaaactaacacaggagcagaaaaccagacaccacttgttctcacttgtaagtgggagcttctcgatgagaacacatggacacaaggaggggaacatcacacactggggcccgttgggtcggggacagggagagcatcaggaataatagctaaggtatgctggcttcatac

SEQ ID NO: 15342 - DNA, 759 bp, Homo Sapiens
gggtcaacagcttcaaggtgagccagctcaagactttgctctccaccaggcagaagatgacagactgtgaatttggatatatttacaggctggctcaggactatctgcagtgcgtcctacagataccacaacctggatcaggtccaagcaaaacgtccagagtgctacaaaatgttgcgttctcagtccaaaaagaagtggaaaagaatctgaagtcatgcttggacaatgttaatgttgtgtccgtagacactgccagaacactattcaaccaagtgatggaaaaggagtttgaagacggcatcattaactggggaagaattgtaaccatatttgcatttgaaggtattctcatcaagaaacttctacgacagcaaattgccccggatgtggatacctataaggagatttcatattttgttgcggagttcataatgaataacacaggagaatggataaggcaaaacggaggctgggaaaatggctttgtaaagaagtttgaacctaaatctggctggatgacttttctagaagttacaggaaagatctgtgaaatgctatctctcctgaagcaatactgttgaccagaaaggacactccatattgtgaaaccggcctaatttttctgactgatatggaaacgattgccaacacatacttctacttttaaataaacaactttgatgatgtaacttgaccttccagagttatggaaattttgtccccatgtaatgaataaattgtatgtatttttctcta

SEQ ID NO: 15343 - DNA, 825 bp, Homo Sapiens
  misc_feature (309)..(365): n is a, c, g, or t
  misc_feature (652)..(652): n is a, c, g, or t
gggggtgggcggagggacggagggaagatggctgcagagaccggatattggcgctgcctccccgaatcccggacctgcgctgaggaggcggttcatctgtggccagcggtgcttcgggacccgcgctgggggaaccctggcgacggggcctggccctgctatatgcgggggcctcggctggagtgagcggcgtggacgcctctttcctccggctcttcccttgttgctgcgagagcgagagggccgcgggcggcggaggcagcggggccgggatggaggacgttaactctaacgtgaacgcggaccaannnnnnnnnnnnnnnnnnnnnnnnnnnnnnnnnnnnnnnnnnnnnnnnnnnnnnnnnaggaaaatggctttgtaaagaagcttgagcctaaatctggctggatgacttttctagaagttacaggaaagatctgtgaaatgctcttctgtcctgaagcaatactgttgaccagaaaggacactctatattgtgaaaccggcctaatttttctgactcttacgaaaacgattgccaacacatacttctacttttaaataaacaactttggatgatgtaacttgacctttcagagttacagaaattttgtccctatttaatgaataaattggatgtatttttcgccnaaactcccccaaaggattggatgaaaaccttggcgggccgccccgggccccccaaaggtttccagaaccatttgttttgggcggccgggcccagtagggtaagggaaactggggtcataacctgctttcccaaagaaaaaccgcgggcccaggaccaaaggggcttgggatct

SEQ ID NO: 15344 - DNA, 963 bp, Homo Sapiens
ccaacctagtatctgttgttcagtagattgtaggtacttctgtttatagaaataataaggggaaaatgggtattttagaatgaggatacttttgtgttgtacctcttgcttctcttttatttgaataataaaggaaataacatcaaattaatgtttagcctactttagtatggatattgaagttaaaatgtcattcatttgcatttatttaggaaaagaagatatgcttcttaaacaaggtcagatgtatatggcagactcacagtgtacttccccaggtataccagcccatatgcaaagcagatctatgttaagacctctggaactatctttacccagtcaaacgtcatactctgaaaatgaaattttaaagaaagagttagaagcaatgcgaactttctgtgagtcagcaaaacaagaccgactgaagctccaaaatgaactggcacacaaagtggcagaatgcaaagctttagcattagaatgtgaaagggtcaaggaggattcagatgaacagataaagcaattagaagatgcattaaaagatgtgcagaagaggatgtatgagtcagaaggtaaagttaaacaaatgcagacccattttcttgcccttaaagaacacttaacaagtgaagcagcctcagggaatcacagactaaccgaggaactgaaggatcagttgaaagacttgaaagtaaaatatgaaggtgcttcagcagaagtggggaaattaagaaaccaaatcaaacaaaaggagatgatagtagaagagtttaagagggatgaaggcaagctgatagaagaaaataagcgattacagaaggaacttagtatgtgtgaaatggagcgagagaagaaaggaagaaaggtcacagagatggaaggccaggcaaaagaatggtcagcgaagtgggccctttccattccagctgaaaaatttgaaaacatgaagagctcattatc

SEQ ID NO: 15345 - DNA, 1208 bp, Homo Sapiens
  misc_feature (1197)..(1197): n is a, c, g, or t
ggggacgtcacgccgcacgccccagcgagggcgtgcggagtttggctgctccggggttagcaggtgagcctgcgatgcgcgggaagacgttccgctttgaaatgcagcgggatttggtgagtttcccgctgtctccagcggtgcgggtgaagctggtgtctgcggggttccagactgctgaggaactcctagaggtgaaaccctccgagcttagcaaagaagttgggatatctaaagcagaagccttagaaactctgcaaattatcagaagagaatgtctcacaaataaaccaagatatgctggtacatctgagtcacacaagaagtgtacagcactggaacttcttgagcaggagcatacccagggcttcataatcaccttctgttcagcactagatgatattcttgggggtggagtgcccttaatgaaaacaacagaaatttgtggtgcaccaggtgttggaaaaacacaattatgtatgcagttggcagtagatgtgcagataccagaatgttttggaggagtggcaggtgaagcagtttttattgatacagagggaagttttatgggtgatagagtggtagaccttgctactgcctgcattcagcaccttcagcttatagcagaaaaacacaagggagaggaacaccgaaaagcttttggaggatttcactcttgataatatatctttctcatatttaataattttcgctgtccgtgactacacagagttactgggcacaagtttatctttcttccagaatttcctttcagaacactcaaaggttcgactagtgatagtggatggtattgcttttccatttcctcatgacctagatgacctgtctcttcgtactcggttattaaatggcctagcccagcaaatgatcagccttgcaaataatcacagattagctgtaattttaaccaatcagatgacaacaaagattgatagaaatcaggccttgcttgttcctgcattagcctcagggatttagagatactgttgttacttctgcatgttcattgcaaacagaaggttccttgagcacccggaaacggtcacgagacccagaggaagaattataacccagaaacaatctcaagtgtacaaatttattgatgttgtgaaatctatgtgtacagtggacttgttaccttaaagtataaataaacacatctatggccatgaatgnttgtacgctac

SEQ ID NO: 15346 - DNA, 848 bp, Homo Sapiens
  misc_feature (597)..(639): n is a, c, g, or t
  misc_feature (665)..(665): n is a, c, g, or t
  misc_feature (782)..(782): n is a, c, g, or t
ggggtgcggagtttggctgctccggggttagcaggtgagcctgcgatgcgcgggaagacgttccgctttgaaatgcagcgggatttggtgagtttcccgctgtctccagcggtgcgggtgaagctggtgtctgcggggttccagactgctgaggaactcctagaggtgaaaccctccgagcttagcaaagaagttgggatatctaaagcagaagccttagaaactctgcaaattatcagaagagaatgtctcacaaataaaccaagatatgctggtacatctgagtcacacaagaagtgtacagcactggaacttcttgagcaggagcatacccagggcttcataatcaccttctgttcagcactagatgatattcttgggggtggagtgcccttaatgaaaacaacagaaatttgtggtgcaccaggtgttggaaaaacacaattatggtaaaataaagtgttctccttttaagggtgggtttaataacatattatgaaagtagtattttgtactatcgtcaggaaaccaaataagatatatatgtgctcttaattttaagtgtgtatgtgcattaaacaaaaattagcttactannnnnnnnnnnnnnnnnnnnnnnnnnnnnnnnnnnnnnnnnnnactccacgaaaccacaatcccaaccnaatcacaaaaacaaattttgggccccttcggcccctcagaaaactttctaaaaccctttcgtttgggggcggggcgcccccataaggtataatgggaccctgggccctaagcgtggnttccctaggaaaaaaccctgggccacctgaaccaaatgggcgctggggtcttcccccccaactagc

SEQ ID NO: 15347 - DNA, 849 bp, Homo Sapiens
  misc_feature (635)..(635): n is a, c, g, or t
  misc_feature (637)..(638): n is a, c, g, or t
  misc_feature (641)..(642): n is a, c, g, or t
  misc_feature (663)..(665): n is a, c, g, or t
ggggatcaggcggcgcccagtggttgtggaacccatctctgatgaagactggtatctgttctgtggggacacggtggagatcctagaaggcaaggatgccgggaagcagggcaaagtggttcaagttatccggcagcgaaactgggtggtcgtgggagggctgaacacacattaccgctacattggcaagaccatggattaccggggaaccatgatccctagtgaagcccccttgctccaccgccaggtcaaacttgtggatcctatggacaggaaacccactgagatcgagtggagatttactgaagcaggagagcgggtacgagtctccacacgatcagggagaattatccctaaacccgaatttcccagagctgatggcatcgtccctgaaacgtggattgatggccccaaagacacatcagtggaagatgctttagaaagaacctatgtgccctgtctaaagacactgcaggaggaggtgatggaggccatggggatcaaggagacccggaaatacaagaaggtctattggtattgagcctggggcagagcagctcctccccaacttctgtcccagccttgaaggctgaggcacttctttttcagatgccaataaagagcacttttttggncnnggnnatcccacacaaataaaaaaannnccccttgtgcggcccgccctcgggccccttcaagaaaactttttccaaaacccaattccggtttggggcgccccgcgggcccccccaaaggggtaaggtggaaaccatgggggccaataagacttgggttttctcctataaggaaaaacacccctcgggggcccatgtgaacataaaggggggt

SEQ ID NO: 15348 - DNA, 755 bp, Homo Sapiens
  misc_feature (688)..(688): n is a, c, g, or t
gggacgctgagggcccatgtgctgaaaatccgaagtgccgcggaaagtggaggtgagggccgcccgccctagaggtgcccgtccgagaggcagagctgacaaggaaggtttcgagcgttttgctggcaaagggatttcttacaacctccaggcatgcgtctttctgccctgctggccttggcatccaaggtcactctgcccccccattaccgctatgggatgagccccccaggctctgttgcagacaagaggaagaaccccccatggatcaggcggcgcccagtggttgtggaacccatctctgatgaagactggtatctgttctgtggggacacggtggagatcctagaaggcaaggatgccgggaagcagggcaaagtggttcaagttatccggcagcgaaactgggtggtcgtgggagggctgaacacacattaccgctacattggcaagaccatggattaccggggaaccatgatccctagtgaagcccccttgctccaccgccaggtcaaacttgtggatcctatggacaggaaacccactgagatcgagtggagatttactgaagcaggagagcgggtacgagtctccacacgatcagggagaattatccctaaacccaaatttcccagagctgatggcatcgtccctgaaacgtggattgatggccccaaagacacatcangtgggaagatgcttttaaaaagaaccctatgtgcccctgttctaaaagacacctggcagggagggag

SEQ ID NO: 15349 - DNA, 876 bp, Homo Sapiens
  misc_feature (697)..(697): n is a, c, g, or t
ctagatctcatctaagggagacacaacttttctggtcctcagatggaaagctgggggaaggtaccagtatttacccttccatgatccggccgaccccaccctcaacgtggcagaagggtacagatgggacatcgttgctcagagggcctcccagtgcctgaaacaggactgttgctatgacaacagggagaaccccatctccagctggaacgtgaagagggcacgagacatccacttgacagtggagcagaggggttacccagatttcaacctcatcgtgaacccttatgagcccataaggaaggttaaagagaaaatccggaggaccaggggctactctggcctgcagcgtctgtccttccaggttcctggcagtgagaggcagcttctcagcagcaggtgctccttagccaaatacgggatcttctcccacactcacatctatctgctggagaccatcccctccgagatccaggtcttcgtgaagaatcctgatggtgggagctacgcctatgccattcaacccccaacagcttcatcctgggtctgaagcagcagattgaagacccagcaggggcttcctaaaaaggcagcagcagctggaattcccaaggccaaagtcctgcaaggactggttgggtctggggatctatggcatccaagacaagtgacactctcaatcctctcggaagaaganaaggagaggctctgtttccagccagttagttttctctgggagacttctctgtacatttctgccatgtactccagaacttcatcctgtcaatcactcttgtcccattgtctactgggaaggtcccaggtcttcaccagttttacaatgagttatcccaggccagacgtggtagctcacac

SEQ ID NO: 15350 - DNA, 266 bp, Homo Sapiens
gcggtccgtgatgtatccccaccaccagtgattgctccacgcccagagcacacaaaatctgtatacacacggtctgtgattgaaccacttccggtcactccaactcgggacgtggctacatctcccatttcacctactgaaaataacaccactccaccagatgctttgacccggaatactgagaagcagaagaagaagcctaaaatgtctgatgaggagatctgggagaaattacgaagcatagtgagtgtcgggcgataacatca

SEQ ID NO: 15351 - DNA, 688 bp, Homo Sapiens
  misc_feature (576)..(609): n is a, c, g, or t
gggggcgtgctgggcgtgcgcggctgcggtacggcgtgttggtcccagcggttcagctgaggtagggacgtgctgtaggccggaatgttaccggctgttggatctgcggatgaggaagaggatcctgcggaggaggattgtcctgaattggttcccattgagacgacgcaaagcgaggaggaggaaaagtctggcctcggcgccaagatcccagtcacaattatcaccgggtatttaggtgctgggaagacaacacttctgaactatattttgacagagcaacatagtaaaagagtagcggtcattttaaatgaatctggggaaggaagtgcgctggagaaatccttagctgtcagccaaggtggagagctctatgaagagtggctggaacttagaaacggttgcctctgctgttcagtgaagtgaggaatgtgtttactgtgtacatggtttactagaaatgtttattgattatatttccagctttaattttcttgagtaatttaactgaatttacacagtttgcttcattgtattttcaaaccaaatagaaaataaacttattaggaaagcttnnnnnnnnnnnnnnnnnnnnnnnnnnnnnnnnnnacccatggtccggcccggccctccgggcccctttccgagaaaggccttttccttaaaacccaattttcctttttttggg

SEQ ID NO: 15352 - DNA, 1429 bp, Homo Sapiens
  misc_feature (904)..(905): n is a, c, g, or t
  misc_feature (907)..(1030): n is a, c, g, or t
  misc_feature (1033)..(1035): n is a, c, g, or t
  misc_feature (1049)..(1062): n is a, c, g, or t
  misc_feature (1090)..(1137): n is a, c, g, or t
  misc_feature (1223)..(1235): n is a, c, g, or t
ggcagtgacttctatgttttgggttgatgctgaattagggagtgatatttaccttgatggtatcataactattgtggattcaaaatatggattaaaagtgaaataccactaaaggcagaagagaatgaaatcatcccacccactgacccgttcccaatctgagcatatggatagggcccaaagcacatttaacagaagagaaacctgatggccttatcaatgaagctactaggcaagttgctttggcagatatcattctcattaataaaacagacttggttccagaagaagatgtaaagaaattaagaacgacaattagatccataaatcggactaggacaaatcttagaaacacaaagatcaagagttgatctctctaatgtattagatcttcatgcctttgatagtctctctggaataagtttgcagaaaaaacttcagcatgtgccaggaacacaacctcaccttgatcagagtattgttacaatcacatttgaagtaccaggaaatgcaaaggaagaacatcttaatatgtttattcagaatctcctgtgggaaaagaatgtgagaaacaaggacaatcactgcatggaggtcataaggctgaagggattggtgtcaatcaaagacaaatcacaacaagtgattgtccagggtgtccatgagctctatgatctggaggagactccagtgagctggaaggatgacactgagagaacaaatcgattggtcctcattggcagaaatttagataaggatatccttaaacagctgtttatagctactgtgacagaaacagaaaagcagtggacaacacatttcaaagaagatcaagtttgtacataacactagtggcatttcttatcaaaaggattggataataaaaataagtttctactgatannannnnnnnnnnnnnnnnnnnnnnnnnnnnnnnnnnnnnnnnnnnnnnnnnnnnnnnnnnnnnnnnnnnnnnnnnnnnnnnnnnnnnnnnnnnnnnnnnnnnnnnnnnnnnnnnnnnnnnnnnnnnaannnatttttggggccgnnnnnnnnnnnnnngaaaattttttttaaaaacaattctttnnnnnnnnnnnnnnnnnnnnnnnnnnnnnnnnnnnnnnnnnnnnnnnncccctaaagttttgttcccccacaaggaaaaaccccccggggttaaaacacacaaagaggggttggggggtttcccccaccccacnnnnnnnnnnnnncccccccgggggggggacaccccaaggaggggtttttttgagagaaacaatccccccccaagaggggggggtttctctcggggagggtgtttatattcgtgggggggtgttttcttcaaagggggccgggagcttatatttccccctgcactccgagtggtggttttatgcttccgcggggcctcagggatgcg

SEQ ID NO: 15353 - DNA, 1304 bp, Homo Sapiens
  misc_feature (919)..(924): n is a, c, g, or t
  misc_feature (926)..(1055): n is a, c, g, or t
  misc_feature (1060)..(1061): n is a, c, g, or t
  misc_feature (1064)..(1067): n is a, c, g, or t
  misc_feature (1081)..(1093): n is a, c, g, or t
  misc_feature (1111)..(1111): n is a, c, g, or t
  misc_feature (1126)..(1185): n is a, c, g, or t
  misc_feature (1256)..(1264): n is a, c, g, or t
gggagggtgggtaagaaatacctgcaactgtcagcctcagcagagctctggggagtctgcaccatggcttggaccccactcctcttcctcaccctcctcctccactgcacagggtctctctcccagcttgtgctgactcaatcgccctctgcctctgcctccctgggagcctcggtcaagctcacctgcactctgagcagtgggcacagcagctacgccatcgcatggcatcagcagcagccagagaagggccctcggtacttgatgaagcttaacagtgatggcagtcacagcaagggggacgggatccctgatcgcttctcaggctccagctctggggctgagcgctacctcaccatctccagcctccagtctgaggatgaggctgactattactgtcagacctggggcactggcatggtgttcggcggagggaccaagctgaccgtcctaggtcagcccaaggctgccccctcggtcactctgttcccgccctcctctgaggagcttcaagccaacaaggccacactggtgtgtctcataagtgacttctacccgggagccgtgacagtggcctggaaggcagatagcagccccgtcaaggcgggagtggagaccaccacaccctccaaacaaagcaacaacaagtacgcggccagcagctacctgagcctgacgcctgagcagtggaagtcccacagaagctacagctgccaggtcacgcatgaagggagcaccgtggagaagacagtggcccctacagaatgttcataggttctcaaccctcaccccccaccacgggagactagagctgcaggatcccaggggaggggtctctcctcccaccccaaggcatcaagcccttctccctgcactcaataaaccctcaataaatattctcattgtcaatcagaaaaannnnnnannnnnnnnnnnnnnnnnnnnnnnnnnnnnnnnnnnnnnnnnnnnnnnnnnnnnnnnnnnnnnnnnnnnnnnnnnnnnnnnnnnnnnnnnnnnnnnnnnnnnnnnnnnnnnnnnnnnnnnnnnnnnnnnnnggggnnggnnnnataataaaaaatcnnnnnnnnnnnnnaaagttaaggggggcccngttttttttagaaannnnnnnnnnnnnnnnnnnnnnnnnnnnnnnnnnnnnnnnnnnnnnnnnnnnnnnnnnnnagccccggccggggggtgggaaaaaccctccccttgtggaagattttgtaggaaaaacctcactctctgtnnnnnnnnnaaggaaagagtggggaaaaccctgcctgggatgttgtggg

SEQ ID NO: 15354 - DNA, 442 bp, Homo Sapiens
  misc_feature (310)..(310): n is a, c, g, or t
  misc_feature (367)..(367): n is a, c, g, or t
gacaatctccagcatggcctggtctcctctcctcctcactctcctcgctcactgcacagggtcctgggcccagtctgtgctgacgcagccgccctcagtgtctggggccccagggcagagggtcaccatctcctgcactggcagcagctccaacatcggggcacgctatgatgtacactggtaccagcaacgtccaggaacaccccccaaactcctcatctatgataacaacagtcggccctcaggggtccctgaccgattcttcggctccaagtctggcaactcagcctccctggccatcactggactncaggctgaggatgaggctgattattaatgccagtcctatgacaaaacctgagtgatncgaggatattcggcggagggaccaagatgaccgtctaggtcacccaaaggttgccccttggtcaatttgtttccg

SEQ ID NO: 15355 - DNA, 1818 bp, Homo Sapiens
  misc_feature (205)..(233): n is a, c, g, or t
  misc_feature (1278)..(1443): n is a, c, g, or t
  misc_feature (1490)..(1553): n is a, c, g, or t
  misc_feature (1704)..(1704): n is a, c, g, or t
  misc_feature (1737)..(1749): n is a, c, g, or t
gcccctggacgcgaggggaaaaacacctacatcatctgtaaacctagtgcaaagttgtgaagaacggaatccttggcagatgatgagtccaagtcagaaagtgatttggaagaaacagaacctgtggttattccaagagattctttgcttaggagagcagcagccgaaagacctaaatacacatttgatttctcagaagaagagnnnnnnnnnnnnnnnnnnnnnnnnnnnnncaataatgatttagaggaattgaaagttaaagcatctcccataacaaatgatggggaagatgaatttgttccttcagatgggttagataaagatgaatatacattttcaccaggccaaatcaaaagccactccagacaaatctttgcatgacaaaaaaagtcaggattttggaaatctcttctcatttccttcatattctcagaagtcagacagatgattcagctaaatttcgcacagtcaatgaagaagattctgcttctgttttttcaccatcatttggtctgaaacagacagataaagttccaagtaaaacggtagctgctaaaaagggaaaaccgtcttcagatacaggtccctaagcccaagagagccccaaaacagaaaaaagtagtagaggctgtaaactctgactcggattcagaatttggcattccaaagaagactaaaacaccaaagggtaaaggccgaggggcaaagaaaaggaaagcatctggctctgaaaatgaaggcgattataaccctggcaggaaaacatccaaaacaacaagcaagaaaccgaagaagacatcttttgatcaggattcagatgtggacatcttcccctcagacttccctactgagccaccttctctgccacgaaccggtcgggctaggaaagaagtaaaatattttgcagagtctgatgaagaagaagatgatgttgattttgcaatgtttaattaagtgcccaaagagcacaaacatttttcaacaaatatcttgtgttgtccttttgtcttctctgtctcagacttttgtacatctggcttattttaatgtgatgatgtaattgacggttttttattattgtggtaggccttttaacattttgttcttacacatacagttttatgctcttttttactcattgaaatgtcacgtactgtctgattggcttgtagaattgttatagactgccgtgcattagcacagattttaattgtcatggttacaaactacagacctgctttttgaaatgaaatttaaacattaaaaatggcatannnnnnnnnnnnnnnnnnnnnnnnnnnnnnnnnnnnnnnnnnnnnnnnnnnnnnnnnnnnnnnnnnnnnnnnnnnnnnnnnnnnnnnnnnnnnnnnnnnnnnnnnnnnnnnnnnnnnnnnnnnnnnnnnnnnnnnnnnnnnnnnnnnnnnnnnnnnnnnnnnnnnnttctggttcccgcttaccgtcccgtttcccgattcgtaccccctttnnnnnnnnnnnnnnnnnnnnnnnnnnnnnnnnnnnnnnnnnnnnnnnnnnnnnnnnnnnnnnnnatattttttttgcccgtgacccgcgcccctctccccctatattccttccttcccgtacccgctgcttccgcttcgtctccctaacccgcttcttccgccctttttatccccttcgcccgccctcccccctttccgataccataatccgttnccccgttatttccgccttcctttctgtatccannnnnnnnnnnnngttccggggcgtattccgccttcgtcctttctcctcgtcctctctcccccccgagccccatcgttcccg

SEQ ID NO: 15356 - DNA, 744 bp, Homo Sapiens
  misc_feature (635)..(663): n is a, c, g, or t
tgcaaaagggcgagaggtcaatgatcttaaaagaaaatctccttcagatctttggaaagaggatttagcggcatttgttgaagaactggataaagtggaatctcaagaacgagaagatgttcgggctggaatgtctggaaaagcaattaaaggtaaagttggcaaacctaaggtgaagaaactccagttggaagagacaatgccctcaccttatggcagaagaataattcctgaaattacagctatgaaggcagatgccagcaaaaagttgctgaagaagaagaagggtgatcttgatactgcagcagtaaaagtggaatttgatgaagaattcagtggagcaccagtagaaggtgcaggagaagaggcattgactccatcagttcctataaataaaggtcccaaacctaagagggagaagaaggagcctggtaccagagtgagaaaaacacctacatcatctggtaaacctagtgcaaagaaagtgaagaaacggaatccttggtcagatgatgaatccaagtcagaaagtgatttggaagaaacagaacctgtggttattccaagagattctttgcttaggagagcagcagccgaaagacctaaatacacatttgatttctcagaagaagagnnnnnnnnnnnnnnnnnnnnnnnnnnnnncaataatgatttagaggaattgaaagttaaagcatctcccataacaaatgatggggaagatgattgttccttctgatggaa

SEQ ID NO: 15357 - DNA, 641 bp, Homo Sapiens
  misc_feature (456)..(465): n is a, c, g, or t
gggagctgtcggaaggtggcgagcctgaggcgaacaatggcggagctgggcgaagccgatgaagcggagttgcagcgcctggtggccgccgagcagcagaaggcgcagtttactgcacaggtgcatcacttcatggagttatgttgggataaatgtgtggagaagccagggaatcgcctagactctcgcactgaaaattgtctctccagctgtgtagaccgcttcattgacaccactcttgccatcaccagtcggtttgcccagattgtacagaaaggagggcagtaggccatcccccaggagaatgacagaagcaaaggacttgttactaagcagatttaagggtcagtgggggaaggctatcaacccattgtcagatcagcatcaggctgttatcaagtctgttggtgctaaaaagtaaaagatgaaatgttcaaaaaacgcccccgggggagnnnnnnnnnncatcgccgggccgcctcggcccctcgaagaaaactttttcctagaccaattccgtttgggcgccgcggggccccccaggtagggtaaagtggaaccatggggccattagcctgggtttccctaaggaagaatcccctgggccactgaactagggggccttggcatttcctccaccc

SEQ ID NO: 15358 - DNA, 644 bp, Homo Sapiens
atgcccgtagctaagatactcatccactgtgggttttggtttcgccgtcaccccactgcctcactggattgtgaggatcatatgcgacaatgtatttgaaaacgactagaacattatcggaggaaggtggactctgaagtagtcgctgtagactatggatgtagaacaagggtttggagcccttcggacatggttctaacgcggcctgacttcttgctggctacatgaccttggactacataatcacgcctcttaaatgggaggtgatgacagctatccttgaggaccttagagagaactgatttcttagtacccagcctcacaaatagtgcatcacttcatggagttatgttgggataaatgtgtggagaagccagggaatcgcctagactctcgcactgaaaattgtctctccagctgtgtagaccgcttcattgacaccactcttgccatcaccagtcggtttgcccagattgtacagaaaggagggcagtaggccatcccccaggagaatgacagaagcaaaggacttgttactaagcagatttaagggtcagtgggggaaggctatcaacccattgtcagatcagcatcaggctgttatcaagtctgttggtgctaaaaagtaaaagatgaaatgttca

SEQ ID NO: 15359 - DNA, 1829 bp, Homo Sapiens
  misc_feature (1588)..(1596): n is a, c, g, or t
  misc_feature (1629)..(1632): n is a, c, g, or t
  misc_feature (1634)..(1634): n is a, c, g, or t
  misc_feature (1647)..(1681): n is a, c, g, or t
  misc_feature (1775)..(1775): n is a, c, g, or t
gggggacacgccggcaagacgcctcttcagttgtctgctactcagaggaaggggcggttggtgcggcctccattgttcgtgttttaaggcgccatgaggggtgacagaggccgtggtcgtggtgggcgctttggttccagaggaggcccaggaggagggttcaggccctttgtaccacatatcccatttgacttctatttgtgtgaaatggcctttccccgggtcaagccagcacctgatgaaacttccttcagtgaggccttgctgaagaggaatcaggacctggctcccaattctgctgaacaggcatctatcctttctctggtgacaaaaataaacaatgtgattgataatctgattgtggctccagggacatttgaagtgcaaattgaagaagttcgacaggtgggatcctataaaaaggggacaatgactacaggacacaatgtggctgacctggtggtgatactcaagattctgccaacgttggaagctgttgctgccctggggaacaaagtcgtggaaagcctaagagcacaggatccttctgaagttttaaccatgctgaccaacgaaactggctttgaaatcagttcttctgatgctacagtgaagattctcattacaacagtgccacccaatcttcgaaaactggatccagaactccatttggatatcaaagtattgcagagtgccttagcagccatccgacatgcccgctggttcgaggaaaatgcttctcagtccacagttaaagttctcatcagactactgaaggacttgaggattcgttttcctggctttgagcccctcacaccctggatccttgacctactaggccattatgctgtgatgaacaaccccaccagacagcctttggccctaaacgttgcatacaggcgctgcttgcagattctggctgcaggactgttcctgccaggttcagtgggtatcactgacccctgtgagagtggcaactttagagtacacacagtcatgaccctagaacagcaggacatggtctgctatacagctcagactctcgtccgaatcctctcacatggtggctttaagaagatccttggccaggaggagtgatgccagctatcttgcttctgaaatatctacctgggatggagtgatagtaacaccttcagaaaaggcttatgagaagccaccagagaagaaggaaggacgaggaagaagaggagaatacagaagaaccacctcaaggagaggaagaagaaagcatggaaactcaggagtgacattcccttcactccttttcctacccaagggggaagactggagcctaagctgcctgctactgggctttacatggtgacagacatttccgtgggatagggaagatagcaggaagaaaagtaaactccatagaagtgtcattccactgggttttgatattggcttagctgccagtctcccatttgtgacctatgccatccatctataatggaggataccaacatttcttcctaatattctataatctccaactcctgaaaaacccctctcccaactaatactttgctgttgaaatgttgtgaaatgttaagtgtctggaaannnnnnnnnctaagaaaaactattaaagtaccttcctagttnnnntnacccactcaccannnnnnnnnnnnnnnnnnnnnnnnnnnnnnnnnnngtaaccatcgtactttgtacttccccccttcgttcaccgcccattctagtggcccctcgggtttctttttccactgcgtgtttgccacaaattntttttttggcgccccccctctccccctagaaaaatttttttcacaaattttttt

SEQ ID NO: 15360 - DNA, 857 bp, Homo Sapiens
gggagaggaaggggcggttggtgcggcctccattgttcgtgttttaaggcgccatgaggggtgacagaggccgtggtcgtggtgggcgctttggttccagaggaggcccaggaggagggttcaggccctttgtaccacatatcccatttgacttctatttgtgtgaaatggcctttccccgggtcaagccagcacctgatgaaacttccttcagtgaggccttgctgaagaggaatcaggacctggctcccaattctgctgaacaggcatctatcctttctctggtgacaaaaataaacaatgtgattgataatctgattgtggctccagggacatttgaagtgcaaattgaagaagttcgacaggtgggatcctataaaaaggggacaatgactacaggacacaatgtggctgacctggtggtgatactcaagattctgccaacgttggaagctgtttgctgccctggggaacaaagtcgtggaaaagcctaagagcacaggatccttctgaagttttaaccatgctgaccaacgaaactgggctttgaaaatcagtttctttctgatgcctaccagtgaagattctcatttacaacagtgccaacccaatctttcgaaaactgggatcccaaaactccatttgggatatcaaaagtatttgcagagtgcccttagcagcccatcccgacctgtcccgctgggttccagggaaaatgctttctcaagtccacaggtaaaaggttctcttccacattactggaaggaactggaggattccgttttcccttggcttttgaaccccctcacaccccctggattcccttgaccctacttagggccattatggcttgggat

SEQ ID NO: 15361 - DNA, 558 bp, Homo Sapiens
  misc_feature (85)..(140): n is a, c, g, or t
  misc_feature (502)..(510): n is a, c, g, or t
ggccaggacggtgatgccagctatcttgcttctgaaatatctacctgggatggagtgatagtaacaccttcagagacagcttatnnnnnnnnnnnnnnnnnnnnnnnnnnnnnnnnnnnnnnnnnnnnnnnnnnnnnnnnacctcaaggagaggaagaagaaagcatggaaactcaggagtgacattcccttcactccttttcctacccaagggggaagactggagcctaagctgcctgctactgggctttacatggtgacagacatttccgtgggatagggaagatagcaggaagaaaagtaaactccatagaagtgtcattccactgggttttgatattggcttagctgccagtctcccatttgtgacctatgccatccatctataatggaggataccaacatttcttcctaatattctataatctccaactcctgaaaacccctctctcaactaatactttgctgttgaaatgttgtgaaatgttaagtgtctggaaannnnnnnnnctaagaaaaactattaaagtacttcctagtagggctcttggtaaaaaa

SEQ ID NO: 15362 - DNA, 1045 bp, Homo Sapiens
  misc_feature (341)..(392): n is a, c, g, or t
  misc_feature (531)..(554): n is a, c, g, or t
tagcgacttttcataaatggggtcttattttgccccttggatttttaggcgcgccctctttgtgtatatttttgcttattgttatatgatatgagtttgttatttttgaacacccaaggcctcccttatgtagtattagttcatgggaactgcatgtaaaaacactttcaggaggaatttcaaattcccgctttaaggactggccccgcacatacccaatttatgaaagtcaattcattaaaaggtatagaacctcttttgggcatgatggtcaagggaccaagcgtacaacttggcctgggcccttggaaactgaggcacggaggaccatctgagccccnnnnnnnnnnnnnnnnnnnnnnnnnnnnnnnnnnnnnnnnnnnnnnnnnnnnattttagccaggtgtgctgtgagctgtagtcccagctacaaggtgggaggattgcttaggcctgggtgattgaggatgccatgagctgtgattgtgccaccacaactccagcctgggcaatacagcaagactgtttccnnnnnnnnnnnnnnnnnnnnnnnnctcaagaatgtaatgaatgatacccaatgtgccttttctagaaaaagttgccaaatatatctcttggatctgctgagcatgtcctctgatacataaggcaagcatgtttctacacccagtgttgatgccagttagttttcagaatccaaactgatggcagctactggtccttgggactgacatcctctgggaatataaccttctcttgggctgagatgctgctgccagctctaaaacagcactctgttctcaaaacctcatggcaggctcctggctccaatactcagctgccaaacatgatgctgattcttcacgaatttgcaacccagttctctcgggtttgcacacccccactgtgggccggggaaccgggtcccggccttcgcagactccaggctctggcagatgtggccctccataacaacgggaatgaaaaggtcacaccttatgtgcgccaggcccttaaggagtcggaatatcccaatcctccc

SEQ ID NO: 15363 - DNA, 1212 bp, Homo Sapiens
  misc_feature (57)..(153): n is a, c, g, or t
  misc_feature (938)..(938): n is a, c, g, or t
aagcaatcctcccaccttgtagctgggactacagctcacagcacacctggctaaaannnnnnnnnnnnnnnnnnnnnnnnnnnnnnnnnnnnnnnnnnnnnnnnnnnnnnnnnnnnnnnnnnnnnnnnnnnnnnnnnnnnnnnnnnnnnnnnnccaagttgtagctttgtcccttgccatcatgcccaacaagaggttctataccttttaatgaattgactttcataaattggttatgttggtgggcaagttctttaagctggaaattgtaaattcctcctgaaatgttttttcatgcagttaccatgaactaatactacaataaaggatggtcttgggtgtcaattcttgaaaatgtgtatttgaagaaaaagtaaatttcgcctactgttgtcagatattagcagtccagatattcgctctagcttgtaaacttcccctgtggtcagcctaagctcttaaacccctattctacagctttagactgaaggcaaaagctcaaagcatttaaggcctcctcaatttcggcccctgctgctctgtgctctgttccttggtgtagctttgttccagctcctgcagcattgcaccattcctaaccacaaccttaacagcatgtagggccccatactctagcccccatcttgctgtcttcctgtgttggaatcttgcctaccaaggcctgtcaagagggtcctcccccatactgtttgcccacaaggttcaagagtgattggctcccagtcttcctggactgaactacttggatctaggggttgcctgttatttagaagagatcccttaactggtagggcccctttcagtaggacagtatttgggtaaggggagggtataagatgagaacctttgctaagttaggttcctttgggagcctccagtttgtttctccctctccccagccatcttgttggatctgncaagggattggactccttcattgtcctaggtttttaaggttttaaagcccaccttctgcagtcggttttctggaatgtgttggtggattacttaagagttatggggaaagagttccttacggcctgtctaggtcagtgaagtcatactggcaagtgacaagaaggaagccaggtttgtcacttaccctgcatgctaaggacatcagagcccacatagaagtctggtagttttcagccagcagtgggtaggggagcgatctacagtgcaggtcac

SEQ ID NO: 15364 - DNA, 1199 bp, Homo Sapiens
ggccttcttaccttcccccccacaatttcagttccttccaaactacccccaaaaaagaaaggtagtgaaagaaagggattgttggggttctgagccccttgggcagtcagaaagggaacagaaaccaaaacaatcactggatgtgacacagactgacaatcaagaagtctacagcaggatgggaaaggcgggcagagaaaggggaagaaaggagaaaggagagttacaagatgccaactccaccattacccctcctaagagaggctggagagaaagccacaaacattaagaagtgccggtcctgaataagggaggtggtgtttgagcttgaaggaggaggaggtcaagaaaggggcagcagcttcacagaccgtagacactttcgtcactgtaggcaatgtagagaaagaagtcttcttcatggtgttcctggtacagctgacccattgtggcactggtgggtggaatgacattgttgacaaagaaaaacaaggcatcctcagctcggagatgaattcgcttccggatcaagaagtagaactgaccaactgtgagatcagaaggcaccaggtatttcgttttgtccaggtctcctatccgagctttgggagccttttctactatcacctgataaagagatgaaaattaggagacagaaggaatgcagccccgaagctgcacctgtcaagaactcaagaaacaatattcctagcacctaaatctaccccagattcatctctttgtctttgtacacgcggtgcagcactgagtcccagagatcctgacctcactgactggagctcatttaaatatccaggatccatcccccaatagggcgtcaccataaacaactatcttaatcagacggaggtgacttgtttgggtcgactagtgattcaatctcgcaaccttagctagctggggggatgaccatttgaagctcaggctgtcaaactctctaaggcctcaaatgctaaggtttctctctcctgtccacatccctctcaaccccacatccaccactaccccactcctttcatcctgggtcccaaggacagcagtttcaggctcgctgccaaccccaccacagccagcagcctgatccctgcgctgcctgtcccgatccaaggccaggctctggcgtcagcgtaagcgtcccgcgccctcggcctggctactgtcctcaccggcacccggtc

SEQ ID NO: 15365 - DNA, 1158 bp, Homo Sapiens
  misc_feature (910)..(948): n is a, c, g, or t
ggggaagccgtcgcggcggggaccatgttgcttccgaacatcctgctcaccggtacaccaggggttggaaaaaccacactaggcaaagaacttgcgtcaaaatcaggactgaaatacattaatgtgggtgatttagctcgagaagtctgatcatcggatatcatggagtctggcaagacggcttctcccaagagcatgccgaaagatgcacagatgatggcacaaatcctgaaggatatggggattacagaatatgagccaagagttataaatcagatgttggagtttgccttccgatatgtgaccacaattctagatgatgcaaaaatttattcaagccatgctaagaaagctactgttgatgcagatgatgtgcgattggcaatccagtgccgcgctgatcagtcttttacctctcctcccccaagagattttttattagatattgcaaggcaaagaaatcaaacccctttgccattgatcaagccatattcaggtcctaggttgccacctgatagatactgcttaacagctccaaactataggctgaaatctttacagaaaaaggcatcaacttctgcgggaagaataacagtcccgcggttaagtgttggttcagttactagcagaccaagtactcccacactaggcacaccaaccccacagaccatgtctgtttcaactaaagtagggactcccatgtccctcacaggtcaaaggtttacagtacagatgcctacttctcagtctccagctgtaaaagcttcaattcctgcaacctcagcagttcagaatgttctgattaatccatcattaatcgggtccaaaaacattcttattaccactaatatgatgtcatcacaaaatactgcccatgaatcatcaaatgcattgaaaagaaaacgtgaannnnnnnnnnnnnnnnnnnnnnnnnnnnnnnnnnnnnnnaatctggaatctagccttggtgaatgtaacatggatacttggggcttgaatcattgtactgatattaaacatggatggtgggaggtttcaaggtggggtttagaaaactactaataatggaggaacgcaggtaccctactttttcattggaatggaggggtttcatccggcctaaaaggggagaaaaaataacggtgggttccattccag

SEQ ID NO: 15366 - DNA, 881 bp, Homo Sapiens
  misc_feature (631)..(650): n is a, c, g, or t
gggacgtcattcacccgcgccacccggaagccgcggttcctaccaaccgttcttattgctggcggcctgaggagcccatcatggcgacgccccctaagcggcgggcggtggaggccacgggggagaaagtgctgcgctacgagaccttcatcagtgacgtgctgcagcgggacttgcgaaaggtgctggaccatcgagacaaggtatatgagcagctggccaaataccttcaactgagaaatgtcattgagcgactccaggaagctaagcactcggagttatatatgcaggtggatttgggctgtaacttcttcgttgacacagtggtcccagatacttcacgcatctatgtggccctgggatatggttttttcctggagttgacactggcagaagctctcaagttcattgatcgtaagagctctctcctcacagagctcagcaacagcctcaccaaggactccatgaatatcaaagcccatatccacatgttgctagaggggcttagagaactacaaggcctgcagaatttcccagagaagcctcaccattgacttcttccccccatcctcagacattaaagagcctgaatgccaaaaaaacaaaacgcagaaaggaagatataacattnnnnnnnnnnnnnnnnnnnncacttgaagccatacgaatacccatgtttaaacaaccatcacgccatgatataattcaaaagtgtggggcgccctctgggcccctccaaaaaaatttccataaacccatttcctttgggcgccccggggccccccctagtggaaaggggaaccaggggcccatatatttgttttcccaaagaaaaaaccccgggacaccaggaaaaaggggtctgtgagtattcccccccc

SEQ ID NO: 15367 - DNA, 818 bp, Homo Sapiens
  misc_feature (676)..(722): n is a, c, g, or t
  misc_feature (770)..(770): n is a, c, g, or t
gggcttattgctggcggcctgaggtaaaggccgcgcttgggtgtccctgggtggtcgggtccccgagttgggaggggcggaaggctgaacctccagcttgagccggacaagccgattcccagcgttgagagggtagagatgaactgtgtgtgaggccaaactggatcggtcaacatggtcttccccctccccactccccaggagcccatcatggcgacgccccctaagcggcgggcggtggaggccacgggggagaaagtgctgcgctacgagaccttcatcagtgacgtgctgcagcgggacttgcgaaaggtgctggaccatcgagacaaggtatatgagcagctggccaaataccttcaactgagaaatgtcattgagcgactccaggaagctaagcactcggagttatatatgcaggtggatttgggctgtaacttcttcgttgacacagtggtcccagatacttcacgcatctatgtggccctgggatatggtttttttcctgaagttgacactggcaaaagctctcaagttcattgatcgtaaaaacctctctcctcacagagctcagcaacagccctcaccaagggactccatgaaatatcaaaagccccatattcccaatggttgcctaaaaggggctttaaaaaaacttccagggccttgccgaaannnnnnnnnnnnnnnnnnnnnnnnnnnnnnnnnnnnnnnnnnnnnnnttctcttggggcatttttaaacgacaccctgaaatggcctctttgggngagcaacatatatctcgacgacgtacagtaggggtcccgccgttgtcc

SEQ ID NO: 15368 - DNA, 659 bp, Homo Sapiens
gggcaccccagcatgtgagttactcaggtgttgggggctagaagggacagtgcgtttaaacaacactcagagctctggccttaaacctgtggccccccaagtctaggagcctcatctctttctggcagtcatgcgggcaggaggtcctgaaagggaaaacccattcagacaactgttccccaatctaccagccatctgcaggggtcagtgaccgtggccctctccctcctctagaatgtgccacttatgaagagtgccccatggggaaaaggagactcagctgtcccttggcagcttgtgccagtatcccagggcagaagtttccacaggagcctcttgcccttgcgcagagccactgtgagaggcggtgggagccaacacccttgggggagggggcagtactgctcggcacatcccagcatcaggtcagatcactgaaattaaaaaatgtgaattaagttcatatccaccttttggggaagcaggacaaaccaccaccccaccaagtgtgtgacttctccatatcccactgcagtttccattttttaaatgggaattttcaatcccctgtgcttgtctaacgtctgctttaaaaagtttgagaccctgttactgtttgaaaatgcatgcatgttacgatgaatctcacaacctagagg

SEQ ID NO: 15369 - DNA, 976 bp, Homo Sapiens
  misc_feature (147)..(185): n is a, c, g, or t
tagcaaccctacggctaggtacgaggcccggtgatttagtcaggcacgaggaggtaacgggacgggcgcgaccatggcgcggtgagggagcgggggtggggatcggtccgggggaggcctgagcgccgctggcttgtgcgctgtctnnnnnnnnnnnnnnnnnnnnnnnnnnnnnnnnnnnnnnnggcatgtcgtccaactgcaccagcaccacggcggtggcggtggcgcctgctcagcgccatgcaagaccaagaccaagaagaagcatttcgtgtgccagaaagtgaagctattccgggccagcgagccgatcctcagcgtcctgatgtggggggtgaaccacacgatcaatgagctgagcaatgttcctgtacctgtcatgctaatggccagatgacttcaaagcctacagcaagatcaaggtggacaatcatctcttcaataaggagaacctgcccagccgctttaagtataaggagtattgccccatggatgtaccgaaaccttcgggagaggtttggaatcgatgatcaggattaccagaattcagtgacgcgcagagcccccatcaacagtgacagccagggtcggtgtggcacgcgtaacctcaccacctacgaccggcgctttgtcatcaagactgtgtccagcgaggacgtggcggagatgcacaacatcttaaagaaataccaccagtttatagtggagtgtcatggcaacacgcttttgccacagatcctgggcatgtaccgcctgaccgtggatggtgtggaaacctacatggtggctaccaggaacgtgttcagcacatcggcatcaactgtgcatcgcaagtatgacctcaagggttctacggttgccagagaagcgagcgacaaggagaaggccaaggacttgccaacattcaaagaccatgacttcctcagtgaagggcagaagctgcatgtgggagacgagagtaaaacgaacttcg

SEQ ID NO: 15370 - DNA, 608 bp, Homo Sapiens
ggagatccagtttcagctggtttgcttcttccagcaggcacccttaggcccaggagcagctcccctgagagaatttgagtcactcatttccttgaacagcacccccctttatactagcagccatttgtgccattgcctgtgccctagggtttgtggggagagagcgagggatcactgagcagttttcccagagctccatgggaaggcaagctctccctcccaatgggagccccactgtcactaactgtaaactcaggctcaggcttcaactgcctacccccatcctcatatttctgtctgtcccagcacctcaggagcattctcattgtggccggctaactccgcctggatgtgaacaggcaagcacagtgggaaatgagtcacgtacttgtattgcacagtggacacctctagaggtccattggtttaaagggatagggaaggaggagggatgagaccatcaccccctcccagaagtaaatctagtatctgagttttctttatgcccttgagtcaaactaataactgtctagtacggaggtgtttgctggttttcttcggtgttttttctaatgcaataaactcatttctgcctgctgcaaaaaaaa

SEQ ID NO: 15371 - DNA, 1151 bp, Homo Sapiens
acattgcttgggcctccagattctgtggttgatgtggggagtacagaagtcacagaagaaatctttctggagtacctctcctccctgggggagtccctgttccgaggtgaggcctacaacctctttgaacacaattgtaacaccttcagcaacgaagtggcacagttcctgactgggcggaagattccttcttacatcacagacctgccctctgaagttctctccacgccctttggacaggcacttcggcccctcctggactccattcagatccagcctccaggagggagctccgtgggcagacccaacggccagagctaacaggactgcctgggaccgccctgcctcaccagggcttttcctttttaaacaaaacaaaccctaccagatttctattttataattttacatcagagctaacaaccaggggacggctttttaaatttcccagggaaggagaccgtcaggccgcatgtagacaatgctgctaagaaacagaacaaaatgccaccccttctaatagtattatactaatttattaaggctgtcttgtcctgtgcgttcacttcggatgctgtttcctaagcgtcctccacactggagaaagggaggggctttgtttaaacagaaagcgagtcacagtttgcgggagccccaacctagaactctttccagagaacactcacgctctacccaagttgccaacacctgtgggacccaaggtgagttttagaacatccgtgacccagaaagttactctagtgttaaatgaaccaaaggattgggtgtacatgggaccggtttcaggcttcaactgcctacccccatcctcatatttctgtctgtcccagcacctcaggagcattctcattgtggccggctaactccgcctggatgtgaacaggcaagcacagtgggaaatgagtcacgtacttgtattgcacagtggacacctctagaggtccattggtttaaagggatagggaaggaggagggatgagaccatcaccccctcccagaagtaaatctagtatctgagttttctttatgcccttgagtcaaactaataactgtctagtacggaggtgtttgctggttttcttcggtgttttttctaatgcaataaactcatttctgcctgctgcaaaaaa

SEQ ID NO: 15372 - DNA, 888 bp, Homo Sapiens
ccacgcgtccgggaacctctataccattttccatggtggctgtactaatttacattcccagcaacggtgtagaagagttcacttttctctgcattgttgctaacactgatctttcatctatttgagaaaatgcattctagcaggtgtgaggtaatctcattgtggttttaatttgcatttccctaatggctagtgctgctgaacgttgtttgcatgaacctggtatgtcttcttttgagaagcattttcacaagccattggtgaagtatgtggctcaccaccacccatactccagccctgttcccagtcactggtacctagagggtgagagtgaggctgctcatcaacgtgttctccaagtcataagctgctgctctcccactcacgatgcttggtgattcagtgatgttttccacttaaagacagtgatagctgtatcaccacagttaatagatgtctgatgtgtcccagtcacagagataatacaaatgtgaggaaataatgctggtgcctgaaagcattggagaccatttgtaagaatgccatttggtagttaaagtgaacatgaaaattgtttagtttttcttggtttcataaacattttttcttcctgtagaactgataaatttcaaacggaagagagtggcagcatttagaaagaatctaattgaaatgtctgaactggaaataaaacatgccaggaacaatgtctcccttttgcagagctgtattgacttgttcaagaataactgatatgccttcactcagaagaaaagaaatgaatgtgaaagaaagccaagcatcacttgcacttaaatcattaccacggaagatatattagcttcaactttagtttaaaattatgtgaataaatattttgatttctac

SEQ ID NO: 15373 - DNA, 858 bp, Homo Sapiens
  misc_feature (796)..(796): n is a, c, g, or t
ctatgtaagccaggctgccggtgtggatatagtcatcgccaacattttttatgagatctggtcattttgtcagctttcacacaagaatcttggatcctatggtaatagttaataagaaagttcttctctggctcaaagaagtcatctacctccttaactccagtaaaaaggacttcatcagcacttttcaccacactttggaagaagccaccaaacatctctttagtatttttccgcctaacacttagatcctgatcatattccaggaaaacatgaaagtggcgatctttactgagaacagggtgagaagaaagccgctgaagaaagacttcaggggaggacacagtcttcttaaacacagcgagatactcagcttccagttctggtttcatctgggcaaattcttcttgggtcatagacccttcaccttctcccagtttctgcatcttctctcgaggaccatcaaagtcgggcttcgtaggagcaggtggaataataagcccagcatagtctgttgtttcaataagagtgtcatgtagccacacaaagtcttcatgttgccttgtaacagaaaactctgggctctgaaacgtgggcagtgtggtctttgtgtgcactgtaaatttgactttgtctctctcactgagcgcatcaggtatgtcaatctgaagcgagggatcaacattcaggtccacagatacagatctcagcttgctgcggtcctcctcctgctgctgcagcaactcgggaaccgcggccatggcgacgcgggactcgagcaggggccgcctggccnttctccgctccacgaggaggccgccaaccgcagggccgcgacacggacgggaagcaacggac

SEQ ID NO: 15374 - DNA, 1894 bp, Homo Sapiens
  misc_feature (380)..(432): n is a, c, g, or t
  misc_feature (1781)..(1781): n is a, c, g, or t
cagaggacttcaaaggtctttggacatcactcaaagctggtaacactatcctagcacatacttaccacttgacagtcagcaaatactccagtaggtagatgaaatctaacttttcacaatccattaaaaaaagtggatataagtctcttttaaactaatgcatagcaaggcagaaagaactagcttatttgattttctaaaagactcacaataagcccagcatagtctgtggtttcaataagagtgtcatgtagccacacaaagtcttcatgttgccttgtaacagaaaactctgggctctgaaacgtgggcagtgtggtctgtaaagaaagaaagaagttaactggtaaccacgactttaagatatttggccatgttgnnnnnnnnnnnnnnnnnnnnnnnnnnnnnnnnnnnnnnnnnnnnnnnnnnnnngggtgagccgccgcgcccagttcaactgacatttctaaatgatctatgtataaactgcttttaagtaactactcattttgggaataattttttagggccaaatgagtttgagactaatacgcaaaaaatgtatttcagctgagatctgtatctgtggacctgaatgttgatccctcgcttcagattgacatacctgatgcgctcagtgagagagacaaagtcaaatttacagtgcacacaaagattccacctgctcctacgaagcccgactttgatggtcctcgagagaagatgcagaaactgggagaaggtgaagggtctatgaccaaagaagaatttgccaagatgaaacaagaactggaagctgagtatctcgctgtgtttaagaagactgtgtcctcccatgaagtctttcttcagcggctttcttctcaccctgttctcagtaaagatcgcaactttcatgttttcctggaatatgatcaggatctaagtgttaggcggaaaaatactaaagagatgtttggtggcttcttcaaaagtgtggtgaaaagtgctgatgaagtcctttttactggagttaaggaggtagatgacttctttgagcaagagaagaacttccttattaactattacaataggatcaaagattcttgtgtgaaagctgacaaaatgaccagatctcataaaaatgttgccgatgactatatccacaccgcagcctgcttacatagcctggctttagaagagcccacagtcatcaaaaagtacctattgaaggttgctgagctatttgaaaaactaaggaaagtagagggtcgagtttcatcagatgaagatttgaagctaacagagctcctccgatactacatgctcaacattgaagctgctaaggatctcttatacagacgcaccaaagccctcattgactatgagaactcaaacaaagctctggataaggcccggttaaagagcaaagacgtcaagttggctgaggcacaccagcaggagtgctgccagaaatttgaacaactttccgaatctgcaaaagaagaactgataaatttcaaacggaagagagtggcagcatttagaaagaatctaattgaaatgtctgaactggaaataaaacatgccaggaacaatgtctcccttttgcagagctgtattgacttgttcaagaataactgatatgccttcactcagaagaaaagaaatgaatgtgaaagaaagccaagcatcacttgcacttaaatcattaccacggaagatatattagcttcaactttagtttaaaattatgtgaataaatattttgatttctacaaatcttaacatttaaccatgtnggtttaaaaatattatggcttgctacttggacataactaatttttccttgtgcatttaatacctctgggcagaatccaaatactgggttctcccgtagttcgtctttagttac

SEQ ID NO: 15375 - DNA, 1119 bp, Homo Sapiens
  misc_feature (225)..(283): n is a, c, g, or t
  misc_feature (825)..(834): n is a, c, g, or t
tccgttgcttcccgtccgtgtcgcggccctgcggttggcggcctcctcgtggagcggagcaatgggtaggccccacgtggcgtctttgcccggctccaagatggacggcagcggggactgggaggctgctctgggggagcacgtggcgccctgctcgcctgctcccggggcagctgggatggtggcggagtccggaggcctcctgccgccgtcgggcagggaggnnnnnnnnnnnnnnnnnnnnnnnnnnnnnnnnnnnnnnnnnnnnnnnnnnnnnnnnnnntagcttcttctttcctcgcacagccaggcggcccctgctcgagtcccgcgtcgccatggcctgcggttcccgagttgctgcagcagcaggaggaggaccgcagcaaggtgaggtcctcccagcctcagactcctgggcgggcggccctgcgagctccggggtcgctgcattctttcccttgcgcgtccataggccgtggctgctcgccgccatccccagcgcgggaagcacccgtgagaaccgggcgtgccctctccctggtcttcactgaaggctgccccggggaatccctgtggatgtcccggattctattaggacagaaccagagacgcgggaccttagccccagctcaggcgccggtgccgagcggacttggagagatgatctctggagaccccggaatgttctttttaaaactttcctcggcttcgtggtgaccagtaggtgaacgtgaaattgacttaacatgcgacagaccagtttggtttgttgcccccaaaattaccctccttccccccaccttttactgagaagaacttttnnnnnnnnnnccaaacaacttggggaaattgcctcaaggcgtccgaaacattgctggtttacgaacttttaggagacgccaaaatgcgttgttggagggcgagatggtgtaaatatacacgaaaggggcatcacataatttccggaacctggtggctcaatatataaggtcttgccccattgatcgtttacatgtccgctagagatcacattgatacatgaggggcaacaagatatattatgcgaccaaagtggaggttactcctatccgagataaagatttataagaggactcg

SEQ ID NO: 15376 - DNA, 1388 bp, Homo Sapiens
gggaccgtggcgagttccgcgctcaatggagacgtttgaccccaccgagctgcccgagctgcttaaactttattaccggaggctctttccctactctcagtactatcgctggctcaactacggtggagtgataaagaattactttcaacaccgtgaattttcattcacattgaaagatgatatttacattcgctaccaatccttcaacaaccagagtgatctggaaaaggagatgcagaaaatgaatccatacaagattgatataggcgcagtatattctcacagacccaatcaacacaatacagtgaagctgggagctttccaggctcaggaaaaagaactggtatttgacattgacatgacagactatgacgatgtgaggagatgttgtagttctgcagacatatgtcctaagtgctggaccctcatgacaatggccatacgcatcattgacagagcattgaaggaggactttggatttaagcatcgtctctgggtatattctggaaggagaggtgttcattgttgggtctgtgatgaatcagttagaaaactgtcttctgcagtacgttctgggatagttgagtatttgagccttgtaaagggtggtcaagacgttaaaaagaaagttcacctaagtgaaaaaattcaccccttttatcagaaaatctataaacataataaaaaaatactttgaagaatatgccttggttaatcaagatattctcgaaaataaagaaagctgggataagattttagcccttgttcctgaaacaattcatgatgaacttcaacaaagcttccaaaagtctcacaattcacttcagcgttgggagcacttgaagaagagtagccagcagatatcagaataacatcaaaaatgacaaatatggaccctggctggagtgggagattatgctccagtactgttttccacggctggatatcaatgtcagcaaaggaatcaatcatctactgaagagcccttttagtgttcatcctaaaacaggtcgcatctctgtgcctattgatttgcagaaagtggaccagtttgatccatttactgttccgaccataagcttcatctgccgtgaattggatgccatttccactaatgaagaggaaaaagaggagaatgaagctgaatctgatgtcaaacatagaaccagagattataagaagaccagtctagcaccttatgtgaaagtttttgaacattttcttgaaaatctggataaatcccgaaaaggagaacttcttaagaagagtgatttacaaaaagatttctgaagacagagctcctcaaaccattgtggatatcttctgccttcaaccacagatcaaatacttcaagagccatttaataaatatggcagaactataaaaaa

SEQ ID NO: 15377 - DNA, 938 bp, Homo Sapiens
ttagctgggcttggttttgggcttaataggaagcttttaaaagttctgaggaagggaatgccatgatttgtagtttctatctagaaagataaatctgggcaagacagggactagaatagagcccaagaggccaactgcgctattgccactagaacagtagcactggagatctccgaaaggtgcaaatactggaaccatccttgagacttgctaatgatttagaagtgaagagatgaaagatggaagggaaaatgttatagaagccaggggaaagaaaagtgcaagattatcaagtgtcaggtacagtaggaaactaataaaatcctgctgcatataataactggaaagaaacacaaagaggatagcagtgtcaaatgaagggtactctaaatgggagacatatgagcatatgtataagccaatatgaaaaaaatcagcagattgaatattattcaagagatgaaggctactctagaaaactgtgacaatgttacagcaatacaaattatcttgccacttcattttttatttaaatatgtgatagtttaagcagtagtgcctaagataatgctctactcagtagacactcatatgtgtgattattggatgaacaacaactctgaacttggaaagcctggttgaagctgccattgcaactggccgtattaagtcctttgtatcctcactgttccatactagctcagcctatgatgtggacttcagcaaatgtgtaagcaaatctttgtgcatgatgtgtgttaaatagaagcattaggcaaaaaagaatgtaaaagtaaatgggctttgttttgtttcctttgctgttcttccatatattatctattctattttagatttacaaaaagatttctgaagacagagctcctcaaaccattgtggatatcttctgccttcaaccacagatcaaatacttcaag

SEQ ID NO: 15378 - DNA, 886 bp, Homo Sapiens
gggggagcatagagcgagagaggaggagacagttcggtcgcgtcagcccggcccacagcgtccagtataaagttagccgcccacagtccatcgctgtatccccgaaggggctaagatcgcccaaaatgtcatccaagtctatggttctgggttactgggatatccgcgggctggctcatgctatccgcatgcttctggagtttactgataccagctatgaggagaaacggtacatctgtggggaagctcctgactatgatagaagccaatggctggacgtgaaattcaagctagatctggactttcctaacctgccctacctcatggacgggaagaacaagatcacccagagtaacgccatcctgagatacatcgcacgcaagcacaacatgtgtggtgaccctgaagaacaaaagatactaccacacctcctggagaaccaaatcatggacttccgcatgcagctggttcgcctctgtctacattccaaccccgaacacctcgaagcccccatactctgcacatggtacctggccagctgaaaacaatcctcaatgttcactagggaacatccccacgggcacgcctgcacccactactatcttccatcgggatccctattccaacactgcccctattcgcgcttagcatctccttccccccacacaccctctcgggtactaacagagatgcccaaccaaagataaggcctcgtctatgcgcccggttgctacctccaccttttccacttttaccccctttcgttttataccacccgcccccattgtattttatctccccttcacactattttcaccgccgtacgtccgcttgccccccacctcgcccccaaatcgtctcccacctctttcgcgattgcaaccat

SEQ ID NO: 15379 - DNA, 1279 bp, Homo Sapiens
gggagtcctcgaaggctcggaagcccgtcaccatgtcgtgcgagtcgtctatggttctcgggtactgggatattcgtgggctggcgcacgccatccgcctgctcctggagttcacggatacctcttatgaggagaaacggtacacgtgcggggaagctcctgactatgatcgaagccaatggctggatgtgaaattcaagctagacctggactttcctaatctgccctacctcctggatgggaagaacaagatcacccagagcaatgccatcttgcgctacatcgctcgcaagcacaacatgtgtggtgagactgaagaagaaaagattcgagtggacatcatagagaaccaagtaatggatttccgcacacaactgataaggctctgttacagctctgaccacgaaaaactgaagcctcagtacttggaagagctacctggacaactgaaacaattctccatgtttctggggaaattctcatggtttgccggggaaaagctcacctttgtggattttctcacctatgatatcttggatcagaaccgtatatttgaccccaagtgcctggatgagttcccaaacctgaaggctttcatgtgccgttttgaggctttggagaaaatcgctgcctacttacagtctgatcagttctgcaagatgcccatcaacaacaagatggcccagtggggcaacaagcctgtatgctgagcaggaggcagacttgcagagcttgttttgtttcatcctgtccgtaaggggtcagcgctcttgctttgctcttttcaatgaatagcacttatgttactggtgtccagctgagtttctcttgggtataaaggctaaaagggaaaaaggatatgtggagaatcatcaagatatgaattgaatcgctgcgatactggcatttccctactccccaactgagttcaagggctgtaggttcatgcccaagccctgagagtgggtactagaaaaaacgagattgcacagttggagagagcaggtgtgttaaatgggactggagtccctgtgaagactgggtgaggataacacaagtaaaactgtggtactgatggacttaaccggagttcggaaaccgtcctgtgtacacatgggagtttagtgtgataaaggcagtatttcagactggtgggctagccaatagagttgggacaattgcttactcattaaaaataatagagccccacttgacactattcactaaaattaatctggaatttaaggcccaacattaaacacaaagctgttgtaactgg

SEQ ID NO: 15380 - DNA, 987 bp, Homo Sapiens
gctgttctagatggatccctgaagaggtggagtctcccaaatcgaccccctctgccaattctgtgtaagaaaaagaatcagaacgttacttctcacataatgtataaactactgaacatgacgatccacttgttaaccaccagctgctgtttacttatcaaggttatagttcgtgcttctaactggagcactagctgctaatgcatatctagagaaaaaaatcttcctttgcagttagtgccaaaaggattcaaggcttgtctggctgcaaaatgagatttttatcaggcatcttgagcattattataaagcagatgacagtatcgtgttgggggtagagaaattaaagcccataccaaagtgggccagccaagagcaggtgtcagcctgggacagatgtgaacaccaggaataaaagagcagttatgtaatccatttcgacgcacttctggaactgtaaactgtaaacaaatgctgcaaaggttaactattttctaaaacttactttttttccagtgggaaaacaaatatttggtatggtaacccaaacttatctctgcttttttgctcagtttcacacgttgtaactcaaattactctaaacgtgtttaactgccaaacagctacctgcatgttagaaaccagacaatacaaaccacctaataagaaaggttccctaatagaaatactaatacaaaaaaatgccttagctggagcaacttaaaaatcaaataatcatgacaaaagaaaaacaaatataaataccgactcgctctttattcaaacagtgtgctgtttcgcttatgattccacgtcctaaattacgtcaacgccgtttctgagtgccatctcgtcaccaactgctgctatcgactcctgtattttttaaaaagtctttttttacatcatataacaaagtacaattcaatttatttagggataaagccactataactaaaccagggttcactcaaattgctaccaggc

SEQ ID NO: 15381 - DNA, 664 bp, Homo Sapiens
agctcggtacccgtccttcatcatacctaccccaacagtctaactctaaagaggataaagccaatgactttcctcacaagagctcacgactaacgtcgctttgctatcaaaatctgtatttctgatccgttatgagcattgagacaagattcaaatattcccaaagaaagaagcacaatgcacgttgtgatcgcctattcagcaacagcgagcactgcatccaaaactctcatcccaggaattaaataaggtcagccacattcatgggcatctcctccactgtagtattgtagaaagtctcaatgtcacgaagaatcctcttgtcttcttcagtaacaaagtttatagccacacctttcctcccaaatcgaccccctctgccaattctgtgaatatagttttcacgattggtaggtagatcataatttataaccaaagacacttgttgcacatcaatcccgcgagccaacaagtcagtagtgatcagaacacgacttgaccctgaccggaattccctcatgataacatctctctccttctggtccatgtcaccatgcagagcagaaactgtgaagtctctggcatgcatcttctcagtcagccagtccaccttgcgcctcgtattgagaaaaataacagcctgtgtaatggtatggacagggta

SEQ ID NO: 15382 - DNA, 815 bp, Homo Sapiens
  misc_feature (648)..(660): n is a, c, g, or t
  misc_feature (663)..(708): n is a, c, g, or t
catgatggatcctcagtaagtgctggcagatactgaccacaggaaagaagtttgggggttggagggtggaggggtggcattagggtatgtgagccgctccccatgcttcacctcccctctcccctcaagcactgggagccacacgctcagagcaccaccaacttacattggtgattatggcgccgttgagttcggtcacagacttgatgtttttgaaagctgtcaccagtttattgtcaccttccaactgaaccactgtctgcagggaacagagaggtgacctgtgaggaaggggtggtggggggcaagagccttgctaatgaagttgcttcctttgcacaggtctcagctcataacaaccaaaatgctctggttcctatgatcccaagcctctagttctctggctccaaatagaagtgaggtgcatttaagaactaaataaaatgtcacgacttcttttgtcagaactttaattcatggcatgtgatctagaaatgagcatgggaacacctaagtggccccaaatacaaatgctaaaatcaaatcaagtaaaatctcaattctcccaagctaatggagggaggtagtggcaaaattcaaatattgaccagtagagaatacatattttgctttggtaagtattcttcnnnnnnnnnnnnnaannnnnnnnnnnnnnnnnnnnnnnnnnnnnnnnnnnnnnnnnnnnnnaggcacatggcaagacccccatctctacaaaaaattttttaaaattagctgcatggtgacatgcgtcagcacggtagtcccaaccattcggaagcttcgacggactg

SEQ ID NO: 15383 - DNA, 1374 bp, Homo Sapiens
  misc_feature (1274)..(1303): n is a, c, g, or t
ccgctttttgctgtgagggagggctgcggtggtgtcttttggaaaaaagctggtaccggtccggaattcctgcgatggtcagtcgtgaagagggagctctattgccaccatgagtttctccggcaagtaccaactgcagagccaggaaaactttgaagccttcatgaaggcaatcggtctgccggaagagctcatccagaaggggaaggatatcaagggggtgtcggaaatcgtgcagaatgggaagcacttcaagttcaccatcaccgctgggtccaaagtgatccaaaacgaattcacggtgggggaggaatgtgagctggagacaatgacaggggagaaagtcaagacagtggttcagttggaaggtgacaataaactggtgacaactttcaaaaacatcaagtctgtgaccgaactcaacggcgacataatcaccaataccatgacattgggtgacattgtcttcaagagaatcagcaagagaatttaaacaagtctgcatttcatattattttagtgtgtaaaattaatgtaataaagtgaactttgttttaacccacagccccaaccgccccccaaaatttaaggcgacgggcgcgccgctctaaaagtatccctccgaggggcccaaagcttaccgcgtaccccacgctttctttggtacaaagatggtcccctattagtggagtcctatttataaacctacggccatggggcggcggttttcccaacgttggcgaacctgggaaaaaactgcctagccttggggaatcctttggggaaagggaacccttaactttctcggaggggggggaacataatttgggaacaaaaacttaccctcaccgaacgattttaaaaagctttttttgggcgaacattttaaaaaagttttttaagggggcactaaatgggggtttaagaactaagggttggggaacagtgccttggccttgcctttgaaaaaatttctgcgcttctcccggaagctatggacttttatgtgaaacgagatttttctctcggcgtgggaagcgccgcggggaattgcactgaattgcgttttgtggggattttttatgagaatccaggcggcggcgccaagggggcttctcttttccgggcgagcccccctccctccgccatacgcgcggggctactccttcccatgatagcacgttcaaatcgtgggcgacgattccgccgcgtcctcttttgaaagaaaggggctttatacgcccatcgcagtctttacaagagaagaacagttnnnnnnnnnnnnnnnnnnnnnnnnnnnnnnatgaagaaaaacgctcttagtaagagccactctctcgagacgactgtagcaaaagccctgccagtgtttgt

SEQ ID NO: 15384 - DNA, 1418 bp, Homo Sapiens
  misc_feature (196)..(326): n is a, c, g, or t
  misc_feature (800)..(821): n is a, c, g, or t
  misc_feature (957)..(1019): n is a, c, g, or t
aaaactgtattggctttggcttccttgttttgctccaacaataaatcatgctgaggtttttgaagcacagctatgactagggcaggcactgctgattcagtcacaaaaacccttcttggatgaacaatacttgttcttttcagaagaaaagcaattttaccttttctatttctattatgaaaaacagagctaaacnnnnnnnnnnnnnnnnnnnnnnnnnnnnnnnnnnnnnnnnnnnnnnnnnnnnnnnnnnnnnnnnnnnnnnnnnnnnnnnnnnnnnnnnnnnnnnnnnnnnnnnnnnnnnnnnnnnnnnnnnnnnnnnnnnnctaaacaatcttaaagtctccttttccaccagatgactaaaatctttagtttgtaaattcccttagtctcttaaaatcaatctatccagaagacaagaaagacaaacttagtgaaggaaagaatgcttcctcactctctcaccagaaagccaaagcaaaaatagagccccacagaaatttcaacattgaacattttttaaatcttaaagcttagtaggaatcaaaaagctttatataagtcagcagatctgcaaaccttgttagttcaatacaaaccatgatctagcagacaacttatattcaaaagctcatctttcaaaaggttccaccttgcccgtctatttaaacagtcacgaccttccttagagaggcaagcagtaatcttacatgacacataaaagctgtttcactgtgacacatatataatgaaaagtaatcagtctccaaagtttttccaatccacaagcatgcatnnnnnnnnnnnnnnnnnnnnnncgctttggtactcttgtctctaataatttttaaagcctacttttctaactgaattttaaaagtaccttgaatttaaattttttttaaacttcagtcttcaatattgaaactgctaagttaccccatttttccatgnnnnnnnnnnnnnnnnnnnnnnnnnnnnnnnnnnnnnnnnnnnnnnnnnnnnnnnnnnnnnnnattactaaataggtttaagaaaaaagcctatataggccaggtgcagtggctcacacctgtaatcccagcactaaacaatcttaaagtctccttttccaccagatgactaaaatctttagtttgtaaattcccttagtctcttaaaatcaatctatccagaagacaagaaagacaaacttagtgaaggaaagaatgcttcctcactctctcaccagaaagccaaagcaaaaatagagccccacagaaatttcaacattgaacattttttaaatcttaaagcttagtaggaatcaaaaagctttatataagtcagcagatctgcaaaccttgttagttcaatactaaccatgatctagcagacaacttatattcaaaagctcatctttcaaaaggttccac

SEQ ID NO: 15385 - DNA, 812 bp, Homo Sapiens
gctcggtaccccttggtttcaataaggaacggggacacttacaaattgctgcttgtccaaatcaggatccactgcaaggaacaacaggccttattccactgctggggattgatgtgtgggagcacgcttactaccttcagtataaaaatgtcaggcctgattatctaaaagctatttggaatgtaatcaactgggagaatgtaactgaaagatacatggcttgcaaaaagtaaaccacgatcgttatgctgagtatgttaagctctttatgactgtttttgtagtggtatagagtactgcagaatacagtaagctgctctattgtagcatttcttgatgttgcttagtcacttatttcataaacaacttaatgttctgaataatttcttactaaacattttgttattgggcaagtgattgaaaatagtaaatgctttgtgtgattgaatctgattggacattttcttcagagagctaaattacaattgtcatttataaaaccatcaaaaatattccatccatatactttggggacttgtagggatgcctttctagtcctattctattgcagttatagaaaatctagtcttttgccccagttacttaaaaataaaatattaacactttcccaagggaaacactcggctttctataaaaaattgcactttttgtcaagtaatcctctgcagtgatacttctggtagatgtcacccagtggtttttgttaggtcaaatgttcctgtatagttttttgcaaatagagctgtatactgtttaaatgtagcaagtgaactgaactggggtttgctcac

SEQ ID NO: 15386 - DNA, 1413 bp, Homo Sapiens
  misc_feature (132)..(147): n is a, c, g, or t
  misc_feature (516)..(516): n is a, c, g, or t
  misc_feature (518)..(598): n is a, c, g, or t
  misc_feature (783)..(819): n is a, c, g, or t
  misc_feature (881)..(891): n is a, c, g, or t
  misc_feature (1037)..(1037): n is a, c, g, or t
  misc_feature (1301)..(1301): n is a, c, g, or t
  misc_feature (1369)..(1369): n is a, c, g, or t
aaattatgggtatgtgagccataatatgatggccagcaggtgcgctgccttccacccatggtgatggatggtttggaaagggaatgttggtgccttttgtgccacaagttaagatgctactgttttaaaggnnnnnnnnnnnnnnnngtactgatcttcaatatgaagacatgagcttttctcgcaggaaattttctttttcacagaactggtgtcaggaatcactgaagggctaaccgtgatagtccttgcaagtaagtcaaggttttatcctgattggaaatagaagacatttccggttgagagaacagattcgttggaagcttaacttttgttgcctcttaacgccaccaaattttagggtaatttgattatgaaagagtgaatttttctggacagaaaagggagagctaccaaattgtttttttcattttaaaaggaagtttaatgtccgttgtatcacaaatcagtgttaaaacaccagaactttagccaaaataaatgtcttacattacnannnnnnnnnnnnnnnnnnnnnnnnnnnnnnnnnnnnnnnnnnnnnnnnnnnnnnnnnnnnnnnnnnnnnnnnnnnnnnnnnaactacggggaaccatagcgcccccgcgattatgaaaaaaatagcttgtggggggccccgccttccgcccccctgaaaaaaattttttttagaaaccctctttgcttttggggcgccgcgggggccccccctgtgggcgaaagcgggcaaacattgggcccaaaaatgtgttgggtcttctcacnnnnnnnnnnnnnnnnnnnnnnnnnnnnnnnnnnnnngaggcgctcgtggggaatatcccctcgcccccacaattgataaaataaaccccccccgcgcnnnnnnnnnnnaacaaccacgcgaggagggtgttattttgttgtgaacaaataaatactctcccatcaataaggtggggggggcgtttctctcccttcggagaggggggttatctttcatagcgcggggcgggattttttatttctatctctaaacnaggcggggagggagagcgcccccacaggtggcgcgcggcgcgctcctcccactcatatatctgccgcacaattttttatccccggcacgtctgcctgcgcccaacctgcggttgaccacatcttatctgttctttgcggcaaggagcaacagcgtgggggcggggggaaaaaaaccctcccctattttattaaaaggctatatttcttcttccgccccccacacctcctctgggtaaaaacaacactctcactttctctaacanaaaacagggcggggattgtgatagacaagaacacctactccgtgttataaatctcccccaaccccaangggggggcgttaatccaaccacgcaacaccacggtatgtggata

SEQ ID NO: 15387 - DNA, 1159 bp, Homo Sapiens
  misc_feature (609)..(623): n is a, c, g, or t
tttcatttttttatgtaagacggtggaatagagcgccttatatgtattattgttatggggcggtagagaaaaaattttagcaggcgggtgtattggtgtaactacgccggtggaattgttgggtggagatcccggcaatcgggggagatcttattaacaaagcgttccccgcgggggttggggcgacggggatactaagtatcccgagggttgtttgggtaaggttttttcgccacccttttttgtgtgtgtcgcccagagaagaaaaggatttggcgcttgtctttgttgtgtgttgaatgtccgaagatggtggcccgcttataagaatatttttggggttgggtctttttaaaaggaaggggcaacagcgaagtagaggtttagaaggtctgtccgcaaggcggaaatgctggttgcgtctgccacacgggagaaaggtgttctttgttattgtcccaattcaaggaatagaagcccgttgggggtacttgccagaggactatgccccggttaggccatttcagtgatttcgtggacaccagttctgtgaaaaagaaaaatttcctgcgagaaaagcttcatgtcttcatattgaagatcagtacnnnnnnnnnnnnnnncctttaaaacagtaacatcttaacttgtggcacaaaaggcaccaacattccctttccaaaccatccatcaccatgggtggaaggcagcgccacctgctgcccatcatattatggctcacatacccataatttccttgcggtgctgaattccaagtggggattattagagacccctcagagccaaaaggggaccttagaggtcttctagatgagtcccctcatttgtaggtggtggtttctggataactcagagtggcagggacacagacgagcctgtggaaaggtatactgctttaagattgagaagaaaaccattcggcgctctaattttgcctggatggtgctctgtcagtcaaagaaagggaacaggtctggggagggggtaagggcaccctgagttcctgttccatcacttcccaggcagtagaaggctgtccaggaacagctcccatccgcagctgggcatgtgttggctcttacaccagagactttaattttaactgaagaactaagagctaaatcctgttaagtaaaac

SEQ ID NO: 15388 - DNA, 812 bp, Homo Sapiens
ggacagtaagtacaggttagtaattacctgggtaattaattgaagccttattctgttttcataagacttacttgcttaattcaagcaaaacaaattttggtctaaattacctagataattatgacagctttttacttgagaagtgtagaacttgcttcaggctacaaaactgtattattcctaaatggataaccaggtaggattctaactggcattattgtatgcttaagattgatttaacaacagctattcccagtaaggaaattttaaaaatcagatccagttacatgtattatgatttttctaccttatggactattttggagggataagctattaagactaagactatgaatgagagttggggaaggagcaggaagggaggaacctgcacaccacattggaacctgcacaccacattaacacaaaggcaatcttctggctcggactgttctttactactgttcttaaagaaaatgttcattctgctgcagctaactagcctccatcttctacaccaaatactattccatgccatggaagtgctatgcaataactctcccaggtagcaccttataccgcttaaaagcctttaaaatctccaatctgaaggtgtcacagtaaagaaatgtaaacacttaggaaaacaaaaatgtaattacctgatgaagtcatctatgtccatggaacgggcccgtttgtcactaaaacctgtgctggttaggatttgctgtattttatctgctatgctgaaatcttctggtattatctatcaatataagattcagaataaatgaacgacatatctctat

SEQ ID NO: 15389 - DNA, 1632 bp, Homo Sapiens
  misc_feature (65)..(65): n is a, c, g, or t
  misc_feature (706)..(706): n is a, c, g, or t
tccccacgtggtggctttctcacgctagccctctttggtcctccttgacgtcccgggcctgtggnctttctgccgagatgccgaagtcaagtcgggggccatcgcgccgccgcggcaggagcagcgccgggagctgaagagcgctggaggactcatgttcaacacggggattgggcagcacattttgaaaaatcctctcattattaacagcattatcgataaggctgccttaagaccaactgatgtagtgctggaagttggacctggaactggcaacatgactgtaaagttgttagaaaaggcaaaaaaggttgttgcttgtgaacttgacccaaggctagtagctgaacttcacaaaagagttcagggcacgcctgtggccagcaaacttcaagtactggtgggtgatgtgctgaaaacagatttgccattctttgatacttgtgtggcaaatttgccctaatcagatcctcctcaccttttgtcttcaagctgttgctacatcgaccttttttcaggtgtgctatacttatgttttcaaagagaatttgcccctccgactggttgcaaaacctggagataagttatactgcagactctcaattaatacacagctgttggcacgtgtggaccatctaatgaaagtgggaaagaataactttcagaccaccgccaaaggtggaatccagtgttgtaaggatagaancctaagaatccacccaccacccatcaattttcaggaatgggatggtctagtaaggataacctttgttaggaaaaacaagacactctctgctgcatttaaatcaagtgcagtgcaacaactcttggaaaaaaactacagaattcactgttcagtccataatattataataccagaagacttcagcatagcagataaaatacagcaaatcctaaccagcacaggttttagtgacaaacgggcccgttccatggacatagatgacttcatcagattgctacatggattcaacgcagaaggtattcatttttcctaggtatttggaaaacagaaattttcaaggtcaagaaaagaaatgaattttgtattttttgtatttgagaagataatgcttttgctttactgagacattatttacttgactatttttggttcaatactactactgttgtcaccatttatgattctgaattttaaagttggaaagttctaagtatcaaagtttttaatatataatgctggtccaatctattcataataatcttcaagttcaggagccgcagagacgcacaactttacacttatcatttctaacagtttattgtataaagatgttactcttctatttactgttatatactgtaaggccttctttaggcctttagctctgttcctccagtaataaaaaagttaaaatatgcttcactagtcacacattccccataccatttcgtgttattcacattccccgtaccatttcttgttattcacatgtacagtaaaacaattgtttcttaaattatttttattttggttctctcattctcttccctatttatcctatacagtgtctgttacgattgcctacctctttcgctatcctatagcgtcagagacttagggttctgggtaagcccaagtctgctact

SEQ ID NO: 15390 - DNA, 489 bp, Homo Sapiens
atcttggttcctgccacgtttcgtggggcaacagccaagacccctgggacccttgcggggctcggggtccgagggctgtagggctcctggggaagcagtccgggcacccgactacgctttcccgatcccaggcacgcgagcgtctcggggacacccaagcaaagaccacgcgtcccgggcgctcgttaaatcgcttcccccttggcggcaccgccctggccccaggccgcaccccaccaatccaaaacccgcgccggccccaggagcacagctggacgacccgccccggtactcacgccatggcttaagccgctgggggttggccgctgcaaaacctggtgctgcttgccgccgctgcaaaggccaatgctgccgcagccagctgctgcccctaataagccatggtggccgtggaacctgaaggcgggggaagagggaaaacgcacaagggccgagaaaacttaatttgtgggcggggaaagttaaaaa

SEQ ID NO: 15391 - DNA, 517 bp, Homo Sapiens
ggcacgaggaaagtgcttgccaccttccaggtatcattctaagagacctaggttttcttcagcccccaaacccgactggtcgaagggggacatcaagtcccccaccaacacctcgctgctcaggaagctcatttcggtcatgttgcggtgctttgctggaatcgaggaatgtgcttaattcgaaggtgtctttgtcggttacagcaacgctgctgctgaatgccgtgagaagcctgaatgagaatcagaagccaactcccattagaggttagctgttctgagaatttcatccttccacttatgaggcgggacttctctagatcggccatctagagaatcgggaacagggcagttgtatttgcccctccctgcttgcaactcaggttccacaaaatggacgctcacggagaccaggggattcttccaccggccgccaagaggaaagcgctccgtccccacgtccaaatacggccagggcggccgcgccccgcccaccgcccgcccctgactcacgccc

SEQ ID NO: 15392 - DNA, 845 bp, Homo Sapiens
gggggagataatgggcagcacctgggggagccctggctgggtgcggctcgctctttgcctgacgggcttagtgctctcgctctacgcgctgcacgtgaaggcggcgcgcgcccgggaccgggattaccgcgcgctctgcgacgtgggcaccgccatcagctgttcgcgcgtcttctcctccagggtccaaggcactgggttgacagtcctaacctggttccaccccaccccacccctctgccaggtggggcaggggtttcgggctggtggagcatgtgctgggacaggacagcatcctcaatcaatccaacagcatattcggttgcatcttctacacactacagctattgttaggttgcctgcggacacgctgggcctctgtcctgatgctgctgagctccctggtgtctctcgctggttctgtctacctggcctggatcctgttcttcgtgctctatgatttctgcattgtttgtatcaccacctatgctatcaacgtgagcctgatgtggctcagtttccggaaggtccaagaaccccagggcaaggctaagaggcactgagccctcaacccaagccaggctgacctcatctgctttgctttggcatgtgagccttgcctaagggggcatatctgggtccctagaaggccctagatgtggggcttctagattaccccctcctcctgccatacccgcacatgacaatggaccaaatgtgccacacgctcgctcttttttacacccagtgcctctgactctgtccccatgggctggtctccaaagctctttccattgcccagggagggaaggttctgagcaataaagtttcttagatcaatcaaa

SEQ ID NO: 15393 - DNA, 841 bp, Homo Sapiens
  misc_feature (646)..(646): n is a, c, g, or t
  misc_feature (769)..(783): n is a, c, g, or t
ggggggcggaacctggagataatgggcagcacctgggggagccctggctgggtgcggctcgctctttgcctgacgggcttagtgctctcgctctacgcgctgcacgtgaaggcggcgcgcgcccgggaccgggattaccgcgcgctctgcgacgtgggcaccgccatcagctgttcgcgcgtcttctcctccaggttgcctgcggacacgctgggcctctgtcctgatgctgctgagctccctggtgtctctcgctggttctgtctacctggcctggatcctgttcttcgtgctctatgatttctgcattgtttgtatcaccacctatgctatcaacgtgagcctgatgtggctcagtttccggaaggtccaagaaccccagggcaaggctaagaggcactgagccctcaacccaagccaggctgacctcatctgctttgctttggcatgtgagccttgcctacgggggcatatctgggtccctagaacgccctagatgtgcggcttctacattaccccctcctcctgccatacccgcacatgacaatggaccaaatgtgccacacgctcgctcttttctacaccccagtgcctctgactctgcccccatgggctggtctcccaagctctttccattggccagggnagggaaggttctgagcaataaagtttcttacatcaaccccctatacccgccccctctattaatccccgggcccggccgccctcggacccttcaaaaagcttttctacaaccatttctttgggnnnnnnnnnnnnnnnaacggaaagtgaaacatgggccctatgctggttcccaaggaaaaatctggggcacaga

SEQ ID NO: 15394 - DNA, 805 bp, Homo Sapiens
gggctcttccagggcgggcggtgtggtgcacgcattgctgtgctccaactccctcagggcctgtgttgccgcactctgctgctatgagcttcctcaaaagtttcccgccgcctgggccagcggaggggctcctgcggcagcagccagacactgaggctgtgctgaacgggaagggcctcggcactggtaccctttacatcgctgagagccgcctgtcttggttagatggctctggattaggattctcactggaataccccaccattagtttacatgcattatccagggaccgaagtgactgtctaggagagcatttgtatgttatggtgaatgccaaatttgaagaagaatcaaaagaacctgttgctgatgaagaagaggaagacagtgatgatgatgctgaacctattactgaatttagatttgtgcctagtgataaatcacgcgttggaggcaatgttcactgcaatgtgcgaatgccaggccttgcatccagatcctgaggactgaggattcagatgactacgatggagaagaatatgatgtggaagcacatgaacaggacagggggacatccctacattttaccacctatgaagacaggattatcccaatctaacagcagaacgggccaagccaccctggagagattagaacggaatgctttctccggtctgtgagaagccagtatccctatggcggcgtccggaccgcagattcactcccagatctcagatgggcgcgcgggattcaacccaaacgagcgacccttggggcccctgtgccctgaaccgattctgccgac

SEQ ID NO: 15395 - DNA, 576 bp, Homo Sapiens
ccatttccccaaccaaaggctgcgaagtagccgagggctactgtcaagaaaggacaggccgtaaaaatcacacaccaaagcaagtccccttatttgacaacaacaacaaaaaaggtgcggggagtggtagaggggaaggggtaaataaaatgtgtgtgtttcttggcgtgttcctttaagtgagaaaaactagggaatcctgaaaatcaccagaagttaaactcctgaaaaggaaggccagttggtgttggagccaacttggagaggtccaagtggttctcgcctcatttgcatgagtcagccagaaaacgccaggactgtggaggaggaccccaccgcagagccacccgccagctctgatccgccagtctggtctgcagttccccgcggaacctgcaagcggcgagttgacccgcccgccctctgggaaaaggactgggttggaaaaggggccagcttctcactaactgtaagtttaagatgttcgggtaggaaatccttcagccgggcgatgcactcgttaatccggtcacgtctctttttctcgatgagccggtgcggcaattttgaggtctc

SEQ ID NO: 15396 - DNA, 1340 bp, Homo Sapiens
  misc_feature (1205)..(1234): n is a, c, g, or t
gctcatcgagaaaaagagacgtgaccggattacgagtgccatcgcccagctgaaggatctcctacccgaacatctcaactttacaactttgggtcacttggaaaaagcagtggttcttgaacttaccttgaagcatgtgaaagcactaacaaacctaattgatcagcagcagcagaaaatcattgccctgcagagtggtttacaagctggtgagctgtcagggagaaatgtcgaaacaggtcaagagatgttctgctcaggtttccagacatgtgcccgggaggtgcttcagtatctggccaagcacgagaacactcgggacctgaagccttcgcagcttgtcacccacctccaccgggtggtctcggagctgctgcagggtggtacctccaggaagccatcagacccagctcccaaagtgatggacttcaaggaaaaacccagctctccggccaaaggctcggaaggtcctgggaaaaactgcgtgccagtcatccagcggactttcgctcactcgagtggggagcagagcggcagcgacacggacacagacagtggctatggaggagaatcggagaagggcgacttgcgcagtgagcagccgtgcttcaaaagtgaccacggacgcaggttcacgatgggagaaaggatcggcgcaattatagcaagagtccgaagaaccccccacaaaaaagaaccggatgcagctttcggatgatgaaggccatttcactagcagtgacctgatcagctccccgttcctgggcccacacccacaccagcctcctttctgcctgcccttctacctgatcccaccttcagcgactgcctacctgcccatgctggagaagtgctggtatcccacctcagtgccagtgctatacccaggcctcaacgcctctgccgcagccctctctagcttcatgaacccagacaagatctcggctcccttgctcatgccccagagactcccttctcccttgccagctcatccgtccgtcgactcttctgtcttgctccaagctctgaagccaatcccccctttaaacttagaaaccaaagactaaactctctaggggatcctgctgctttgctttccttcctcgctacttcctaaaaagcaacaaaaaagtttttgtgaatgctgcaagattgttgcattgtgtatactgagataatctgaggcatggagagcagattcaggnnnnnnnnnnnnnnnnnnnnnnnnnnnnnnatgcgcgtgcgcgcgcacatgtgtgcctgcgtgttggtataggactataaagctccttttgtcatagggaagtcacgaaggattgctagacatcaggagacttggg

SEQ ID NO: 15397 - DNA, 587 bp, Homo Sapiens
gccctcgtcgatttcattaccaacatgttaagaaggtgccctaccagtaacacagagggaggctggtcctgctctctcgctgagtacatccgccacaacgacatgcccatctacgaagctgccgacaaagccctgaaaaccttccaggaggagttcatgccagtggagaccttctcagagttcctcgatgtggccggtcttttatcagaaatcaccgatccagagagcttcctgaaggacctgttgaactcagtcccctgaccaccacacagcagctgcggcggcgaagacgaagctggcttgccttccaccctctgttctccctccttgtgcattaagttccctccgcgggatgctgcattgttaccccgccctcccctctctcatttttcttggtgtggcttggggtttttaggcttcctgttttatctcgtgtgtgtggtgcaccagctatgaggttgtctgtaacccaagccatcaaagggcctgtacatacctaggagccatgagttgtcccggccagcttcatacttgagtgtgcacatcttgagaaataaacaagtgacttaacacacattgaaaaaaaa

SEQ ID NO: 15398 - DNA, 628 bp, Homo Sapiens
atgtacaggccctttgatggcttgggttacagacaacctcatagctggtgcaccacacacacgagataaaggaggaagcctaaaaaccccaagccacaccaagaaaaatgagagaggggagggcggggtaacaatgcagcatcccgcggagggaacttaatgcacaaggagggagaacagagggtggaaggcaagccagcttcgtcttcgccgccgcagctgctgtgtggtggtcaggggactgagttcaacaggtccttcaggaagctctctggatcggtgatttctgataaaagacctgcaaagcacaacgggcagaggtgtgtcaggagcaggcatacagcccccattccccctgagtcacagctgccgcatctagcagagaacacactgcggtccgacaagctctggcccggctgctcactggacagcagcatgaccggggaggtagtcattgagcaaaaccctgttccgcaggaggagtcctgttccagaagcaggcactgctggaaggtgtttttgttctcacatttgaactagggtgtgtctgatgttctgaaattttctaacagcttaaacaaagtaataaagtggtgctgtcaaaacctgacctacgcgcctatagggg

SEQ ID NO: 15399 - DNA, 883 bp, Homo Sapiens
  misc_feature (464)..(464): n is a, c, g, or t
  misc_feature (471)..(471): n is a, c, g, or t
  misc_feature (776)..(784): n is a, c, g, or t
ccgcggtcctcgtcgtggtgagcgcagccactcaggctggtcctgggggtggggctgtaggggaaagtgctaaagccgctgagatggctctgagagattcctctgcgaatctgtttttagctatcaagtggcatccacgcttaaacaggtgaaacatgatcagcaagttgctcggatggaaaaactagctggtttggtagaagagctggaggctgacgagtggcggtttaagcccatcgagcagctgctgggattcaccccctcttcaggttgatactgcctggatggtcacctctggtgcgcagcaagtgcaaagccagtgggggactttctcacagcttacatagccatccagagatccacagctacgtcactgaattgttaatgcacatttgtacttggtttctctgtatctattcacaggcaacaaatacttatatgtgtgatctttcagggataaaacncccacanaccaaaccctaaaaaacttgtccggccgccttcggcccttcgagaaacttttctaaaacctttcgtttgggcgcgcgggcccccataagggaaagggaaacatgggccatagcctgttttccctaggaaaactccctggcccctgaactagttgcttggggattcccccccaaataaaaaaccgccccggccgggaaccggagcggtttctgaaactaattccaaaatgggagttcctgaagggccttaactggaacctaatcaaccgggagtcccaagcgaacgtccaatatcaaaattaatgnnnnnnnnnttgccaattcctttttaagtaagtgtgttggaaattttatttaaacaccttcctggccccaacctggggaaatccccttccccataacggccttttact

SEQ ID NO: 15400 - DNA, 1159 bp, Homo Sapiens
  misc_feature (903)..(912): n is a, c, g, or t
ggggccgctggctccgtctgttggggggcgaacacgccgcggtcctcgtcgtgtgaagtaagaactctgctagagaggaaatggctgcttcatcatcatcctcctcagctggtggggtcagtggaagttctgtcactggatctggtttcagtgtctcagaccttgccccaccacggaaagcccttttcacctaccccaaaggagctggagagatgttagaagatggctctgagagattcctctgcgaatctgtttttagctatcaagtggcatccacgcttaaacaggtgaaacatgatcagcaagttgctcggatggaaaaactagctggtttggtagaagagctggaggctgacgagtggcggtttaagcccatcgagcagctgctgggattcaccccctcttcaggttgatactgcctggatggtcacctctggtgcgcagcaagtgcaaagccagtgggggactttctcacagcttacatagccatccagagatccacagctacgtcactgaattgttaatgcacatttgtacttggtttctctgtatctattcacaggcaacaaatacttatatgtgtgatctttcagggaatgttttgtttatttgtttttaaaagtattgggaatcagattaagacaatcagtttcagagaaccaggaggtttggggttaagagatactcaaaaattttcacaagccaagtagggcatatatcagatttggccaactgaatggcgtctgtcctgtcatccatatggtgcctggaaatatttaccagtcaaggtcaaggtcagcatctgtggttaaaaatatagcattctgacctaaaaaagttatttgccagatgaatgtgttttcaactcaggacctatccaaatgaggaatttttaaatattcnnnnnnnnnncctatttttagacatcaattctatagattctgactttttctaacctcttatagacatgccaaatgctggcaaaaagaagtgctttttggatatggcagcacttgtaaaaataaagcagtaagcaaaatccttttaaacacagaaatcctgagttcttctcattggtggactcaagcaattctgtagcaaataaatccttatgaaaagagctcccaaaaaataaacaacacaaaacacaacaggaggg

SEQ ID NO: 15401 - DNA, 721 bp, Homo Sapiens
  misc_feature (686)..(686): n is a, c, g, or t
gcatgggcacgcattgacaacacgtattgttgacagagctttgatattcgtaccatatgcagaaggagttattcctggatgaagctaaagctttgtctctgtggcaccagctaatgcagtggcaggtcttctgcctggtggtggactcctgcctactcctaacccacttacccagagtgacgctgttccactggctgctttgggggctcctactcttgatcctgcccttgctgcacttgggcttcctggagcaaacttgaactctcagtctcttgctgcagatcagttgctgaagcttatgagtactgttgatcccaagttgaatcatgtagctgctggtctcgtttcaccaagtctgaaatcggatacctctagtaaagaaatagaggaagctatgaaaagagtacgagaagcacagtccctaatttctgctgctatagaaccagataagaaagaagaaaaaagaaggcattcaagatcaagatcacgttctaggaggaggaggactccctcatcttctagacacaggcggtcaagaagcagatcgagacggcggtcacattctaagtctaggagtcggcgacgatccaaaagcccaaggcggagaagatctcattccagagaaagaggtagaaggtcaaggagcacatcaaaaacaagagacaaaaagaaagaagacaaagaanagaaacgttctaaaacaccaccaaaaagttacagc

SEQ ID NO: 15402 - DNA, 404 bp, Homo Sapiens
cccttccggaaacacccgaatcaacttctagtcaaattattgttcacgccgcaatgacccacccctggcccgcgtctgtggaactgacccctggtgtacaggagagttcgctgctgaaagtggtcccaaaggggtactagtttttaagctcccaactccccctcccccagcgtctggaggattccacaccctcgcaccgcaggggcgaggaagtgggcggagtccggttttggcgccagccgctgaggctgccaagcagaaaagccaccgctgaggagactccggtcactgtcctcgccccgcctcccccttccctccccttggggaccaccgggcgccacgccgcgaacgtaatagctcttcaagtctgcaataaaaaatggcctccaacaaaactacattac

SEQ ID NO: 15403 - DNA, 684 bp, Homo Sapiens
ggggtgactgacttcccagactctcctctgtccctcaggagcagccgtgtcctctcccaggccctaggacactgccagagactgtgggacatacaggcataagtgatgtgtgtgtttctgcttctgttttaaaaatccagggtcattacacacagcatggaaattagcacaaaatgctgtgcaaacgtcagatgctcccaaaccagcaaagggatgggcttgcttcacatcagatgcgggcacgccttacccctgccttccgtgtccccaccccagggtcaagggttcctcagaccagccatgcctcctcctcctgccgcctccttttctagatggggaggggattccgtcacaagaagagccgcccctcggccgtgtgcaggaagccccatgtcgctttgccgagatcagccctgggaggatccccttctctagctcagatcatgccgtgtggccagaaggctgcggacacaactgacctgcttctcgaggtggttgatgttttaaacaggaagctccacggagttcagccctgtgtgcatttcctcatgtatgtaaacgccaagactgaatgtgagaggtgtaggccgcgggccttaagtctgagcagatccatctggaatgttcggggtgtgctgtctggatgtggtgcgctaaaaacacggaataaagatcagtggcaaa

SEQ ID NO: 15404 - DNA, 846 bp, Homo Sapiens
gttgctagtccctgtaatataaaaatggctgaaaggagttggggaagggggcagtgaagacgacgcctgcctctcgcggtgtgaaactggggacctttgctatatgccgtctattattgtgcatccagcacgtgtatggtgcccagcacccccccgtttgatccactgttacatggcactttgctcaggtccacggccaagatgccgaccacaccagtgaaggccaagagggtcagcaccttccaggagtttgagagcaataccagcgatgcctgggacgctggggaggacgacgatgagctcctggccatggcggcggagagcctgaactccgaggtggtcatggagacggccaaccgtgtgctgcgtaaccacgagccagcggcaggggcggcccacgctgctaggaggggccagggcttcagcagaagcccaggcccgaggcagagccagccctcaccccccagcggcgacctccagctggtgaacgtcggtcagtgagagccacacgtcctgtcctgcatgaaagtgccagcgatgccgcccctctgcagaggtcccaagtctctcccacacgttcggccaccgtcacgctgggtggcacattctgagccccagcactctcagccagctcaagcgctgagccgaaagagagcgcctcccggctcgacaaagttacaagcagctgcttgccggcaccaacacggaccttgaggaattacggaggttgagctggtccggaatccctaagccagtgcgtccaatgacgtggaagctcctctcaggttaccttccccgccaatgtagaccggagaccagccactctccagagaaaccacaaatgaa

SEQ ID NO: 15405 - DNA, 775 bp, Homo Sapiens
tgcttacttaacccagtgtgatgtggcataggtcttgatacccaaggagtcccatcttcaaggaagcaactccagcctagtcacagcttcatcctagagttagctgtctccttttctcattagccagtgatttacaacttcctgctctcctttgctttccaccatctaagctataccctgtccctaagtcctgagccaccctctcctgctgttttcctggtttggtaagtcaggaggaaaggtttgatggttctttccccacttctttttggaggagtaaggaagtgaggttcttatccttcacatatgagtgccctggattttggttcttagttgatgaatactcaacacacagttctttgttttggctgcacccacacagtgcaactaatgtgtggccttaagaaggaccctcttcctaggcctcgcccaccttgggaccgtgggcaggaaccacagtagaactggtaaattacatgttccgtctttaaagggcctcctacgagctactcttgggccatatggggttaaagaaacttcctgaacatagcactctggaggaaggagtcctcttccctccacctgtagccacagtgtggttggcaaaccctcaagcctatcaggaggtagagggcaagatgagcgctttgtcttaaaggccaaagagaacagcaccaagcgtttctacccagggccttccttctctcttcccatgaagtctttgcccttctcccataaactttgggtcccaggagaaccttggttgctctcgtgc

SEQ ID NO: 15406 - DNA, 614 bp, Homo Sapiens
acctatgccacatcacactggggctagggaagtaggtgatgccagccctcaagtctgtcttcagccagggacttgagaagttatattgggcagtggctccaatctgtggaccagtatttcagctttccctgaagatcaggcagggtgccattcattgtctttctctcctagccccctcaggaaagaaggactatatttgtactgtaccctaggggttctggaagggaaaacatggaatcaggattctatagactgataggccctatccacaagggccatgactgggaaaaggtatgggagcagaaggagaattgggattttagggtgcagctacgctcaccctaaacttttggtggcctggggcatgtcttgaggcccagactgttaagcaggctctgctggcctgtttactcgtcaccacctctgcacctgctgtcttgagactccatccagccccaggcacgccacctgctcctgagcctccactatctccctgtgacgggtgaacttcgtgtactgtgtctcgggtccatatatgaattgtgagcagggttcatctattttaaacacagatgtttacaaaataaagattatttcaaaccaccaagaaaaaa

SEQ ID NO: 15407 - DNA, 1665 bp, Homo Sapiens
  misc_feature (577)..(587): n is a, c, g, or t
  misc_feature (645)..(665): n is a, c, g, or t
  misc_feature (1341)..(1341): n is a, c, g, or t
gggacagcggtcacgtgacatggccccggggagccgaggtgagcgttccagcttccggagccggagggggcccggcgtacccagcccccagcccgacgtgaccatgctgtcccgcctcctaaaagaacaccaggccaagcagaatgaacgcaaggagctgcaggaaaagaggaggcgagaggctatcactgcagcgacctgcctgacagaagctttggtggatcacctcaatgtgggtgtggcccaggcctacatgaaccagagaaagctggaccatgaggtgaagaccctacaggtccaggctgcccaatttgccaagcagacaggccagtggatcggaatggtggagaacttcaaccaggcactcaaggaaattggggatgtggagaactgggctcggagcatcgagctggacatgcgcaccattgccactgcactggaatatgtctacaaagggcagctgcagtctgccccttcctagcccctgttccctcccccaaccctatccctcctacctcacccgcagggggaaggagggaggctgacaagccttgaataaaacacaagcctccgtttnnnnnnnnnnngaaacgcagacccagacggacacagaaaacgcacgagacagacaaagaagaacaaagnnnnnnnnnnnnnnnnnnnnntagagtacacaaccccggagccaccacctccaatcccaccaccacgaccgccaatttgcatatggggagcgggtgggcgcggccccgccgccccaagaaaagtttttcacaaacttttgggtgtgggcgcgcgggcgcccgagggggatacaaggcgccactgcgcccaaccccgttctccccaaaagggagagaaccggtgaacacacaaactaagacgtaggacacttccccccacataataaaaaaccacctgccgggggggtacatcaaggagcggtctcggaagacaacgggcgcgggaggggggggtgtaattcacaacgagggttcgcgcatggaccagtcggcacggaacacgggcacccccccgccctgcgcgggctctacggattcacacgactgaacggagaggaccgcggcctctctatacaaggaatacagacaggggcgaacaccgaccgcgggcgctggcgcgatatccccacaacagaagggaacgaaatcgtgcggcgccccgcgcaaagatggggggcaacacccccgccttaccacccacccaggggcctcagaaagactgggagggacgcccggacggaagtgtcctcgcgcccgccggctgggcgcacaccacaccaccccgccccggtgtgctcctccgcgcgcggggcggagnttagacaattgatttgtggttggcgccctccgagagtgaatctacagcacgcgcgcgtgcgctgccactgaaataagaaagaaggcggcgcgggataaaagggtagggcagtcctcactccattatatatcctatacatcggaatcgtcgaccgctttaaggtatttacgtctgcagactggctagctcttctgtctcgccggtgcgcggggtctacgaactagctacatattactttctgccccgcgataagagcgcccgccacgagtggggagatgagaggacaaagagcggcggcgggtttggtgttcccaacaccccacc

SEQ ID NO: 15408 - DNA, 914 bp, Homo Sapiens
  misc_feature (38)..(38): n is a, c, g, or t
gtcagaaacacagtctcgcggtgtactcccctcccggngccgtttttttatattggggtgggggaaattcccaaggcccgtttgtccagggcccccaggtttctccctaaggaaaaacaggttttggccccagtgttccactttccctagggggggcccggccggccaaaacgaatgggttttagaaagcttcctggagggcccgaagcggcccgccatgttgtggttggattatagggtgtccgtttttaacggagggtttgtgttttatcaagggctgttcagcctccctccttccccctgcggttgaggtaggagggatagggttggggggagggaacaggggctaggaaggggcagactgcagctgccccttggtagacatattccagtgcagtgccaatggtgcgcatgtccaggctcgatgctccgagcccagttctccacatccccaatttccttgagtgcctggttgaagttctccaccatttccgatccactggcctgtctgcttggcaaattgggcagcctggacctgtagggtcttcacctcatggtccagctttctctggttcatgtaggcctgggccacacccacattgaggtgatccaccaaagcttctgtcaggcaggtcgctgcagtgatagcctctcgcctcctctttttcagggacgccaggaagtcagcggcagcgcccaggactcctgactcccaggcactctttctccactactcggccgcagaatcggtaactccgagatttccagcccggactcaggaaacaagtgccccacctccgttccggtggtttcaggcctccaagaagcccatctctggggggttccccacaccctcctccctccagagacgctccttcccgccgccaggacgagaggctcccagggccaatccc

SEQ ID NO: 15409 - DNA, 1471 bp, Homo Sapiens
  misc_feature (1349)..(1425): n is a, c, g, or t
tctagaggatcctcacactgggttcgagttcgtgccagcgagcctctcgccttcaagcccctgtcttgttgctgccccacactccactttctttgaccccattgttctgctgccctgtgacctgcccaaagttgtgtcccgagctgagaacctttccgttcctgtcattggagcccttcttcgattcaaccaagccatcctggtatcccggcatgacccggcttctcgacgcagagtggtggaggaggtccgaaggcgggccacctcaggaggcaagtggccgcaggtgctattctttcccgagggcacctgttccaacaagaaggctttgcttaagttcaaaccaggagccttcatcgcaggggtgcctgtgcagcctgtcctcatccgctaccccaacagtctggacaccaccagctgggcatggaggggtcctggagtactcaaagtcctctggctcacagcctctcagccctgcagcattgtggatgtggagttccttcctgtgtatcaccccagccctgaggagagcagggaccccaccctctatgccaacaatgttcagagggtcatggcacaggctctgggcattccagccaccgaatgtgagtttgtagggagcttacctgtgattgtggtgggccggctgaaggtggcgttggaaccacagctctgggaactgggaaaagtgcttcggaaggctgggctgtccgctggctatgtggacgctggggcagagccaggccggagtcgaatgatcagccaggaagagtttgccaggcagctacagctctctgatcctcagacggtggctggtgcctttggctacttccagcaggataccaagggtttggtggacttccgagatgtggcccttgcactagcagctctggatgggggcaggagcctggaagagctaactcgtctggcctttgagctctttgctgaagagcaagcagagggtcccaaccgcctgctgtacaaagacggcttcagcaccatcctgcacctgctgctgggttcaccccaccctgctgccacagctttgcatgctgagctgtgccaggcaggatccagccaaggcctctccctctgtcagttccagaacttctccctccatgacccactctatgggaaactcttcagcacctacctgcgccccccacacacctctcgaggcacctcccagacaccaaatgcctcatccccaggcaaccccactgctctggccaatgggactgtgcaagcacccaagcagaagggagactgagtgcctcagcctctcaccccctcctcctcagggcagcgctaggggcctcccctatgcctcagccccatctctgctcctnnnnnnnnnnnnnnnnnnnnnnnnnnnnnnnnnnnnnnnnnnnnnnnnnnnnnnnnnnnnnnnnnnnnnnnnnnnnnaaaaaactattttatatataaatataaatctatatctatatctatt

SEQ ID NO: 15410 - DNA, 379 bp, Homo Sapiens
cgtgaagatcggcgacatggtctctcggcgtgtgcagtgtggagcttcggcgtgtgcgtgaagatcgcgattacggtctggagattcggcgtgtgcatgcacacgccgaaagcccatacacctctcgaggcacctcccagacaccaaatgcctcatccccaggcaaccccactgctctggccaatgggactgtgcaagcacccaagcagaagggagactgagtgcctcagcctctcaccccctcctcctcagggcagcgctaggggcctcccctatgcctcagccccatctctgctcctgtttgaattttgttattgttgtttggtagttgtttttcttaagttgatttaattttttgtctggatactcggcgtgtgca

SEQ ID NO: 15411 - DNA, 697 bp, Homo Sapiens
ccctgggacaatccctttatagtagttgtccttttagagaactgaccagaactccctccaacaccttctctctgtcccagccctcagaatctaagactggttgactaatggtgttaatttatatgtcacttgccaacagtccctccccactttgaggccagttcttcactacagtgtctccattcctgactttttttgcccagagttgtcacactgcccttcaccccctttgaactctctcacctccaatgacaggaacggaaaggttctcagctcgggacacaactttgggcaggtcacagggcagcagaacaatggggtcaaagaaagtggagtgtggggcagcaacaaggacaggggcttgaaggcgagaggctcgctggccacgaacgcgaatccggaggaagcccagcaggaaaaacagcaggcggctcaggcctagcaccccgttgtggcacacagtcttcctccatcctgtaattggctcctgaagctgctcctcactaagaccggccacttgaagccaggcaaagggccagaggagaaagaggacgataaaggccagaagcactcggatgggggccagcaatgcccccaggaggcagaacttaaccctctggaggcgagagagatgtaactcatgcacgaaggggttgggggatgctgggggtccgggggcccccctagatcccacccc

SEQ ID NO: 15412 - DNA, 1319 bp, Homo Sapiens
  misc_feature (1088)..(1192): n is a, c, g, or t
  misc_feature (1194)..(1199): n is a, c, g, or t
gggtggcaggagcaggatggcggcggcggcggctgcaggcgaggcgcgccgggtgctggtgtacggcggcaggggcgctctgggttctcgatgcgtgcaggcttttcgggcccgcaactggtgggttgccagagcccggggcagccgccatcgctgtgctcccggttaccctggataccccgatgaacaggaaatcaatgcctgaggctgacttcagctcctggacacccttagaattcctagttgaaactttccatgactggatcacagggaaaaaccgaccgagctcaggaagcctaatccaggtggtaaccacagaaggaaggacggaactcaccccagcatatttttaggcctcatctcactgcctatgaggggcctgccagaaaagtcactaacctgtctcagtgtggccttgtccagccttgtgttttctgtaacccctgtttgtggtacgagataatgagtcctatttttctctcacataatatgcatttgctctcctaggacagtgtaatacatttatgtgaagtaaagacatgcgagactggtggcctgcaaatagcatccgttgatctgtgttaactgcatagggagggctctgcatagcacctgctatagcggtgtcatgttggatcgcttttgtgactgttcatctgtccttgacagtggctgtcatcttgactactttgttgatttgttggtattggggacattttaaaggctgagttatttttgaatgtcatgtttatgtcatagacgtagttttcgcatccttgaattaaactgccttaactccttttgtggtataagcaaaactaccatggactctgtcctggtatccttttcctgtgtggttgccccgtgtcctctggcctagggttaagtgtgcaagataactactcgtgagtattcagaatgttgttcctaataaatgcacttgttgtctgtcttctttaatcaaatcacatcttatatacagcagtcagagatgagtatactagaatcatggattgctggaggtcttttaatctgatgttctcagaagggggtggatttaaatcctgaaataaatatttcaacacaannnnnnnnnnnnnnnnnnnnnnnnnnnnnnnnnnnnnnnnnnnnnnnnnnnnnnnnnnnnnnnnnnnnnnnnnnnnnnnnnnnnnnnnnnnnnnnnnnnnnnnnnannnnnntttgggcgcccgccctccccccccaaaaaaatttttttaaaccctttcttttgggcgccccgcggccccaaagggaaaggaaaaatgggccaaatttgtttcccaaaagaaaacccgggc

SEQ ID NO: 15413 - DNA, 1128 bp, Homo Sapiens
  misc_feature (486)..(486): n is a, c, g, or t
aagaaagaacccatttcctcaaaaaaggggatgccaatcacatgaaccgcgggtaataagtcaggggcttatgccagagccctcccctattccatgttgaccccagattggccggatggttattttccaggcccaccagtcttggcaagtattttacttcccataaaagtatttccacggtcctaggagagcaaaagcatattatgtgagagaaaaataggactcattatgtagtaccacaactagggggttacagaaaacactaggatggtcaaggcctcattgagacaggttagtgacttttctggcaggcccctcataggcactgagatgaggcctaaaaatatgctggggagagttccgtcattccttctgtggttgccacgtggattaggcttcctgagctcggtcggtttttccctgtgatccagtcatggaaagtttcaactaggaattctaagggtgtccaggagctgaagtcagccntcaggcattgatttcctgttcatcggggtatccagggtaaccgggagcacagcgatggcggctgccccgggcggcatgccgctgttcttcccagccaggctctggcagagctggtgaacagcacccttggccatgccgtacccgatcataccaggagtcccatccagggcagcctttgcgccagccaaggttaggaggcctccttccttgagatgcttggtagccagatggctggagatggtcgatgtccatatgctctgcttccacatcaggtcacagttcttaaagagagacttggatttggcattgcccccggcccatcctccagcaacgcaaagaattgcatccaccttctcttcacccaagagctttccaacctcagcagtcacctggtcagcctgctcagtgaacgagtctgtcattttaacaatgatgctagcgctggcctcgtgtcattctcacaccacatcaacgctgggcatacccaccagttgcgggcccgaaaagcctgcacgcatcgagaacccagagcgccactgccgccgtacaccagcagcccggcgcgcctcgcctgcaacccccaccacgccatcctgcgccccctcgtgccgattagccacgcagcccgtactatggccgata

SEQ ID NO: 15414 - DNA, 1034 bp, Homo Sapiens
ttttttttagaaacaatattgttttaatgttgtcttctttgttttttagtcatttcaattgtaaaatcaactgaaacttaggttctcgccatctatataaaaactgagagaggaggcctcagattgtatgcagtgccacggaaagcactgtgtgcatattatatttaatgcaatacagatactttagctttaattttaaaacaaaactcaagaaatctttatctccaccaaagaagaatacagcatttgcatgataatatagttgtggtagcagtagtggaaaaacaagatacagccacatagacagcagtatgtaaaagggaagaaccttgtcaaacccatctcttaatctactttttgtgtcagtgataaggaaggaaaaaggtaaaaatacagtatacttcacgaaacatcatccactcaaaaaagtgtctggaaaaagtacaggagagagaatggaaccattcgcaaatgtgaaaaacacatatatcagcgaaacatatgcagttctcaatgcagttacataggaaatgagtttcagaacatgatctgattctcatattagcaccggtgtattattcaagttgtcagttgaccgctttttctactcctttcccaattttgtggctaatagactaaatacacctaataacaataaggacgaagtagcccatttaagaaacttgaattaaattctgagttcatctacatctatgtgttaattcaccttttgaatgagtggttgtgaatagcctaacgcccccttggggaagaaactgttcccacctacttggtactgtgaacccagattaagcgcagaatgaattcggcattggatgtcggacacgacttggcacttggggagatatcctcgtggtatggaaagtaagctgtgtcggaagccttaccaactttagccgattcgcgtccgaaaatctgcttgtctaaacctgcccttaatacacattcccctcaactaggcctcacggggcatggttaccgcccgttgaacagttcatgaaaatgtatcaact

SEQ ID NO: 15415 - DNA, 1046 bp, Homo Sapiens
  misc_feature (533)..(577): n is a, c, g, or t
  misc_feature (1023)..(1023): n is a, c, g, or t
  misc_feature (1033)..(1033): n is a, c, g, or t
cgcggggctgtccgcggtcgcgccgggctccgcctgcagtgtggcccgtccggacagtccctcaccccggcctgcgctgctgcgtggactcgggcctcaggaattccgctgcggcccaaggcttgccgtttgacgaggagcagtcgcggtaggcggtgggcaaggctgccctgggcggaggccgaggcgcggctcggactccagcatggcgaccgcggtgcgcgctgtgggctgcctccccgtgctgtgtagcgggacggcaggtcatttattggggaggcagtgttccctaaacaccttaccagcagcttccattttggcatggaagagtgttctcggcaatggccatttgtcatcactgggaaccagagacacccacccctacgccagcttgagccgtgcactgcagacacaatgctgtatttcttctcccagtcacctgatgagccagcagtatagaccatagagtttcttcactaaattgactgcagatgagctgtggaaaggcgctttagcagagactggtgctggannnnnnnnnnnnnnnnnnnnnnnnnnnnnnnnnnnnnnnnnnnnnttctggaaaacgcccagagatttaatcaggctcagtcgggggaatattcagagcacagtgatgttagacaaacagaaagagcttgacagtaaagtcagaaatgtgaaggacaaggttatgtgtatagagcatgaaatcaagagcctggaagatttacaagatgaatatgacttcaaatgcaaaaccttgcagaacagagaacacgagaccaatggtgtggcaaagagtgatcagaaacaagaacagctgttactcaagaagatgtatttaatgcttgacaataagagaaaggaagtagttcacaaaataattagagttgctgaatgtcactgaacttacccagaatgccctgattaatgatgaactagtggagttggaagcggagaccagcagagcccctgtattgggggggccgcccattgccttgcctggattcagctgccagnactgggttcnctatagttgccgg

SEQ ID NO: 15416 - DNA, 759 bp, Homo Sapiens
  misc_feature (476)..(476): n is a, c, g, or t
  misc_feature (479)..(479): n is a, c, g, or t
  misc_feature (650)..(673): n is a, c, g, or t
gggtccgcttccggtagtgagaacccttccggtgggctaggtactgagcgcgcgaggctctacagagtgaaggtttaaatccaaggtcatggcaaaacatctgaagttcatcgccaggactgtgatggtacaggaagggaacgtggaaagcgcatacaggaccctaaacagaatcctcactatggatgggctcattgaggacattaagcatcggcggtattatgagaagccatgccgccggcgacagagggaaagctatgaaaggtgccggcggatctacaacatggaaatggctcgcaagatcaacttcttgatgcgaaagaatcgggcagatccgtggcagggctgctgaggcctgtgggtgggacacccagtgcgaaaccctcatccagttttctctccatctcttttctttgtacaatcccatttcctattaccattctctgcaataaactcaaatcacatgtctgccaaanaantaaccaaatcaaaaataaaacccctggtcggccgccctcggcccttcaaaaacttttctaaaaaccctttcctttggggccccgggcccccaaaggtaaagtggaacatgggcccataacttgtttcccaaaggaaaaccctgggccttgaactaagggccttgggaattnnnnnnnnnnnnnnnnnnnnnnnngggggggcaaacccggaaggctttcctggaacaaaaatcccaaaagtggaagttttccggaagggcctttttacctgggatttttc

SEQ ID NO: 15417 - DNA, 858 bp, Homo Sapiens
gcgcgaggtgaggagttgtgcagggtatggggaaaggaaggctggcttggcgagagggcaggtttgcgggctttcgcccccttttccaaagaccaacaaagagtccttccccaactcccaactcaaccccttttggaactatgtgtggtggttgggaccctgtggcgcatccttgtcgctcgtgtccttctcatgcccggcgacgcgtctttgtggtaacgccctgctgccatctcttttcttctctatgcgaggatttggactggcagtgagaataagagacaacgattcacgtctactttctaggatgacttccatgtgctccatctcgcgcgtccctgagcatgttgaatttccaaatcctaaataagccgcgcggtgtagtttgtattatgttgcgtttctctttctgctttcctcgccctttctccatcatcctttaggctctacagagtgaaggtttaaatccaaggtcatggcaaaacatctgaagttcatcgccaggactgtgatggtacaggaagggaacgtggaaagcgcatacaggaccctaaacagaatcctcactatggatgggctcattgaggacattaagcatcggcggtattatgagaagccatgccgccggcgacagagggaaagctatgaaaggtgccggcggatctacaacatggaaatggctcgcaagatcagcttcttgatgcgaaagaatcgggcagatccgtggcagggctgctgaggcctgtgggtgggacacccagtgcgaaaccctcatccagttttctttccatctcttttctttggacaatcccatttcctattaccattctctgcaataaactcaaatcacatgtctgc

SEQ ID NO: 15418 - DNA, 2194 bp, Homo Sapiens
  misc_feature (1891)..(1891): n is a, c, g, or t
  misc_feature (2014)..(2015): n is a, c, g, or t
  misc_feature (2054)..(2054): n is a, c, g, or t
cgcgggggcgggcgcgcaccgggagcgcgtcggaggcgagtggaactggatcgggtttgctgccagcggcatgagcttcggccgccattttacaacagctccactcgcgccggacacagggagcagcgagcacgcgtttcccgcaacccgataccatcggacaggatttctccgcctcagcccaacggggagatctctggaaacatggctacagaacatgttaatggaaatggtactgaagagcccatggatactacttctgcagttatccattcagaaaattttcagacattgcttgatgctggtttaccacagaaagttgctgaaaaactagatgaaatttacgttgcagggctagttgcacatagtgatttagatgaaagagctattgaagctttaaaagaattcaatgaagacggtgcattggcagttcttcaacagtttaaagacagtgatctctctcatgttcagaacaaaagtgcctttttatgtggagtcatgaagacttacaggcagagagaaaaacaagggaccaaagtagcagattctagtaaaggaccagatgaggcaaaaattaaggcactcttggaaagaacaggctacacacttgatgtgaccactggacagaggaagtatggaggaccacctccagattccgtttattcaggtcagcagccttctgttggcactgagatatttgtgggaaagatcccaagagatctatttgaggatgaacttgttccattatttgagaaagctggacctatatgggatcttcgtctaatgatggatccacctcactggtctcaatagaggttatgcgtttgtcactttttgtacaaaagaagcagctcaggaggctgttaaactgtataataatcatgaaattcgttctggaaaacatattggtgtctgcatctcagttgccaacaataggctttttgtgggctctattcctaagagtaaaaccaaggaacagattcttgaagaatttagcaaagtaacagagggtcttacagacgtcattttataccaccaaccggatgacaagaaaaaaaacagaggcttttgctttcttgaatatgaagatcacaaaacagctgcccaggcaaggcgtaggttaatgagtggtaaagtcaaggtctgggggaatgttggaactgttgaatgggctgatcctatagaagatcctgatcctgaggttatggcaaaggtaaaagtgctgtttgtacgcaaccttgccaatactgtaacagaagagattttagaaaaggcatttagtcagtttgggaaactggaacgagtgaagaagttaaaagattatgcgttcattcattttgatgagcgagatggtgctgtcaaggctatggaagaaatgaatggcaaagacttggagggagaaaatattgaaattgtttttgccaagccaccagatcagaaaaggaaagaaagaaaagctcagaggcaagcagcaaaaaatcaaatgtatgacgataactactattatggtacacctcatatgccccctccaacaagaggtcgagggcgtggaggtagaggtggttactggatatcctaccagattattatggatatgaagattattatgattattatggttatgattaccataactatcgtggtggatatgaagatccatactatggttatgaagattttcaagttggagctagaggaaggggtggtagaggagcaaggggtgctgctccatccagaggtcgtggggctgctcctccccgcggtagagccggttattcacagagaggaggtcctggatcagcaagaggcgttcgaggtgcgagaggaggtgcccaacaacaaagaggccgcggggtacgtggtgcgaggggtggccgcggtggaaatgtangaggaaagcgcaaagctgatgggtacaaccagccagattccaagcggcgccagaccaataatcagaactggggctcccaacccattgctcagcaccggctcccaaggtggtgatcattctggnntactatggttacaaatctgaaaaccaggagttttatcanggatacttttggcccacaagtggaagtagaaacagtagggcctctgtaaaaatggaaaactggaaaggttgatccagaaactcaccctaaatcctgacggggggcccctataatttggggccttcgggcaggatttcccc

SEQ ID NO: 15419 - DNA, 538 bp, Homo Sapiens
ggtacccgctttgatgatggaagtgtagtcctaacctactgcacagctgggaccccctgcccctagatcccaatactggggatgggaggaccttgcactattcccctcagtccatctatcgaggtctttgcaggaagcatactgggaattgaaacgagagcctaaatgacatctaagaaaggcagtgttcaataccaggtattaggtgaggatgggattctaaggacatcagtgggaggcagggagccaccttcagacctcagcatggaagcttccaagatccagaggaagaggcaacagcactgagagtcataggtagaagaatcatcacagccctgctaaccaggcagctgatgcccctctcccctggctccctgtgtccaaatcctacaggggcatctgttggctgaactcaacctgaagccaaagagaagatgagtggagagaggcaacatttatagagctcaggtttctagggctggagagggatctggagggacacacaggagacacctggcataaccaaaaaaatgattaa

SEQ ID NO: 15420 - DNA, 627 bp, Homo Sapiens
ataatcagtccacacattaacaaagatgaggatgtgcagcgggacctggagcacagcctgcagatggaagcttacgagaggaggattcggaggctggaacaggagaagctggagctgagcaggaagctgcaagagtccacccagaccgtgcagtccctccacggctcatctcgggccctcagcaattcaaaccgagataaagaaatcaaaaagctaaatgaagaaatcgaacgcttgaagaataaaatagcagattcaaacaggctggagcgacagcttgaggacacagtggcgcttcgccaagagcgtgaggactccacgcagcggctgcgggggctggagaaacagcaccgcgtggtccggcaggagaaggaggagctgcacaagcaactggttgaagcctcagagcggttgaaatcccaggccaagtcggcactgagtggcccagcaccgcctagccctgccaccccactgccctcctgggccttttgctggatgggcacctggggggttctggtttttacttttttaatgtaagtctcagtctttgtaattaattattgaattgtgagaacatttttgaacaatttacctgtcaataaagcagaagacggcagttttaaagtt

SEQ ID NO: 15421 - DNA, 458 bp, Homo Sapiens
gtatgatcacgtagacccacccaacacactcctgcacactggccccggcccacggcacagcaatcccctgcgcgtggatttcacctcaccctttgtaccagatgttgagtgaccagctctgtggccctgtgtcgtcagaggcttgtgattaactgtggcggcagacacagcttgtccacagcttgggccaggcttcccctgtcctcccaccggtcggctgcttggcaaggctgttcaggacgtgcacttccccaagtcggcactgagtggcccagcaccacctagccctgccaccccactgccctcctgggccttctgctggatgggcacctggggggttctggtttttacttttttaatgtaagtctcagtctttgtaattaattattgaattgtgagaacatttttgaacaatttacctgtcaataaagcagaagacggcagttttaaagttaaaa

SEQ ID NO: 15422 - DNA, 1404 bp, Homo Sapiens
gcgctgccgatcgccgggaggacccccgcctcgccgaagacgggcggggcaagccgagcctcacggggtccccggagctgggccgggcctccagatggagaaggcgcaacggggagttcttgagtaagccagagcggtgtccagcgcggtgtagccgcagccgccgctgtcaggcgcagcaacgggcaaccccgtagaagtcggtcggcaggtcctctccaacccgccgctaccgcgccgctgtgggagagaccccagcaggagcccaaaggcagctacgggggcgcgaaggccgctggcgccgcctcggccagcccttcccgcgcggttccactgccttaaggatgacagtcgtagggaaccctcgaagttggagctgccagtggttgccaatcctgatactgttgctgggcacaggccatgggccagggtggaaggcgtgacacactacaaggccggcgaccctgttattctgtatgtcaacaaagtgggaccctaccataaccctcaggaaacttaccactactatcagcttccagtctgctgccctgagaagatacgtcacaaaagccttagcctgggtgaagtgctggatggggaccgaatggctgagtctttgtatgagatccgctttcgggaaaacgtggagaagagaattctgtgccacatgcagctcagttctgcacaggtggagcagctgcgccaggccattgaagaactgtactactttgaatttgtggtagatgacttgccaatccggggctttgtgggctacatggaggagagtggtttcctgccacacagccacaagataggactctggacccatttggacttccacctagaattccatggagaccgaattatatttgccaatgtttcagtgcgggacgtcaagccccacagcttggatgggttacgacctgacgagttcctaggccttacccacacttatagcgtgcgctggtctgagacttcagtggagcgtcggagtgacaggcgccgtggtgacgatggtggtttctttcctcgaacactggaaatccattggttgtccatcatcaactccatggtgcttgtgtttttactggtgggttttgtggctgtcattctaatgcgtgtgcttcggaatgacctggctcggtacaacttagatgaggagaccacctctgcaggttctggtgatgactttgaccagggtgacaatggctggaaaattatccatacagatgtcttccgcttccacaccataccgaggatctgctctgtgcatggtgcttgggagttgggttgccaagtatctggcccttggcacttggagatatagtccatggcactgctggggcatgttcaatgtggaccgatatgggggcattaacataagcagcatcttgtagatggacg

SEQ ID NO: 15423 - DNA, 419 bp, Homo Sapiens
aaccacctggaagcaatgggctgtactacttcaggaaaagttgtctggggctgtgaaagtttttgaagacaaagtccagggccaaatctaaagcagcacacaatcctcgtccttgactacctgcgctcccacgatgccattgcccccgtagaagttcttggcatacatgtgcatcgatcctcctttccctttagcacaacctccttttcgtcctggaaatggcagaacatacacatgtgcagaacaaaccaactctacaaagcaaaccaaaccgcaccccaaatatgtactctgaggctcaaccattagaacacagaggccagttcagtcgtctaagtacctgtccctccaggcaaacacatgtttctccttgtcctttcactagttccatgtgtttcctgttggctgggggtcctcaa

SEQ ID NO: 15424 - DNA, 1498 bp, Homo Sapiens
ggcagaggcggtgcgactgaggcgtggcgtctgctggggcacctgaaggagacttgggggcacccgcgtcgtgcctcctgggttgtgaggagtcgccgctgccgccactgcctgtgcttcatgaggaagatgctcgccgccgtctcccgcgtgctgtctggcgcttctcagaagccggcaagcagagtgctggtagcatcccgtaattttgcaaatgatgctacatttgaaattaagaaatgtgaccttcaccggctggaagaaggccctcctgtcacaacagtgctcaccagggaggatgggctcaaatactacaggatgatgcagactgtacgccgaatggagttgaaagcagatcagctgtataaacagaaaattattcgtggtttctgtcacttgtgtgatggtcaggaagcttgctgtgtgggcctggaggccggcatcaaccccacagaccatctcatcacagcctaccgggctcacggctttactttcacccggggcctttccgtccgagaaattctcgcagagcttacaggacgaaaaggaggttgtgctaaagggaaaggaggatcgatgcacatgtatgccaagaacttctacgggggcaatggcatcgtgggagcgcaggtgcccctgggcgctgggattgctctagcctgtaagtataatggaaaaagatgaggtctgcctgactttatatggcgatggtgctgctaaccagggccagatattcgaagcttacaacatggcagctttgtggaaattaccttgtattttcatctgtgagaataatcgctatggaatgggaacgtctgttgagagagcggcagccagcactgattactacaagagaggcgatttcattcctgggctgagagtggatggaatggatatcctgtgcgtccgagaggcaacaaggtttgctgctgcctattgtagatctgggaaggggcccatcctgatggagctgcagacttaccgttaccacggacacagtatgagtgaccctggagtcagttaccgtacacgagaagaaattcaggaagtaagaagtaagagtgaccctattatgcttctcaaggacaggatggtgaacagcaatcttgccagtgtggaagaactaaaggaaattgatgtggaagtgaggaaggagattgaggatgctgcccagtttgccacggccgatcctgagccacctttggaagagctgggctaccacatctactccagcgacccaccttttgaagttcgtggtgccaatcagtggatcaagtttaagtcagtcagttaaggggaggagaaggagaggttataccttcagggggctaccagacagtgttctcaacttggttaaggaggaagaaaacccagtcaatgaaattcaatgaaattcttggaaacttccattaagtgtgtagattgagcaggtagtaattgcatgcagtttgtacattagtgcattaaaagatgaattattgagtgcttaaagattaaa

SEQ ID NO: 15425 - DNA, 1152 bp, Homo Sapiens
  misc_feature (493)..(493): n is a, c, g, or t
  misc_feature (509)..(509): n is a, c, g, or t
  misc_feature (514)..(515): n is a, c, g, or t
  misc_feature (526)..(526): n is a, c, g, or t
gggagaataggagcaagccagcactagtcagctaactaagtgactcaaccaaggccttttttccttgttatctttgcagatacttcattttcttagcgtttctggagattacaacatcctgcggttccgtttctgggaactttactgatttaactcccccctcacacaaataagcattgattcctgcatttctgaagatctcaagatctggactaccgtagaaaaaatttccagtgaggctcacttatgtctgtaaagatgggaaaaaaatacaagaacattgttctactaaaaggattagaggtcatcaatgattatcattttagaatggttaagtccttactgagcaacgatttaaaacttaatttaaaaatgagagaagagtatgacaaaattcagatggctgactggatggaagaaaagttccgaggtgatgctggtttgggcaaactaataaaaattttcgaagatataccaacgcttgaagacctgnctgaaactcttaaaanagaannagttaaagtanaaggaccagccctatcaagaaagaggaagaaggaagtggatgctacttcacctgcaccctccacaagcagcactgtcaaaactgaaggagcagaggcaactcctggagctcagaaaagaaaaaaatcaaccaaagaaaaggctggacccaaagggagtaaggtgtccgaggaacagactcagcctccctctcctgcaggagccggcatgtccacagccatgggccgttccccatctcccaagacctcattgtcagctccacccaacacttcttcaactgagaacccgaaaacagtggccaaatgtcaggtaactcccagaagaaatgttctccaaaaacgcccagtgatagtgaaggtactgagtacaacaaagccatttgaatatgagaccccagaaatggagaaaaaaataatgtttcatgctacagtggctacacagacacagttcttccatgtgaaggttttaaacaccagcttgaaggagaaattcaatggaaagaaaatcatcatcatatcagattatttggaatatgatagtctcctagaggtcaatgaagaatctactgcatctgaagctggtcctaaccaaaaatttgaggatggtccggcacagcggggatcctcg

SEQ ID NO: 15426 - DNA, 806 bp, Homo Sapiens
gggagtgtttattaggggtacatgtgaagccgtccagaagtgtcagagtctttgtagctttgaaagtcacctaggttatttgggcatgctctcctgagtcctctgctagttaagctctctgaaaagaaggtggcagacccggtttgctgatcgccccagggatcaggaggctgatcccaaagttgtcagatggagagtaaatacaaggagatactcttgctaacaggcctggataacatcactgatgaggaactggataggtttaagttctttctttcagacgagtttaatattgccacaggcaaactacatactgcaaacagaatacaagtagctaccttgatgattcaaaatgctggggcggtgtctgcagtgatgaagaccattcgtatttttcagaagttgaattatatgcttttggcaaaacgtcttcaggaggagaaggagaaagttgataagcaatacaaatcggtaacaaaaccaaagccactaagtcaagctgaaatgagtcctgctgcatctgcagccatcagaaatgatgtcgcaaagcaacgtgctgcaccaaaagtctctcctcatgttaagcctgaacagaaacagatggtggcccagcaggaatctatcagagaaggggtttcagaagcgctgtttgccagctatgggactgaaaagcaaagaagcccttcccggtttgaaaaccccaagaaggcaagccaggaagaggttttcatggctaacgggggcctacaggaaaagggaattccttcctttggaaaaaggtttttttataaccccggcttggaaat

SEQ ID NO: 15427 - DNA, 935 bp, Homo Sapiens
  misc_feature (222)..(318): n is a, c, g, or t
gggacgcctggaaaacgctcttctgagaggatctgtggaggtcaacccaggagagagaagacaggactgaagcactgaaagggtcctgccgttaagggcgcaggattgtatagaatatataatagcagtagcagctctgtttacggagcattaaccttacgtggagttatttcctgcatttcctcctttcgtctttacaaggtagccgtttggcgtcgtgannnnnnnnnnnnnnnnnnnnnnnnnnnnnnnnnnnnnnnnnnnnnnnnnnnnnnnnnnnnnnnnnnnnnnnnnnnnnnnnnnnnnnnnnnnnnnnnntgagccaccgtgcctggctgagaagatggatttaagacatattttggaggtaacattgtcaggacttcctgaaggattagatgtggaagggaaggataagaaacagaccaaggataactttcaaatgtatgcttaagcaactggatggataatgatgccattgagtgagtgaaaaacttgatggaagtggaagattcagagttcatttctatctaggttaatttgagacataccagagcataagttaagtaagtaattgaatattggagtggagacttatttgtctaccgaattattgttttctttgtcggacatacacctacactgcattcctcaaagtaaaatttaagtgtggctctgtgcctatgctctccccagcggaaagtgaccagaagaggtgtgcagtttccaggcctggcccatacagacctccaacaggtgctcccctgtgctgttactccttctgccaactggaagcagatggtgaccaggctctggagaaggcaaggcctgaagatgggagattcctaagtggaggagaactgtgccttactgacctaaatatccactcagtattgttatgtgagaataaataaacttgtgttgaccgtttaaaa

SEQ ID NO: 15428 - DNA, 606 bp, Homo Sapiens
acgcggcgaagtgccaagggaggtgaatcacttgaactcaggggttggagagcagccggggcaatgtggagagacccaatctctcagcatcctgtttatgttcttcttagcatcagactcgggctttttcctgtttattacctacttcgttttcctgaaagatccatgtgccggtaccatgtgttgttcctactgtttctccaatgtctagtagatttggcacatactgatgtgcaattaatacgtgaatgaagaaccattgacagacgattagtcaaaagctcttgcaaagccctttgataggttatcggtggagagtagggagcacaaacctggggtcccattctagcttgaccacttctcggctgtgcacaaactagtctagctctcctgagcctcagttacctattttgcaaattagggatgggaacatccatacctcacgacgccaaacggctaccttgtaaagacgaaaggaggaaatgcaggaaataactccacgtaaggttaatgctccgtaaacagagctgctactgctattatatattctatacaatcctgcgcccttaacggcaggacccttcagtgcttcagtcctgctctgcc

SEQ ID NO: 15429 - DNA, 1260 bp, Homo Sapiens
  misc_feature (1193)..(1193): n is a, c, g, or t
  misc_feature (1198)..(1198): n is a, c, g, or t
tatgtttgcaacatcacccttcatgtccaatccttgatagacacggttcattcttaacttagaagggttctgttcttgatccaatacggtttgcattgtgttcacaccttctttcaaatattccggcttaacttgcgttataatgagccgcctgttgccaccttcgttcagtgtgaagccctgaaggtgggtctccccgaatgctttcacttcctttgcttgtgtcaaataaagaataataacatagatgccgcaatagaaaacatggaaaatatgcttacttcagagaataaagtcagtgaaccccaatacttcggcttggcatacttattcagaaaagtaatagaggagcagttggaaccagcagttgaaaagataagcatcatggcggagagattggccaatcagtttgcaatttataaacctgtcactgattttttccttcaacttgtggatgcaggcaaggtggatgatgccagagctctcctacagagatgtggtgcaattgctgaacaaaccccgattttgttgttgttcctccttaggaattctaggaaacaaggaaaggcatcaactgtgaaatctgtgttagaattgattcctgaattaaatgaaaaggaagaagcatacaattccctcatgaaaagctatgtctcagagaaagatgtcacatctgctaaagcactgtatgaacatttgactgcaaagaatacaaaattggatgatctgtttctaaagcgttacgcatctttgctgaagtatgctggagagcctgtccctttcattgaaccccctgaaagctttgaattttatgcacagcagctaagaaaattgagggaaaactcttcttgaaataaccaggcgatactttgttttgtatatatttgtgattctgtgtctacatgttattttgaagtatatctgagggaaaaataaatgaaaattttctttatgtacttatgtatgtgtgatgcatgttcaaagtcttattgaccataactctgtgcacttggttattggacatttttggagtttttttctctgggaaaaatcgatagtgttttcttcaatgctgctgctgtgtgaagccatactttttcaggattctttcccctaattggctctttggtttccctgcctctgtttcatttatttcattaaaatgttattccttttatttaagattccaaccntcctnattcataccatactattaatatcctcacccaagacccccccataatccatcccacccaatca

SEQ ID NO: 15430 - DNA, 523 bp, Homo Sapiens
caatagtgcattaaatttaataggtagttctgttataattattgtgaaaatttttaatatagtgttgatttgtcagtgttctaattcactgttaatttgcggttttcataatattacctttatgtaatttcctaggcatcaactgtgaaatctgtgttagaattgattcctgaattaaatgaaaaggaagaagcatacaattccctcatgaaaagctatgtctcagagaaagatgtcacatctgctaaagcactgtatgaacatttgactgcaaagaatacaaaattggatgatctgtttctaaagcgttacgcatctttgctgaagtatgctggagagcctgtccctttcattgaaccccctgaaagctttgaattttatgcacagcagctaagaaaattgagggaaaactcttcttgaaataaccaggcgatactttgttttgtatatatttgtgattctgtgtctacatgttattttgaagtatatctgagggaaaaataaatgaaaattttctttatgt

SEQ ID NO: 15431 - DNA, 839 bp, Homo Sapiens
gggactggacagggcagctgctgggttgctactctcgcctccgccatgattccgcccgcagactctttgctcaagtacgacaccccagtgctggtgagccggaacacggagaaacggagccccaaggctcggctactgaaagtcagcccccagcagcctggaccttcaggttcagccccacagccacccaagaccaagctcccctcaactccctgtgtcccagatcctacaaagcaggcagaagaaatcttgaatgccatactacccccaagggagtgggtggaagacacgcagctatggatccagcaggtgtccagcacccctagcaccaggatggacgtggtgcacctccaggagcagttagacttaaagctgcagcagcggcaggccagggaaacaggcatctgccctgtccgcagggaactctactcacagtgttttgatgagttgatccgggaggtcaccatcaactgtgcggagagggggctgctgctgctgcgagtccgggacgagatccgcatgaccatcgctgcctaccagaccctgtacgagagcagcgtggcgtttggcatgaggaaggcactgcaggctgagcaggggaagtcagacatggagaagaaaatcgcagaattggagacggaaaagagagacctggagaggcaagtgaacgagcagaaggcaaaatgtgaagccactgagaagcgggagagcgagaggcggcaggtggaggagaagaagcacaatgaggagattcagttcctgaaagcgaacaaatcagcagctgaaggcccaactggaaggcattattgcccaaagaagtgataatttccacatgatta

SEQ ID NO: 15432 - DNA, 550 bp, Homo Sapiens
cagggcagctgctgggttgctactctcgcctccgccatgattccgcccgcagactctttgctcaagtacgacaccccagtgctggtgagccggaacacggagaaacggagccccaaggctcggctactgaaagtcagcccccagcagcctggaccttcaggttcagccccacagccacccaagaccaagctcccctcaactccctgtgtcccagatcctacaaagcaggtagaagaaatcttgaatgccatactacccccaaggtaagaaagtaggagcagtggctgggagaaggcctaagcttttacatcgtggattttgggagtgtggggggaggcactctgcctctgttcctggctggggtttcctcccagtatcacagagctcctagaacttacatatggctggatcctggcagggtggtgggagacctcttctcaatctaccctcatttcctgcatgctgtcacccaatctcatggctttagataccacctatgtgctgatggctcccaaatgtgtatttccagccctgtcttctccactaaact

SEQ ID NO: 15433 - DNA, 1319 bp, Homo Sapiens
accatagaggatcctcgtaacaagcctgccgatgggttctgagatgcgcacgagggaggaaattgcttagtccaccatcaagagcctctgcactgtgtagctaacatgggatcgtcacacggagggtggggaggaaatcgattccattctgcctatttgcaaacttctgcccgattggcactgctcctctcacatcaatgcacttctcctgatgctcatgaccagccttcggccatactctctgtagtccacgggcttcacgtccatcacagtggccttaattcgagactcgtcgttgtaggtctccactttgaccctgactctgaatatgaaagatcggaagttggcattctggaaaacttcttcaaatgcctgttcattcttgtcttttaattccccaagataagcagcattttgtccaaggatagcttcagcagactcctggaaacaagtcacccactgattctcttgaaaatctgcaatatttactgacaggatcatgcggtacttgaaattgggaaattcggtgtcgcacttctcacagcggtacaatccattctgttgatcaatcactttcttattgcacgcctgagtcgggcaggcttggtacatgcagttctctttgcgaagatacaccactgtggccacagaactaaagtagtccggcttgtcgccttggcccaggttctcggatttgacctcatacaaggttttccagttggtgttactccctccgactccgccgctctttagatcagagatggaaacaccatctaaggcttgtccttctgcgtcaaaccatccacgaagcttataggcctctgggatgtcaggattcgcaatgatagtgcttgaagacagcacggagaggctccgtccaccgaaatcagagactcgggctcctttgatagccaacacgggctgtctagaaccatcaaatttatcagcatcttccccccacagtgtagcagtcaccaccttcccggatgtgtccatcaagtagatattcctcttggcaacttctctgttgttagacctcactgtgattttagtggcgtcttcatagctcttgcagatcccgatgatgtctacaagtgagtctttcgacttgttctcgaggtcatcaatccccagtgaaatcaaactgaacacgtaggtaaatgatgctcctcctcacaggggcatgacaggtagtctcgtatattgaacgctcatcgtcgtacgtcacttaaaaacaacatagagctgcttgtgttagcaatccttcagggtgtttcttcgcacacaaagaatatacacggtttctctcatgtaaagtc

SEQ ID NO: 15434 - DNA, 1007 bp, Homo Sapiens
  misc_feature (910)..(922): n is a, c, g, or t
aaagtgtaaacgaggagtctcgaattaggcacggtgatggacgtgaagcccgtggactacagagagtatggccgaaggctggtcatgagcatcaggagaagtgcattgatgtgagaggagcagtgccaatcgggcagaagtttgcaaataggcagaatggaatcgatttcctcccacctccgtgtgacgatcccatgttagctacacagtgcagaggctcttgatggtggactaagcaatttcctccctcgtgcgcatctcagaacccatcggtaggcaaaggaaaatacgctcaggtggttgtggtgtagactgtgtcaggcctacggagtcagccagtggctagcgcaagaccagtcactccctctgccttcaggcttctgtcaatttcattatcatcaagcaggaattatgtcgtaagtcactgaccctaactgcagaccatgaagtaaattatgtaactaggtttttgcttctccagtggtgaccacccacccccatccccgctcacaacttgggttcttctcagcggggcgagctgagaagcggtcatgagcacctggggattttagtaagtgtgtcttcctagaattcgaaggctctctctttctagaggtgctacatagttggtaatgcttggaatggcaatagggtagaatgattaatcaaaggcatatcttctatatctgaagagtatccttccttcagggtttaatagactgagtcagatgggtctgatattaatcaaaattgtctcttctgaggaccgctgataagcattgacttgctgtcccctaaggaaatccgagcggctacaaagcgtttctttacttttcacttcaattaatgctgcgcttcgcttggtgagtgcgtactttttctacctgtacacattcctgcattcatgtannnnnnnnnnnnngactaaagctatgttacatggaaaggattttgaagccttttgtttcccccgctttgttttaataaacagtatattatttggttgt

SEQ ID NO: 15435 - DNA, 1133 bp, Homo Sapiens
gggtggtttgggcaacaccgggtgttagaccccagggggggaaaaatagtttttactcccaaagagggccgcaaaaagggagaggatccccggcatgcggaaattaagggttttcaaaccgagaccgggtattataaaaggggcatttcactatttcaggccaaggaaaggggttaaagaagaaggggaaccaaaccgggtgttttagcggggaggaagtatccacaagcgggcggcgcgggcggttaaagattttaggatatatcggaagggttcggtcttgtgagagagtccccgcgggttggtaatagggggttgcccagtttatgtatggagccctctccatggggaggtctgccccttttggtgggagattatgtgttacagggggagcacctttcggggggtgtaccgccccagggcacgtttggtgttattttggagagaggaaatgtcccaagccccgtaaggttcatttggcccagggattttcccttggggaaaccaagttatgcggccatgtttcaccttttcctggtgggggcccggggggccacaacgagatggttttggaaaattttctcgaggggccgaaggcggccgaacaaaacatcggttaagttggagtgctcgtgttaccgggcagtgggttaagaaaggggtggtgtgacctgaacacaccgtggctttattattaacggatgccaaaagcacacttcccagaaccgcgctagaggcgggcgcccagaggcagcaggacactacagctccttcctctggggcagaaaggagggtgcctgggaagttcgagggctgcagtggggaggcagaggtcccagcaacattgtcaatggcaggcagcggcaggaggggcgaggcgtgggcgagtccatgagtccagtgaggcagccggggagctgggacaatgggagttcttggacagagacagcctctagcccaaggaagaacagcctgagccaggccccgaagagtaagtcagaaaagggcaccgagtgtgccagggtggtgcaggcctgattgaggagacaggatatggcacatgtggggacactccaggccaagcacaaagtcacagaggcaggaacacacctgtctcattcaaaaagcagccc

SEQ ID NO: 15436 - DNA, 855 bp, Homo Sapiens
  misc_feature (618)..(618): n is a, c, g, or t
  misc_feature (742)..(743): n is a, c, g, or t
  misc_feature (822)..(822): n is a, c, g, or t
ggggaggccattgtgcgcatcgcggaagccctcagcaagatgaagctgcagcccttcgccacagaggcagatgtggaggaggccctgcggctcttccaagtgtccacgttggatgctgccttgtccggtaccctgtcaggggtggagggcttcaccagccaggaggaccaggagatgctgagccgcatcgagaagcagctcaagcgccgctttgccattggctcccaggtgtctgagcacagcatcatcaaggacttcaccaagcagaaatacccggagcacgccatccacaaggtgctgcagctcatgctgcggcgcggcgagatccagcatcgcatgcagcgcaaggttctctaccgcctcaagtgagtcgcgccgcctcactggactcatggactcgcccacgcctcgcccctcctgccgctgcctgccattgacaatgttgctgggacctctgcctccccactgcagccctcgaacttcccaggcaccctcctttctgccccagaggaaggagctgtagtgtcctgctgcctctgggcgcccgcctctagcgcggttctgggaagtgtgcttttggcatccgttaataataaagccacggtgtgttcagggttncccccccactaatcaaacctcatccacccacacattccgatccccagaataacacaacacactgaacataatctccctctatactcaagacgccgcgccccgtgcttatatcttaaccacacannggttttttgttgggggccttcttgggcctttaagaaatttttctaaaaacccttctttttggggggcggcgggcccccnagggggaaaggagacaaggggcacaaaacgtgt

SEQ ID NO: 15437 - DNA, 996 bp, Homo Sapiens
gataggaaatggtcaatattattattattgataagatgaccattttggagtttagaaaaccattttcaatgcctatgaaataacaactccataagccattcccttaaatccagtagactgaattctcacaagtcctcatcactcatcatttctacatcctgctgatttacaaatacttcttcataccatggtttatgtctttgcttaatatcaaggaggatggattccatggtagagccaaactcaatgatactacgagtctcattttggtaagtataagcaaagccagcagcatgcatggccaccaatgaaccttttgaatcaaacacaggggagccggaagccccaaagaaaaattcagtgtcataggtaatcacatcagggttgtgaactattttctggaaacttctttgagtatacatatggacatactctggactttctgcttttttagactgaacacgttcctgacatttctttgctcgctgaccctgagggatcacagcacaagcatcaatctgctttttttctccatatggatggccaataatatgtatcaacccactaagtggcacaggagtaattccattatatagttccataggtacttgttgtccattttccttcagtttcaggacagcatagtcaagctcttcattatgtatctcaaaccaaggttcaacaaaaaagtagtttgtttccttgtcttttagctcttcataaccaaatgtcacccttacacattgaccaattatggttgcccacttacttggctctattccgtctcccacaatgctatctattacatgccgacaagttaaaatgaacaatcctttaaaaacaaagcaggtggcgtaacccgtagttgcactgtcccagaataagtacccaactgagtcactgagacgtacaagaagtttcactactttaatcgaagaagaattttttgttactttcccaaacgttgttctatgcaattcaaataatgtttcccca

SEQ ID NO: 15438 - DNA, 1270 bp, Homo Sapiens
  misc_feature (1123)..(1138): n is a, c, g, or t
  misc_feature (1166)..(1211): n is a, c, g, or t
ggggttcgggccgggcataaaaggcttcgcggcccagggctcacttggcgctgagaacgcgggtccacgcgtgtgatcgtccgtgcgtctagcctttgcccacgcagctttcagtcatggcctccggtaacgcgcgcatcggaaagccagcccctgacttcaaggccacagcggtggttgatggcgccttcaaagaggtgaagctgtcggactacaaagggaagtacgtggtcctctttttctaccctctggacttcacttttgtgtgccccaccgagatcatcgcgttcagcaaccgtgcagaggacttccgcaagctgggctgtgaagtgctgggcgtctcggtggactctcagttcacccacctggcttggatcaacaccccccggaaagagggaggcttgggccccctgaacatccccctgcttgctgacgtgaccagacgcttgtctgaggattacggcgtgctgaaaacagatgagggcattgcctacaggggcctctttatcatcgatggcaagggtgtccttcgccagatcactgttaatgatttgcctgtgggacgctccgtggatgaggctctgcggctggtccaggccttccagtacacagacgagcatggggaagtttgtcccgctggctggaagcctggcagtgacacgattaagcccaacgtggatgacagcaaggaatatttctccaaacacaattaggctggctaacggatagtgagcttgtgcccctgcctaggtgcctgtgctgggtgtccacctgtgcccccacctgggtgccctatgctgacccaggaaaggccagacctgcccctccaaactccacagtatgggaccctggagggctaggccaaggccttctcatgcctccacctagaagctgaatagtgacgccctcccccaagcccacccagccgcacacaggcctagaggtaaccaataaagtattagggaaaggtgaacattaccggatcggggccacaacggactatagggcgcggcgccacggctcaccgtcaccccatcttccatcatgaaacccaccgacccgcggctccgtccccccccgcaacaactaatctacgcgccttttttttgttatagtggggcgnnnnnnnnnnnnnnnnaaaaaaatttttcaaaaaaattttggtnnnnnnnnnnnnnnnnnnnnnnnnnnnnnnnnnnnnnnnnnnnnnnccatactccggccccccccagaaaaaaccccggggacgaaaaaacaagggggcggggag

SEQ ID NO: 15439 - DNA, 915 bp, Homo Sapiens
gggcacgtcttggttcgggccgggcataaaaggcttcgcggcccagggctcacttggcgctgagaacgcgggtccacgcgtgtgatcgtccgtgcgtctagcctttgcccacgcagctttcagtcatggcctccggtaacgcgcgcatcggaaagccagcccctgacttcaaggccacagcggtggttgatggcgccttcaaagaggtgaagctgtcggactacaaagggaagtacgtggtcctctttttctaccctctggacttcacttttgtgtgccccaccgagatcatcgcgttcagcaaccgtgcagaggacttccgcaagctgggctgtgaagtgctgggcgtctcggtggactctcagttcacccacctggcttggatcaacaccccccggaaaaaagggaggcttgggcccccctgaaacatccccctgcttggctggacgtgaccaagacgcttggtctggaggattaccggcgtgcctgaaaaacagatgaaagggcattggccctaccaggggggccctcctttttattcatccgcatgggccaaaaggggtgggttccctttccgccccaagaatccacctggggttaaattggaatctctggccttggggggggaacacccttcccccggggaattgaaaggctttctgtccggccttggggcccacagggcccttccccgttacacccttaaccgagacccttgggtcggaaatttttgggcccccccctctgggcctggaaaaaacccggggccagcgggacaccttatttcaaggcccccaacggggggaattgtaatcccccccgcgaatttttttcctccaaaaaccccaaatttaagggtggggcctaaaccgggaaaagggggagcctttggtgccccccctgccctaaaggcgt

SEQ ID NO: 15440 - DNA, 328 bp, Homo Sapiens
attttaacaggaacaccacttcaaaataacctaattgagtatcattgtatggttaattttatcaaggaaaatttacttggatccattaaggagttcaggaatagatttataaatccaattcaaaatggtcagtgtgcagattctaccatggtagatgtcagagtgatgaaaaaacgtgctcacattctctatgagatgttatctgataatgtgtctcacaagaatctgttagatcgtttattcttcagttgtactttgaatggtggggtggaagtttcaggtgaacaatggataacaaaaagcaagttatggaagattgtgaagaggt

SEQ ID NO: 15441 - DNA, 952 bp, Homo Sapiens
gtcctccacatcttgcatatatacatgggctccattattatgtttgtcaggataatcaaatgaaaatactagttcagtgatcagcattgaatggttgttaggcagccatgtgctctacactgatttcacctcttgagtataaactttttaaatttaaattggtttacatgaaagtggattaaaaggcctttctaaagaatgggtttgtaaaacctcagtaccctttaatacatgtacatttctttccttttttcatttaatgtaacatgtctgttgtaactatgtttcttaaatattattttaaggttatgtgttctttaattatggtccaatataatttggtcacccaaaatgaaataatagttttatacaagtagctgttactaagtgtgctaaaaatactcattttataattaattttagttttcttagtatattattataaattgttgccctaagtcaggtacaaatgtacacatcaaaatgcccatattgtatctatctgtagtcgtttaatgtgaattatatgtgaatttttttcaaaattttactaaccagaattctgttataggcacctaaccacgcagcatgaggaaaacggcacaacacaatcttgaggtgccttctgaatcatcagattaaattatgcttcatatgtttttgcttttactgtatttctttaaaaactctaaatctttattcatgtgttactggattaatttatctgataatgtgtctcacaagaatctgttagatcgtttattcttcagttgtactttgaatggtggggtggaagtttcaggtgaacaatggataacaaaaagcaagttatggaagattgtgaagaggatggaaaaactgaatacaagataccaaaaatgaaaaaaagtgtcccatttttaataactatattctattattttataaatgtgtaataaaggggtccctcttt

SEQ ID NO: 15442 - DNA, 1188 bp, Homo Sapiens
ggcgtagaggcgtcgtacgacgccaatagctactggcggatccacggcggctcgaagggcgggtgcccgcgcgggtccccggtgcgctgcgggcaggcggtgaggctcacgcatgtgcttacgggcaagaacctgcacacgcaccacttcccgtcgccgctgtccaacaaccaggaggtgagtgcctttggggaagacggcgagggcgacgacctggacctatggacagtgcgctgctctggacagcactgggagcgtgaggctgctgtgcgcttccagcatgtgggcacctctgtgttcctgtcagtcacgggtgagcagtatggaagccccatccgtgggcagcatgaggtccacggcatgcccagtgccaacacgcacaatacgtggaaggccatggaaggcatcttcatcaagcctagtgtggagccctctgcaggtcacgatgaactctgagtgtgtggatggatgggtggatggagggtggcaggtggggcgtctgcagggccactcttggcagagactttgggtttgtaggggtcctcaagtgcctttgtgattaaagaatggtggcccgccaaaaacaagaccgtggagagaagtgccccgggggcaggcgcttcgcaccctcaaaaacgattctagcacccttctttgggccgacagggccgccgcagcgaaacgggacgccggccctaaactgcggtggcaaagaaagacccctcgccaagcacctaagagcctcggagagccgccccagtgcaggaacgccgcccccgcgggaaagcgcgtaccggtaggagaagcgcgtccccgcatgagtccgccggggccggctacgcacgttgaacgagatgggaccacgaaagtagtgcgaggcgaagtggccgacagcccacgttgtacgcaccggcgctgtcgcccgcagcggggacgcgacccgtcttgctcccgcgatgacgcgttgggcgacacgccgtcgagcggcgcgagtgggggctacagcgcaaagctacggccgagtggcccgcgccgggccgatgtataccgcggcgcgcgatatgatagcgcgtaaggacggacttcctgggtggtccgcccgatgcggcgccggcacgagagtggaatcgctcggcggcgtgaggctggaggagtcgcgtgcgctgttggcgacccgtcgccgcgagt

SEQ ID NO: 15443 - DNA, 1575 bp, Homo Sapiens
  misc_feature (420)..(439): n is a, c, g, or t
  misc_feature (966)..(966): n is a, c, g, or t
  misc_feature (990)..(990): n is a, c, g, or t
  misc_feature (1037)..(1037): n is a, c, g, or t
  misc_feature (1317)..(1356): n is a, c, g, or t
  misc_feature (1509)..(1509): n is a, c, g, or t
  misc_feature (1514)..(1514): n is a, c, g, or t
cagtgatacccactgccctgacccctgggcaggcccctctctgcatctactggagtggtccctgggctctggctgagaatctcctcagagcccagtgcagaagctgtgatgcttagaacctggacagcccgactgcctcaactctgtctccaggtctattccctccagctccaaaaggagcagccctacttttaccccttcccgtccccaaagtgtcagcaactttgaggagggccccaggcattttcatcaagcctagtgtggagccctctgcaggtcccgatgaactctgagtgtgtggatggatgggtggatggagggtggcaggtggggcgtctgcagggccactcttggcagagactttgggttcgtaggggtcctcaagtgcctttgtgattaaagaatgttggtctatgaccnnnnnnnnnnnnnnnnnnnngacaaagattcataaccgtgaggagggacaaactaaaacaaacacccacccgcaccgccgcgacgacaaaaaccccagaacaacaccaaccttgtcgggcggccccggcgcttcgaaaatttttaagcaaatttttttgtgggccgccgcccccccttagcaaaaggagagtggtaagaagctcttcccaagaaatccccggcccgaaactgccccttgcacctcccccccgaaaaaccacctccccgccggcaacgggggggtttttgaccagcaggtgaggaccccacttctcgagcgccctatctggtatttctcacggcgcccactccccaaccgggggcgcgccctccccgggtgccgggccgccgtgcgcgggggcaccttattggtcaggcggattgttcgggtgcattttttgccccccccttgttcctcccccaaatttaccacaacatccctcttcgcggcagtgtgagatgctccggtaaaaccccccgccacataagtcacgcttccacggatgnataggttccctcctcaccgcgcgntcccgtaggcccccgccagtgggagcccccgaagcacgtacaacatnaacttgtcccccctgcccccgctcgcgcgggcccgaacaaaccatataggctggcgcgcgcgctgggggaacccgtcacccaaagtcggccccgcgcgccccttcctgaagaagatggtcgccgtccccgcaccctgcgagtggacatatgaccagcctcggaaaatatagagcggggggggaagagcgatgcgttcatccctcccccggtcgcacggggaacacgtgggtgcggggtatttactccccggcatacgcgaaatgcgcggccgtttctgtnnnnnnnnnnnnnnnnnnnnnnnnnnnnnnnnnnnnnnnngtgccggcgacaaacgcctcgggcgacacggatgctcgcagctatccgcacgcggatgggttaagagtgcgccgggcgcgcttattttacgcccgcccatcgcctggtgtgagtgtgtgctgggtgaaatgggtttacgcacgacatcgtacntaggngtgcgggcagcgacgagcgggcatactgctatgcccaacgtccactacgctgcgcgcggcg

SEQ ID NO: 15444 - DNA, 358 bp, Homo Sapiens
gaaaaaggaaaagaaaagttaaagagctgagtatggaggggatgtttcagcctggctcttgcgtacggtgaccagctgtcccaatctgcctgggactgatggggttgcctggggcaagagactttcagtgctaaaacagggagagtcctgggcaaactaggacagctggtcacccaactcttgtggaataaggggaattgagatcgagtactgaatatccggcagagaggctgaaatccttcagccccagagcccagggaccactccagtagatgcagagaggggcctgccctggggtcagggcagtggtgctatcactggtgacatctagaatatcagggctgagaagacatccctg

SEQ ID NO: 15445 - DNA, 502 bp, Homo Sapiens
  misc_feature (177)..(195): n is a, c, g, or t
agagggtgaggtctagaggagtccctccgttaatctctctatccttaatctctctatccttaatctcggtatcccatccaacttcttcttctgtttgagggttaaacatgttagagagttggaaacattgtgttgcaagtggctgaacagaggcagctgcagctaaagctgaagctnnnnnnnnnnnnnnnnnnnttagtttcatggaaaatgcatgaaagtatccctcataaatactttaaaacgaaaccaaaaacccaccccaagcatgtaactaggatgtcactggagttattttaccttatttaatattgctactaatgtatgttatcagtagcttttaggtgccagaaaactgaggtaacctaatacttgaaacagacattcagaaatttgggagtcctattttaacagggaaattaaactttatgtgttatcaaaatcagttcaattagacaaaatctcaatacacatcaatccaaacagattaaggatagagggg

SEQ ID NO: 15446 - DNA, 1702 bp, Homo Sapiens
  misc_feature (119)..(119): n is a, c, g, or t
catagcattgccctgagccaagaatcgcccgagagcagttgggcatggctgaggagcactagaactctccagacctcagacttctctcatcaacaagcttctcatagtgtagccaacanatgtgatgtgaaggaatagctgaacttttgaagatgatcagaaaatatttacagatttgcagtctgaagaattccctgtaatagagaccagcaccctgactgaggaaggtgttattaaagttaaaacagaggcttgcgataggcttttggctcatcgagtggaaaccaaaatgaagggaaataaagtgaatgaggtgctgaatagactgcacctggctatcccaaccaggagggacgataaggagaggccccctttcatccctgaaggagtggtggctcgcaggaagaggatggaaactgaggagtccaggaagaagagggaacgagatcttgagctggaaatgggagatgattatattttggatcttcagaagtactgggatttaatgaatttgtctgaaaaacatgataagataccagaaatctgggaaggccataatatagctgattatattgatccagccatcatgaagaaattggaagaattagaaaaagtatagaagagctgagaactagctgctggagagtatgacagtgtatctgagagtgaagacgaagagatgctggaaatccgactagctggcaaagcaaattcgagagaaaaagaagttgaaaattctggagtccaaagaaaagaatacacagggacccaggatgccgcgaactgctaagaaggttcagaggacagttttggagaaggagatgcatagtcttggtgttgacatggacgataaagacgatgcccattacgcagtccaggcaagaagatcccggagcatcactaggaaaagaaagcgggaagactctgctcccccatcctctgtggccccggagtgggagttgctctcgaactccacgtgacgtttctggtcttagggatgtcaagatggtgaagaaagccaagactatgatgaagaatgctcagaagaagatgaatcggttggggagagaaaggggaggcggatagacacgtgtttgatatgaagcccaagcacttgctgtctgggaagaggaaagctggtaaaaaggacaggagatagtatccgtttggttggcgtggcttcgctagagtgttgctgtttatttcctggtttggcacagtatggtttcatgaaattggagctctgtataaactgaaaaagacaaaataagtaaagcacttgttgctttgctgaaaactatggttaaccctatataggtgtgggaaatttttgtcactgcataatattacaaatattttgagtagacagtgtttccacatttaatggagtatcagttgcttcagattttcagaactgggaagatttactggtgtaactgggttgtttttgatggagaaaaaccttattttcttttgtaagagctgggagcaaacacgtttatgagtgtgtcggaatcccgtgcttaaaatacgctcttaaattattttctagtcttattttacaatgtctcattgtagtctgtcttcaactattttatccaaaataaacctccagaagaaagtagttttcatttacttagctcatgttttggtttagttatagtcgctatggatttggccaaataaaaaggcaaaaaacatg

SEQ ID NO: 15447 - DNA, 663 bp, Homo Sapiens
cagctgctggagagtatgacagtgtatctgagagtgaagacgaagagatgctggaaatccgacagctgacaaagcaaaattcgagagaaaaagaagttgaaaattctggagtcaggggcaagcagcagtgctcaaggaggcacatcatgaggccacttgcaggcctgaggaggagaaaaaacaactgcaagtgaagcttgaggaggaaaagactcacctgcaggagaagctgaggctgcaacatgagatggagctcaaggctagactgacacaggctcaagcaagctttgagcgggagagggaaggccttcagagtagcgcctggacagaagagaaggtcagaggcttgactcaggaactagagcagtttcaccaggagcagctgacaagcctggtggagaaacacactcttgagaaagaggagttaagaaaagagctcttggaaaagcaccaaagggagcttcaggagggaagatatgaatctgaaaagcttcaacaggaaaattctattttgagaaatgaaattactactttaaatgaagaagatagcatttctaacctgaaattagggacattaaatggatctcaggaagaaatgtggcaaaaaacggataactgtatacagaaaatgctgcgttcagaagatgcttgtaaatttaaaga

SEQ ID NO: 15448 - DNA, 1180 bp, Homo Sapiens
  misc_feature (514)..(655): n is a, c, g, or t
ctgggtctgcccacccgtggccaagcaggaactccaggtgcagggcgggcctccaggtgcagggcgggccagaagccccctcatcggcccgcagctggctggcccagtgctcctggctgggggctcttgcgtggtgagagtaggggtccccccaggagccatgctggacccatgagcctcgctggggcctcctccccaggcagccaatgggccccagacaagcctttggtggggaacagaacctccgcatcgtgtagttttgtgacataaggagacctcctacttgagctgtctgtaccccagaatcaaacacagaacctcagaaccagatttaggacctcagaatcctgcactcaaggtggcaggacccaatttctgttttatatgttcatgaactttaaacctggaaacatgtccttactaggtgttttatcaaaaaaaagttttcatatttatctctatccctaaccccccaaaaataggatgtcttattattgaagatatttttaaagcnnnnnnnnnnnnnnnnnnnnnnnnnnnnnnnnnnnnnnnnnnnnnnnnnnnnnnnnnnnnnnnnnnnnnnnnnnnnnnnnnnnnnnnnnnnnnnnnnnnnnnnnnnnnnnnnnnnnnnnnnnnnnnnnnnnnnnnnnnnnnngagacagagacggcgaccgcaacccccacccgcggacaagacacacagcgcacacagcacggacaccagaagagagctacaagtacatatagggaggagacgtacatctagactagaacgacatcgccggtcagaatgacgaaagcagagaatagaggaggaaaggagttgagtagaaatagacattgagaactgagaagcggaaggagaagcagcgaaggagaactaccaccagccagaggagtgagaaggagaaagacatcgataggaagatagacacagcagcgatgagctggaagaacggatgaatgcggaccgaaacagagaagtagaaacaaatgacagtagagaccgggagcggaaggaaggctggactagcggacgacagcactccagcgaagagaggagacacgggggggagcggacagcaacaggcagcgtggagaacagggccagatgcatgaacgcgaaacgcggaaagacacaggagaacggacagggaccgaggaaaggacgcaggggggg

SEQ ID NO: 15449 - DNA, 869 bp, Homo Sapiens
  misc_feature (777)..(824): n is a, c, g, or t
ggccttccatctctctcagacaccaagctgcagatccaggcttttctgggaaagtgaggccaccatggctctggagaagtctcttgtccggctccttctgcttgtcctgatactgctggtgctgggctgggtccagccttccctgggcaaggaatcccgggccaagaaattccagcggcagcatatggactcagacagttcccccagcagcagctccacctactgtaaccaaatgatgaggcgccggaatatgacacaggggcggtgcaaaccagtgaacacctttgtgcacgagcccctggtagatgtccagaatgtctgtttccaggaaaaggtcacctgcaagaacgggcagggcaactgctacaagagcaactccagcatgcacatcacagactgccgcctgacaaacggctccaggtaccccaactgtgcataccggaccagcccgaaggagagacacatcattgtggcctgtgaagggagcccatatgtgccagtccactttgatgcttctgtggaggactctacctaaggtcagagcagcgagataccccacctccctcaacctcatcctctccacagctgcctcttccctcttccttccctgctgtgaaagaagtaactacagttagggctcctattcaacacacacatgcttccctttcctgagtcccatccctgcgtgattttgggggtgaagagtgggttgtgaggtgggccccatgttaacccctccactctttctttcaataaaacgcagttgcaaaacacctnnnnnnnnnnnnnnnnnnnnnnnnnnnnnnnnnnnnnnnnnnnnnnnncgggacatagaataaccccgggagggcccaagataagcgggtccg

SEQ ID NO: 15450 - DNA, 1934 bp, Homo Sapiens
  misc_feature (835)..(845): n is a, c, g, or t
  misc_feature (1200)..(1292): n is a, c, g, or t
  misc_feature (1463)..(1472): n is a, c, g, or t
  misc_feature (1638)..(1650): n is a, c, g, or t
atcatctcaagcttatgcactgcctcctggaacaacaggtacacagcctgctgccagtgaactgcctgcgtcccaaagaacaggtcctcagaatggttggaatgaccctccagctttgaacagagtacccaataagaagaagatgcctgaaaacttcatgcctcctgttcccatcacatcaccaatcatgaacccgttgggtgacccccagtcacaaatgctgcagcaacagccttcagctccagtaccactgtcaagccagtcttcattcccacagccacatcttccaggtggccagcccttccatggcgtacagcaacctctgggtcaaacaggcatgccacccatctttttcaaagccccaatattgaagggtgccccaggggctcctattggaaataccttccagcatgtgcagtctttgccaacaaaaaaaagaaccaagaaacctattcccagatgagcacctcattctaaagaccacatttgaggatcttattcagcgctgcctttcttcagcaacagaccctcaaaccaagaggaagctagatgatgccagcaaacgtttggagtttctgtatgataaacttagggaacagacactttcaccaacaatcaccagtggtttacacaacattgcaaggagcattgaaactcgaaactactcagaaggattgaccatgcatacccacatagttagcaccagcaacttcagtgagacctctgctttcatgccagttctcaaagttgttctcacccaggccaataagctgggtgtctaaaaggacagcttctcttccactcaatattgccatttttccaaagaaacatgttnnnnnnnnnnnttataagacatggactagtcctcattagcatgtttgcatagcaaccagtcaagagcatttacactatttctgctgatatactcaccttagaactgctcagaaccctggtgctttatttttgttttaatcttttgttgccagtgatgattttcctattctgcaaatagtgtatttcctggattacacatagtatggtttcctgaagtattctgataaatgtgttttttaaaacctcaatatactttttagaaaaggagcatctggttatgcataaagcagagctaaaactaaatttctttcatgtcctccctacttcctcagtgtcaatcagattaaagtgtgtaatcctaaaaannnnnnnnnnnnnnnnnnnnnnnnnnnnnnnnnnnnnnnnnnnnnnnnnnnnnnnnnnnnnnnnnnnnnnnnnnnnnnnnnnnnnnnnnnnnnaaccctgggcggcccccctcgggcctcttaaaaaaatttttcaaaaacctttccttttgggggccccggcccccccaaggggtaaaggggcccttgggccccaatcgtttctcccaagaaaaaaacctcgggctattggaacaacggcggttgggacttccccccccaatnnnnnnnnnnccgccccggggcgggtacacccagggcctgtttcttgataacaaaatccccccaaaaaggggggcctctcttcaggggcctccctttcccggggaagtcccccctcacacgcgggggggtgtttccctgcgggggcggcccttcctattattttaccatcattttnnnnnnnnnnnnntccctcggtgggtcccctatacccttcaccaaaaaaagtggcgtggggggaattcccttatttcgcaccactatatcttctcgcccccccctgttgtgggggaaaaacctttccccttcaaccaccaggcggtgtgtactgtataaagcacaccacatccatatcttcctctgcccccgccgtgcgtataataactacaaacacactggatcctcagggtagcttcatgcgtaaacgaataaataatattttccaccccccctgtgtcggctatgacacaaaca

SEQ ID NO: 15451 - DNA, 1606 bp, Homo Sapiens
ggcagagtgatggggaggagagccctgctgctgaagagcagctcttgggagagcacattaaagaggaaaaagaagaatctgaatttctaccctcatctggaggaacatttaatatctctgtcagtggggacattgatggtttaattactcaggctttgctgacgggcaattttgagagtgctgttgacctttgtttacatgataaccgcatggccgatgccattatattggccatagcaggtggacaagaactcttggctcgaacccagaaaaaatacttcgcaaaatcccaaagcaaaattaccaggctcatcactgcagtggtgatgaagaactggaaagagattgttgagtcttgtgatcttaaaaattggagagaggctttagctgcagtattgacttatgcaaagccggatgaattttcagccctttgtgatcttttgggaaccaggcttgaaaatgaaggagatagcctcctgcagactcaagcatgtctctgctatatttgtgcagggaatgtagagaaattagttgcatgttggactaaagctcaagatggaagccaccctttgtcacttcaggatctgattgagaaagttgtcatcctgcgaaaagctgtgcaactcactcaagccatggacactagtactgtaggagttctcttggctgcgaagatgagtcagtatgccaattttgttggccacctcaaggcagtattgctgcagccctggcttttcttcctgacaacaccaaccagccaaattatcatgcagcttccgggacagaactttggaaagcacaaggagagcctgtagcaggacatgaatcacctaaaatcccgtacgagaaacagcagctccccaagggcaggcctggtaccagttgcatggccaccaccagatgccaagagttcaaactcaacaatattatccccatggagaaaatcctccacctccgggtttcataatgcatggaaatgttaatccaaatgctgctggtcagcttcccacatctccaggtcatatgcacacccaggtaccaccttatccacagccacagccttatcaaccagcccagccgtatcccttcggaacaggggggtcagcaacgtatcgacctcagcagcctgttgctcctcctacttcaaacgcttaccctaacaccccttacatatcttctgcttcttcctatactgggcagtctcagctgtacgcagcacagcaccaggcctcttcacctacctccagccctgctacttctttccctcctcccccttcctctggagcatccttccagcatggcggaccaggagctccaccatcatcttcagcttatgcactgcctcctggaacaacaggtacactgcctgctgccagtgagctgcctgcgtcccaaagaacagaaaaccagtctatccaagaccaggcacctatgttggaaggtcctcagaatggttggaatgaccctccagctttgaacagagtacccaaaaagaagaagatgcctgaaaacttcatgcctcctgttcccatcgcatcaccaatcatgaacccgttgggtgacccccagtcacaaatgctgcagcatcagcctgctcaggggatct

SEQ ID NO: 15452 - DNA, 1403 bp, Homo Sapiens
  misc_feature (1087)..(1087): n is a, c, g, or t
  misc_feature (1164)..(1164): n is a, c, g, or t
  misc_feature (1185)..(1185): n is a, c, g, or t
  misc_feature (1304)..(1304): n is a, c, g, or t
ccgacacgcccgcccccgggaaaacccgccccccgacacgaactacggcccgcatttcgggatggggcgtaactgatttggaatccagaggaaaggcgctgttttcaccgaattagaatcgcgggaaaatagagaagagtttgtttgaaggtctcgcgagatcgagtgagtacggctcgccaagttggagcgctctcgcgatagacacagcaactattcagctgcgaggggacgggagaggtggtgagcactctcgcgagatttgaaggagcggcggaggccagagggaggagaggaccggaagtccttcatctcaagcatccaatgctgaaagcggcctgattttctctaccggaagcccttttccagaggctgggaacacggcccacctagcaggaagtcccacctccttgagctccgccacccttcccgaagtttttctgtcacctgtgttaggctccgtcccctttccgcgttttatccccgtaccagaaaaggatacatttagtgcctcccacccagctccactaaacgggttggatatctcattctttgagttggtgttccttccccggcgcccccatgtagctgggaagtgggacctgggggtggttggacccctgggatcctaaaggaggggcagggagggcgcagaactccgcttctgctccttgctaccaggacgcgcggcctcctcagcctctttcctcccgctgccatgcaccctgcagccttcccgcttcctgtggttgtggccgctgtgctgtggggagcggccccgacccgggggctcattcgagcgacctcggaccacaatgccagcatggactttgcagaccttccagctctgtttggggctaccttgagccaggagggcctccaggggttccttgtggaggctcacccagacaatgcctgcagccccattgccccaacacacccagccccggtcaatgggtcagtctttattgcgctgcttcgaaagattcgactgaaactttgacctcaaggtcctaaatgcccagaaggctggatatggtgccgatgtaggtacacaatgtgaattccaatgaacttctgaacatgngtgtggaatagagaggaaatccagcagcagatctggatcacgactgtatataatggggagagaagctccgagtaccntgcgtgccctctttgtctacnagaagggggctcgggtggcttctggttccagacaataccctcccccttggggctattacctcatcccttttcacagggattggggggactgctgggttttgggccatgggaacaagaantggataaactcggtggtatacaagccaccgggaaaccggtctccaggcgggattccacctttaccaaagaagcacctgaaaacgaattcccctacccca

SEQ ID NO: 15453 - DNA, 454 bp, Homo Sapiens
ccgtaatcgtccgaggacaggatcttctccttctcccgtatccagccttcctcttctgccatctcccagaagaacttccagaggcggcgggactcttccagacgggccctgcgctcagccgccagctggcaaagctcttgataacagaactccatgtgggccacgcggtctcggatcacctgggggtcacagggcttgtaaccttacccgtctgtagagaacttctgggcggaggcattgacacctctcacccgctctgcctggatgccaatgtctgcttcaaccagggtgtgcttctgtaacaggtcttccacaccaagtaagtgtttgccatagtcttgagacaatactagcaccttcatttcatccatccagtccataatgtagagcatttcctggaatatcttctgaagccccaggttaatctgaaccgctggtttccgggccttaacag

SEQ ID NO: 15454 - DNA, 917 bp, Homo Sapiens
  misc_feature (658)..(658): n is a, c, g, or t
  misc_feature (697)..(697): n is a, c, g, or t
  misc_feature (706)..(706): n is a, c, g, or t
  misc_feature (711)..(711): n is a, c, g, or t
  misc_feature (725)..(725): n is a, c, g, or t
  misc_feature (730)..(730): n is a, c, g, or t
  misc_feature (733)..(733): n is a, c, g, or t
  misc_feature (760)..(760): n is a, c, g, or t
  misc_feature (763)..(763): n is a, c, g, or t
  misc_feature (772)..(772): n is a, c, g, or t
  misc_feature (781)..(781): n is a, c, g, or t
  misc_feature (784)..(784): n is a, c, g, or t
  misc_feature (787)..(787): n is a, c, g, or t
  misc_feature (791)..(791): n is a, c, g, or t
  misc_feature (815)..(816): n is a, c, g, or t
  misc_feature (823)..(823): n is a, c, g, or t
  misc_feature (832)..(832): n is a, c, g, or t
  misc_feature (840)..(840): n is a, c, g, or t
  misc_feature (876)..(876): n is a, c, g, or t
ggctgactagagttccccccgtccgatggcccatgacctgtgagctcacagctggctgtgcctgagggcagcgcagcaggcatgaatgcttctatgtgttaggcaggactgcccctatggcaggtgtggggagccacagggctctggggtatgtctaaaagtgggggcaaaaaggttcaggaagccaaaaacatgggcttatttgtcatagaagtccacgtgggctccagacttgaactcgtccttttccagtaagctcagcagtttctgggctgacaccttgcaatccaccagcttcccctttgccttcagctcctgcagcccttttcgcatgtctgggtccacggaggtctcccgggccaactgctgcatgtctgtgtccagaggacctggggcatagttcagcaccctcacattaggttcctccagcgccaggacctggaacagcatatcacgagcagcctttcctgcacagtacagcgcccagcctttgaaaggttgcatgggcacagagggacgagatgttaaccacggttctgttgaggccaggactgtccgggaaagccttcaggacgctggaagtcaggcagagcatggaggtcaagttcagtgcccagtagttgttcacttgagtggagtcactcaggtccacgaagcntttgaaacatccccaagagagcccgcgttgttgatatanatcagtcgntgcancccttgggccgggntgatnttngcaggcgccgagcatgctgctgcaatncgnctctggcgnccatggtcnggngtnaccngcaccactgcgcatggccatgacnntctggtnccatgctcngcctccantggctgcatgtgcctctgtcgttgcgggcgctaagnacaagcacggagccgggcgacatgcatgcgatggccatgga

SEQ ID NO: 15455 - DNA, 1005 bp, Homo Sapiens
agcgtctgaaggccttcccggacagtcctggcctcaacagaaccgtggttaacatctcgtgcctctgtgccctgcaacctttcaaaggctgggcgctgtactgtgcaggaaaggctgctcgtgatatgctgttccaggtcctggcgctggaggaacctaatgtgagggtgctgaactatgccccaggtcctctggacacagacatgcagcagttggcccgggagacctccgtggacccagacatgcgaaaagggctgcaggagctgaaggcaaaggggaagctggtggattgcaaggtgtcagcccagaaactgctgagcttactggaaaaggacgagttcaagtctggagcccacgtggacttctatgacaaataagcccatgtttttggcttcctgaacctttttgcccccacttttagacataccccagagccctgtggctccccacaccctgccataggggcagtcctgccttacacatagaagcattcatgcctgctgccctgccctcaggcacagccagctgtgagctcccaggtcattggccttaccagttgtcaggagtctgtgctgtgcaccctgggttataaggaggcttaggagagaggttatgggtattggtgtctctatccccaggaatagaacttaaggggtgggaagaacaggaaaagaagctggaacacagaagagaggaggttgtgtctcttgctcatagcaagcctgtgggtagaggaaagagtgatctggtgtcgaataggaggacccatgtagattcgcagatggcctggatgggaggaagggcagacggtacatgtcccagcccacatagatgccccttgctgagggtagcaggaccttctgttgaactttgtgtcctcactctgatgtctccttccttcagaatctaccacccctcccccaggctgggagaaggggctcctgggtgtctgtatacacgccaaaggcagatacaaataaaatacagattgtcctttgagaagaa

SEQ ID NO: 15456 - DNA, 1566 bp, Homo Sapiens
gggatcccccaaggaggcagaggagccatccagtttgtcacgcattatcagcactccagcacccagagacgcatccgcgtgaccaccatcgcccgaaattgggcagatgtacagagtcagctcaggcacatagaagcagcatttgaccaggaggctgcggcagtgttgatggcacggcttggggtgttccgagcggagtcagaggaggggcccgatgtgctccggtggctggaccgacaactcatccgactgtgtcaaaagtttggacagtataacaaagaagaccccacttcttttaggttatcagattccttttctctatatcctcagtttatgttccatctgagaagatctccatttcttcaagtgtttaacaacagtcctgatgagtcgtcatattacagacatcattttgcccggcaggacctgacccagtccctcatcatgatccagcccattctctactcttactcctttcatgggccaccagagccagtactcttggatagcagcagcattctagctgacagaattttgctgatggatactttctttcaaattgtcatttatcttggtgagaccatagcccagtggcgtaaagctggctaccaggacatgcccgagtatgaaaacttcaagcaccttctgcaggcaccactggatgatgctcaagaaattctgcaagcacgcttcccgatgccacgttacatcaacacggagcatggaggcagtcaggctcgattccttttgtccaaagtgaacccatctcagacacacaataacctgtatgcttggggacaggaaactggagcacccatcctaactgatgatgttagcctgcaggtgttcatggaccatttgaagaagctggctgtctccagtgcctgttaagctgaggatacaaccaggaaatgcaacggtgtcagattgtgttcaaaatgtctagaaaggcttgataacattcctgttacttttctagcagattttaacaaataatcaaggacattttatatgtaactctttagattataatttatttgtattcctgtctttgtcctttttcttgcactataaaattataaggtcataaatgttttggtacttgtagatgtttatgtgctttttgtatcctaacttttagaatctaaataaaatcagaggtaatgtattttggcagcttgtttaggtgagaatcttaatgatcataaaggaaataaatctagatgcagaaagtactggctaaaatattgctaatacaaatgtgatttcctgaggtctctgtgtgagtgtgtatgtgttttaagtgacttccttaagaggtgtttcctgaacctaattctcataattaaagtaatgtagatgcaggatcaaaatgaaacaaatataccttatcctaaagagctcataacaaataagttacctccactctataaactcagacctactttttgaagataactgcttttaacctctccttacaagatttttgttgttgatgtatttaattttagcccatgtctcaattctcattttcaaagaaatcaatatattaatatacctttggtc

SEQ ID NO: 15457 - DNA, 1429 bp, Homo Sapiens
gcctgcttgttgcagctgtgggtgaggacggctctagctagttcccttttagactatggcgacatacctggagttcatccagcagaatgaagaacgggatggtgtgcgttttagttggaacgtgtggccttccagccggctggaggctacaagaatggttgtacccctggcttgtctccttactcctttgaaagaacgtccagacctacctcctgtacaatatgaacctgtgctttgcagcaggccaacttgtaaagctgttctcaacccactttgtcaggttgattatcgagcaaaactttgggcctgtaatttctgttttcaaagaaatcagtttcctccagcttatggaggcatatctgaggtgaatcaacctgccgaattgatgccccagttttctacaattgagtacgtgatacagcgaggtgctcagtcccctctgatctttctctatgtggttgacacatgcctggaggaagatgaccttcaagcactcaaagagtccctgcagatgtccctgagtcttcttcctccagatgctctggtgggtctgatcacatttggaaggatggtgcaggttcatgagctaagctgtgaaggaatctccaaaagttatgtcttccgagggaccaaggatttaactgcaaagcaaatacaggatatgttgggcctgaccaagccagccatgcccatgcagcaagcacgacctgcacaaccacaggagcacccttttgcttcaagcagatttctgcagcctgttcacaagattgatatgaacctccactgatcttccttggggaggctacaaaggggacccatggccagtaactcaggggaagagacctttgcgatccactggtgtggctttgtccattgctgttggcttgctggagggcacttttccaaacacaggagccaggatcatgctgtttactggaggtccccctacccaagggcctggcatggtggttggagatgaattaaagattcctattcgttcttggcatgatattgagaaagataatgcacgattcatgaaaaaggcaaccaagcactatgagatgcttgctaatcgaacagctgcaaatggtcactgcattgatatttatgcttgtgccccttgatcaaactggacttttggagatgaagtgttgtgcaaaatcttactggaggctacatggtaatgggagattctttcaacacttctctcttcaagcagacattccaaagaatctttactaaagattttaactggagatttccgaatggcatttggtgctactttggacgtaaagacctctcgggaactgaagattgcaggagccatgggtccatgcgtatctctgaactgtgaaagggaccgtgtgtgtcagaaaatgagcttggtgttggtggcacgagtcagtggaaaatctgtggcctacatcgg

SEQ ID NO: 15458 - DNA, 1027 bp, Homo Sapiens
  misc_feature (720)..(730): n is a, c, g, or t
gctctacgttccctgttctcgcctgcagctccgccatggctcctaaaggcagctccaaacagcagtctgaggaggacctgctcctgcaggatttcagccgcaatctctcggccaagtcctccgcgctcttcttcggaaacgcgttcatcgtgtctgccatccccatctggttatactggcgaatatggcatatggatcttattcagtctgctgttttgtatagtgtgatgaccctagtaagcacatatttggtagcctttgcatacaagaatgtgaaatttgttctcaagcacaaagtagcacagaagagggaggatgctgtttccaaagaaagtgactcgaaaactttctgaagctgataataaaaacatgcctcggaaggagaaagatgaaagaatcttgtgggaaaaagaatgaagttgctagattatgaacgctaacacatttttccctcctccctataacaaacacctcgggttcccggaggcaccgaaacatttggttggctttccatttcttttaatatttgaaacgaaaattttccaaccccccaagggggtggaaaccttaacaattaaattgcgaacaccttaacaaaagggccttttccttattcaaggaaaaaattcttcttctcggccacccgtcgcggtgggtgcctacactgtgggctctcccgcaaaacataaaaacccccctgggttccagaccctcttccannnnnnnnnnnatgggccctctttgacgtgtctccaaatagggggccggggtccccccgcgcgacgtattaaagggggggaaacgatttaaccacaggggccgtggtctccacggggggctgggggcaaccaaaccccaagggtacggtctctctctaattcacctccctaaactgcccccccttcgtaaaacataccctacggcacacaaggggtgtcttcccggcgaatctctcgcgcttttttcggcggcctgtccctatcccggcaacacacttggagactcccaacacacaaccggaattatg

SEQ ID NO: 15459 - DNA, 995 bp, Homo Sapiens
  misc_feature (699)..(699): n is a, c, g, or t
ggtgctgaaatggcaccacagatcgattatacagtgatggtcttcaagccaattgttgaaaaatttggtttcatatttaattgtgacattaaaacaaggggatattacccaaaagggggtggtgaagtgattgttcgaatgtcaccagttaaacaattgaaccctataaatttaactgagcgtggctgtgtgactaagatatatggaagagctttcgttgctggtgttttgccatttaaagtagcaaaagatatggcagcggcagcagttagatgcatcagaaaggagaaccgggatttgtatgtcaacatccagcctgttcaagaacctaaagaccaagcatttggcaatggaaatggaataataattattgctgagacctccactggctgtttgtttgcaagatcatcgcttggtaaacgaggtgtaaatgcagacaaagttggaattgaagctgccgaaatgctattagcaaatcttagacatggtggtactgtggatgagtatctgcaagaccagctgattgttttcatggcattagccaatggagtttccagaataaaaacaggaccagttacactccatacgcaaaccgcgatacattttgctgaacaaatagcaaaggctaaatttattgtgaagaaatcagaagatgaagaagacgccgctaaagatacttatattattgaatgccaaggnaattgggatgacacaatccaaatctatagagtatttgccctcttaaatgatacctcattgatatattgcactatttcataaatactataaaataatgactaggaagtaacttattaaaggctatgacttaaatttgaagatgaagtacagtgttctaggtttgctgagaaggcttcattaaattaatctcactttgaatatctcctgagagatggacaatgaaatatcagttggtggatatgtgtgatagctgatttcaatattgaagtattgaaataaaatattctttacacctg

SEQ ID NO: 15460 - DNA, 357 bp, Homo Sapiens
  misc_feature (215)..(215): n is a, c, g, or t
  misc_feature (226)..(226): n is a, c, g, or t
  misc_feature (273)..(273): n is a, c, g, or t
  misc_feature (297)..(297): n is a, c, g, or t
  misc_feature (299)..(299): n is a, c, g, or t
  misc_feature (322)..(322): n is a, c, g, or t
  misc_feature (329)..(329): n is a, c, g, or t
  misc_feature (340)..(340): n is a, c, g, or t
aggaaccatctctgaaaacacaaactacaatcatcctcctgaggcagattccgctgggactgcattcaacttagggccaactggcatgttagtgttttccataaaaacattttcttcaaaggcatttcttgcagttgtgtcttttgtattattcttttctataaaatgttctgaaggagcagatacttccagaaaaggattttcttgcttcaaanaactgtgtgancaggaatgtgaatgggaagaaataaccatcacgggatcagatggcgncaccagggtggtcctgggtagatngnaagacaggcaagtcagtatgatnattcaangatcgctattngacaaagggcccttgtt

SEQ ID NO: 15461 - DNA, 723 bp, Homo Sapiens
  misc_feature (44)..(44): n is a, c, g, or t
  misc_feature (129)..(130): n is a, c, g, or t
ccgaagcgaggccaccttcaggaggaggaggtccggaccctatntgtcagtggccttcctctggatatcaaacctcggaagctctatctgcttttcagaccatttaagggctatgagggttctctatannagctcacatctaaacagcctgtaggttttgtcagttttgacagtcgctcagaagcagaggctgcaaaaaatgctttgaatggcatccgcttcgatcctgaaattccgcaaacactacgactagagtttgctaaggcaaacacgaagatggccaagaacaaactcgtagggactccaaaccccagtactcctctgcccaacactgtacctcagttcattgccagagagccatatgagctcacagtgcctgcactttaccccagtagccctgaagtgtgggccccgtaccctctgtacccagcggagttagcgcctgctctacctcctcctgctttcacctatcccgcttcactgcatgcccagtgtttctctcctgaggcaaagcccaacacacctgtcttttgtccacttctccagcaaattagatttgtctctgggaatgtgtttgtaacataccaacctactgcagaccagcagagggagctcccatgttgaatttgtttgttagctattttcccccctttcacaaaaactatttcttgacgacctttgagagatttcaataaaaattttaatcagagcaaaaatgaactc

SEQ ID NO: 15462 - DNA, 908 bp, Homo Sapiens
ggggaaggctccagtgggctagcgcgccctcgcccagccccgcgccccagccctgcccggcccggcgaggaaggaccgggaagatgaacaacggcggcaaagccgagaaggagaacaccccgagcgaggccaaccttcaggaggaggaggtccggaccctatttgtcagtggccttcctctggatatcaaacctcgggagctctatctgcttttcagaccatttaagggctatgagggttctcttataaagctcacatctaaacagcctgtaggttttgtcagttttgacagtcgctcagaagcagaggctgcaaagaatgctttgaatggcatccgcttcgatcctgaaattccgcaaacactacgactagagtttgctaaggcaaacacgaagatggccaagaacaaactcgtaggaactccaaaccccagtactcctctgcccaacactgtacctcagttcattgccagagagccatatgagctcacagtgcctgcactttaccccagtagccctgaagtgtgggccccgtaccctctgtacccagcggagttagcgcctgctctacctcctcctgctttcacctatcccgcttcactgcatgcccagatgcgctggctccctccctccgaggctacttctcagggctggaagtcccgtcagttctgctgaatactatgtcccaggtgtgtgatggcggctgcaatctgtcttgtgggtattaatgcaatcttcagtggtggctactgttctctagcttgttctacaaaactggagcatgctggcttgaaaaacccttgcccagttttgatcccttcaagactttgtcacagcctctatcacacatctgtttttctcgaagaaaaaaatataattaataaaaatgttttactcttttacactgaa

SEQ ID NO: 15463 - DNA, 595 bp, Homo Sapiens
cctgtaggccaaggcgccaggcaggacgacagcagcagcagcgcatctccttcagtgagagccacgagccaaggtgggcacttgatgtcggatctcttcaacaagctggtcatgaggcgcaagggcatctctgggaaaggacctggggctggtgaggggcccggaggagcctttgtccgcgtgtcagactccatccctcctttgccgccaccgcagcagccacaggcagaggaggacgaggacgactgggaatcctagggggctccatgacaccttcccccccagacccagacttgggccgttgctctgacatggacacagccaggacaagctgctcagacctgcttccctgggagggggtgacggaaccagcactgtgtggagaccagcttcaaggagcggaaggctggcttgaggccacacagctggggcggggacttctgtctgcctgtgctccatggggggacggctccacccagcctgcgccactgtgttcttaagaggcttccagagaaaacggcacaccaatcaataaagaactgagcagaaaccaacagtgtgcttttaataaaggatctctagctgtgcaggatcc

SEQ ID NO: 15464 - DNA, 600 bp, Homo Sapiens
ctggcgctgctaacacacaggagcagcgcgtttcattcattcgaggtagctcccaggtgatgatggtagacccgctccggtggccgggccactctgctagagtccatccgccaagctgggggcatcggcaaggccaagctgcgcagcatgaaggagcgaaagctggagaagaagaagcagaaggagcaggagcaagtgagagccacgagccaaggtgggcacttgatgtcggatctcttcaacaagctggtcatgaggcgcaagggcatctctgggaaaggacctggggctggtgaggggcccggaggagcctttgcccgcgtgtcagactccatccctcctctgccgccaccgcagcagccacaggcagaggaggacgaggacgactgggaatcctagggggctccatgacaccttcccccccagacccagacttgggccgttgctctgacatggacacagccaggacaagctgctcagacctacttccttgggagggggtgacggaaccagcactgtgtggagaccagcttcaaggagcggaaggctggcttgaggccacacagctggggcggggacttttgtctgcctgtgctccat

SEQ ID NO: 15465 - DNA, 672 bp, Homo Sapiens
ctctgtgtcttactctgtgcaaagacgcggcaaaacccagtgccctggtttttccccacccgagatgaaggatacgctgtattttttgcctaatgtccctgcctgagcagcctttcctccttgccctgttccccacctcccggctccagtccagggagctcccagggaagtggtctgacccctccggtggccgggccactctgctagagtccatccgccaagctgggggcatcggcaaggccaagctgcgcagcatgaaggagcgaaagctggagaagaagaagcagaaggagcaggagcaaggtgagcgggcctggagcttgcagtcggagggcccttgggcaagatcgcctcctcccctccagccctgagtccaccgggtgctttctgcccaccccctgctcttgccagctggcccctgcttcccctagggcacatgctggaagccctgggccgacaccagaggtcctcagccctcctgcctgggctatggctccttcctggttgggagccatagtggagctttcctctctaagctcacccagctcaaactgacaggcagaatcttcttcgactgccaaagagcggtccaagggcaatggtcagccactgcagcctcctgagatatttttagagactggacctgaggctccggaggctacgtgatgatgc

SEQ ID NO: 15466 - DNA, 650 bp, Homo Sapiens
aacggggtttcgcagcgttcatgaacctttaattcattatgaacctagaggcagggacattaggcaaaaaaatacagcgtatccttcatctcgggtggggaaaaaccagggcactgggttttgccgcgtctttgcacagagtaagacacagagataccttcgtggggagagtgtgcagctccggcctgcccttctgtggcccatctgcgcaggccgcccaggagcccaccaggggatgggtgtgacccccaagggacaagggcagcaggggcacccgcccgcttctttacaatataaatagcattttcaaacaacataagaatacagtgtcagcgccacgccgggcgagggctgcgtgcagagggacacctccacgttttggctgacaccgtacaatctctgcgaccccggccctctccagggcaaccgcccaactggcgcatcaatgaatgaaaggcttgctcctggtaacactctctctgttttgcttagatctctctaagccggggactgttaggacactcttttataatataacattgcctcgtggcgaattctggctcgaggcaaaattcctataatgagtcgtaataattcgtaacatgtatagctgttgctgggttgattggtatcggtcacattcacacaca

SEQ ID NO: 15467 - DNA, 938 bp, Homo Sapiens
gggaagaaaactggcagacctcgaaaagaaaacaaattcagtgctaagaggctgcagaccacaagactgggaaaccacttggaagaccgagtgaacaaatttttgcggcgccagaatcaccctgaagccggggaggtttttgtccgagtggtggccagctcagacaagacggtggaggtcaagcccgggatgaagtcacggtttgtggattctggggaaatgtctgaatctttcccatatcgaaccaaagctctgtttgcttttgaggaaattgacggcgtggatgtctgcttttttggaatgcacgtccaagaatacggctctgattgcccccctccaaacacgaggcgtgtgtacatttcttatctggatagtattcatttcttccggccacgttgcctccgcacagccggtttaccatgagatccttatgggatatttagagtatgtgaagaaattagggtatgtgacagggcacatcgggggcctgtcctccaagtgaaggagatgattacatcttccatggccacccaccggatcaaaaaatacccaagccaaaacgacggcaggagtggtacaaaaagatgctggacaaggcgttggcagagcggatcatccatgactacaaagatattttcaaacaagcaactgaagacaggctcaccagtgccaaggaacggccctatttggaaggtgatttctggcccaaggtgttagaagagagcattaaggaactagaacaagaaggagaggagaggaaaagggaagagagcacggcagccagtgaaaccactgagggcagtcagggcgacagcaagaatgccaagaagaagaacaacaagaaaaccaacaagaacaaaagcagcatcagccgcgccaacaagaagaagcccagcatgcccaacgtgtccaatgacctgtcccagaagctgtatgcc

SEQ ID NO: 15468 - DNA, 405 bp, Homo Sapiens
ggaaagagcttgctacgtgcacaggagccagacctgtgaggctcggggagcacctggaaagaggagctgtggagattctgaattgatcttaggatggaaaaataaaaacgcataaaacttaaaatacccattatgtcacggaataaacatacagtaaaaaataaagggttcttactagttccaaataatttaatccaaactcaccctaatttcttcacatactctaaatatccaataaggatctcatggtaaacggctgtgcggaggcaacgtggccggaagaaatgaatactatccagataagaaatgtacacacgcctgtgggaaggaggcacatgtttaactcagggtaaacctcaaatctgaaatcaaacacaagcaacaaacaacaccctggaagtttac

SEQ ID NO: 15469 - DNA, 389 bp, Homo Sapiens
agttcaagttggggtgggagcactacagggggtgggagtgggtggtggctggtgcgaatggcctggcacagatccctaggattcttgacacctggatttcaccagggaccttctgttctcccagggaacttcgtagatctcgaaagagcacaactgtttcttctgcagttctggctgttcatggaaggcacaggtgtccaagttgggctgggacttggtacatatggttcggcccacctctacgtcgaagaagtaattcacccccccaacggtctgttgcctggctcttagtacccgcagcggacgtctgtagtagtcatctttggtggccttgttatactcgctgatggcgaagtgaagggcacgctgtacccaccccaacttgaact

SEQ ID NO: 15470 - DNA, 1002 bp, Homo Sapiens
  misc_feature (807)..(816): n is a, c, g, or t
  misc_feature (818)..(835): n is a, c, g, or t
  misc_feature (927)..(927): n is a, c, g, or t
gggctgatttcatcaccacccattcccgattccacgtttcctttaagcggggctggcggagccgcaaggcggcaaggaactggattgcgattggtcagcacgtgcctcggtcggcggtacaattggctgaggcgctgggccttgggaagcattccccgacgggattggtcgtcgctctcgcagagcccgcctcccgcagtacaagcggcccccgggtcgggtgggaggaggggactccgggaggaggaacatggcggtggcggacctcgctctcattcctgatgtggacatcgactccgacggcgtcttcaagtatgtgctgatccgagtccactcggctccccgctccggggctccggctgcagagagcaaggagatcgtgcgcggctacaagtgggctgagtaccatgcggacatctacgacaaagtgtcgggcgacatgcagaagcaaggctgcgactgtgagtgtctgggcggcgggcgcatctcccaccagagtcaggacaagaagattcacgtgtacggctattccatggcctatggtcctgcccagcacgccatttcaactgagaaaatcaaagccaagtaccccgactacgaggtcacctgggctaacgacggctactgagcactcccagcccggggcctgctgcctccagcagccacttcagagcccccgcctttgcctgcactcctcttgcagggctggccctgcctgctcctgcggcagcctctggtgacgtgctgtccaccaggccttggagacaggctagcctggccacagaattaaacgtgttgccacaccgnnnnnnnnnncnnnnnnnnnnnnnnnnnnccatgtcggccgccctcgggcctcgagaaagttttctagaacctttcgttttggcggcgccgggcccaagtagggtaagggaaacatgggtncaatagcttggtttccttagggaagaatccgtgggcccatggaccaaagggcctttgggaattccccaccacaat

SEQ ID NO: 15471 - DNA, 428 bp, Homo Sapiens
cgtcgttgaatgttaattccgtagtgtctaagataatggtcgtggcatagtacatcagtgatataccgattaagaatactcttggctgtgatgggtactgctcttcatgtcctctttaccactagtgatccattccttaccgattagctgccctatcttgtaccgagcgctagatctatcatgcttaatgtaagcttgatagtgtgaaaaaccttagacaaacttaccaacatgcactcacacactgaagatttgaggcagcttacacactattgtaggatatattaagcaagtggataaaaaatagaggtgaggtacttacagatgcagcctactattctcttgtcgcagatggaggggactaaattagggtcttccctggtgcctgaagctccctttggggccagtacattgtatgggtcctgaag

SEQ ID NO: 15472 - DNA, 844 bp, Homo Sapiens
  misc_feature (699)..(708): n is a, c, g, or t
tttgtcaccgtattgtattagagacattttattgaaaatgcgaaaataggaaatgtattatagcctaaaataaattacataacatatacagcatatatttatatctttaaaatatttttttgtttaggttctttcagtctaggaattctgactaaatcaatttagtgaaccgtgtctataatttttttaaaggaaaaaacctgctttccaaaacttagaaaaatatactgcactgcatggatttcgaatgcgttatttcagggaggaccacatagtgactctggtatcgttataaaatgtcttgctttatcgtatggtgtgggagggaagtaccgtagtacattctcaattacctgcaccgcagagttatgactaaggatagcagaaccaggtaatatatctacttcaaaagttaccctacagcaacctggcattagaatgctggatgagacttaaagcttcagttcactgtaaaaactaaaatgcaaagttaggatgctccatgtgactcgctctaatgcgaccttcaggaaaggcgagggaaaagccagccttcaggaaaagtcatgcggcagggtctccccagcacttatacttacttaagcagcttaaacacttccgagtctccacagcactctgatacttacttaaacagctcttttaacctgccctagtattcttaagtgcagcatatctaannnnnnnnnncctcagtagtttgaacacttgctggctatttcttctgtccaagttctcagtaacttcggcctgtgtagtcagtggttctacacagccgacactacttcttacataacacttgtctctctgccttcccagaaatata

SEQ ID NO: 15473 - DNA, 606 bp, Homo Sapiens
accggcatgaaatgtcttgctttatcgtatggtgtgggagggaagtaccgtagtacattctcaattacctgtaccgcagagttatgactaaggatagcagaaccaggtaatatatctacttcaaaagttaccctacagcaacctggcattagaatgccggatgagacttaaagcttcagttcactgtaaaaactaaaatgcaaagttaggatgctccatgtgactcgctctaatgcgaccttcaggaaaggcgagggaaaagcaagccttcaggaaaagtcatgcggcagggtctggaatctggagatgcgcttttgtgacaatttaaaaaagttagctcatgtatatacacggtgggggtgagaactgacagcttgctcagatctaggagaacgcagagtgaaatgctatcattcaaccatgtcagtttgctgcccccggagcatttcaaaccaaacctttctacgggagattctgtccatctgtcagcctgctgtggtcacaggtctccgttcctcagtgtgaacggggactccgggctgcagggtgccacccgcctcctgcatgtgtggagtagatggtttcgaactccgtggcggtcgccat

SEQ ID NO: 15474 - DNA, 1059 bp, Homo Sapiens
  misc_feature (536)..(548): n is a, c, g, or t
  misc_feature (561)..(646): n is a, c, g, or t
  misc_feature (653)..(653): n is a, c, g, or t
  misc_feature (783)..(791): n is a, c, g, or t
ctccgttagacctccatgctgtccccagtcttgtccattccatgctgctgtgttacaaactctcagaggtagtttgcaggggaggaaggggaatatgattttaaaaacaaaattatttacaacaaccaaaaattcttaggatcacctgacctttgtaatgttatttatgttggggagggaggggggctgagaaggggaaatcagcagtgtgcaacatctttataatttgtactttaattacaaatcacaaggaaaccaataagttgaaatcctatataacaggtttatatatatagaatatgtatatttgaagccctctacagactgagtctatgttttactaattctttgttcactgtgttacccatcttggaataagttgtgaatgtcagctccctctctctgaggcctccagacttagctcctcaggagggtaatgagccaaggttgagtgtttccatacaatgcttttacctttgatcccaggagaatcagaaactccaacattttggaatcttcaagggcacatactgagnnnnnnnnnnnnnttgtttatgagcnnnnnnnnnnnnnnnnnnnnnnnnnnnnnnnnnnnnnnnnnnnnnnnnnnnnnnnnnnnnnnnnnnnnnnnnnnnnnnnnnnnnnngaccttngggacgcttcggcccccaaaaaatttttcaaaacaacccatttggcacggggccccggcaggaacgggacccgggaaaaacctgtttctaaggaaagctgggtttcgcccagggctaaaaatccccgccnnnnnnnnncccccggggccaacccaagagggggaccaaagcccattggggttccaagcgcatgaaggccatccgaccccgaaatcaaatgaagcccgatcttaaattaccccccgccctggtattaattcaataagggttggtgctaaattgaaaatttctcgccaacggggaagcccaaacccaaaatggcctggggggacacttgaaatcccttgggcgggcattggccaaactatgaatggcccccggggtataaaaaattggggccgaaggg

SEQ ID NO: 15475 - DNA, 525 bp, Homo Sapiens
  misc_feature (442)..(442): n is a, c, g, or t
  misc_feature (470)..(470): n is a, c, g, or t
ccctctgagagaggaacagaggaggaccctgtattctctgttgagaattcagggagggactcagatgcccttagacttgaaagtacggtggttgaggagagcaatggttctgatgagatggagaattcagatgaaaccaaaatgtcagaagaaatactggctttggtggatgaatttcaacaggcatggcctttggaaggctttgggggtgcactagagatgaaagggcggcgtctagacttacaaggaatacgggtgctgaagaaaggtccccaggatggaagtggccagaaactcttgctatggagactgcagaagtgaagatgatgaagcaacagaatggattacattccaggtcaaacgtgtaaagaaacccaaaggagatcataagaaaactcctgggaaaaaagtagaaacaggtcagatagaaaatggacatcgnttaccaagcaaacctagagatcactggncccaaggtaggcatctcctggggccacaaggaaaaaaccgtgactaccagcgtct

SEQ ID NO: 15476 - DNA, 984 bp, Homo Sapiens
gtttaaaatgcccatgcgcgttttattaataaaaactaacagtgccaagttaaacaagtcaaacaattaaagtctctttatataccataaaatattacagaaaagtttatttgtgtttcaataaaaagactatcgttttagaacaggcagctaatagcaactgtgcagttaatgggttttgtgaataaattttaaaagagactactgcctgtccttaaattcctttttctttttataaaaaaagaactattaaaaatgattgacaaattttgagttaaaaaattgttaaaacattctctatatttaatttcaattttataatagattacaggaagatgcttatgaaacaaatacatttgtttcagtacatgtctttaaatgatagacttataagtatgtaaacaactatataataaaaggtttccaaacgctgcctgtaagaaatcaggcaaattttaccataagcaataaaccattccaagccttccagacagtctccatagccgcaccagcatggcaataagctttaaccaaacgaaaacaaacaaacaaaagcacttcgcaatttgttgctgcaaaacagggagagaaaagagtgtacaaacttgatggaatcacaacagtcaatataatttaagggacaataaagtcaataaggttgatggtgtttattgtttaaaaagttgaattctgctgtttgcttggggctgtttagaaagttgcatatctgcagttagcttggacaccgtgaccactgaacaaactccacagagtctagctatccgccagcaggggtgccgtccaaacacacggcaaataagcggcatcaggggctcaccatccacaacaggaggtgtgtttattttcatggatgtggttgaaatacaatttcttcagcaaactcagcaaaaacttttcaggggcaaaaatgaactctgcaccgacgcgtgggtcgacgatatcccgggaaaccgacgcgtaccg

SEQ ID NO: 15477 - DNA, 490 bp, Homo Sapiens
  misc_feature (337)..(345): n is a, c, g, or t
aacgtcatatagcggcatcaggggctcaccatccacaacaggaggtgttttattctcatggatgtggttgaaaaacaatttcttcagcaaactcagcaaaaacttttcaggggcaaaaatgaactctgcacttaaagaaaaatagcaaatgaaaacacaaaatcctaacaagtaaataaacgctctgcatcagcacactggtatcaaaacacacatccacagcacgtcctaatcctacgggaaacaatccttgcttatcagaggtgcatatctaaattcaatagcttaccaatatcttcttgggagtagtccaaaaggaaacagaaaacccacattnnnnnnnnngtttcttttcgctaaacgttttcctgaagccgaatctgaagtggggaggacgtcagtcgtcctcgtcattctcgttgaagtcatcgtcctcctcgtcgtcctccccgacgtaggacaccggagtctccacgcagaacgcgcctaa

SEQ ID NO: 15478 - DNA, 627 bp, Homo Sapiens
gggctttcacattcgggaagcgtcgggattaggtgaaagtacgtagttgtctttcgtaagttaaaatgataattgggccgaaacttactgccttacctaaaaggcagcgcagtcaggatattggtaggtcgggggcggctttggaaacccttaagtttacaagcatgcgcggacttgagtgctcattaggtcgccgggcgtccacgtgcagccctggaccctgaaccccggcgtgcgtgggccgtgggccctcggggaaaggttccgtgcactcggggactccggtgaagcctgttcagccgtctgtgtcatgtggccatcttgagtctactctgtcgctcttgtgccctagcaccccgagaaccgtcagtttgagccagatggaagctgagctgaacacattacgatggatgatggaaacataagactatcaagaaatccaagtggtaatgggcgaagtttattcagcatccggcaatggacttatcgtagttggggaaacgggtgttccgaataatatcctggaagttatcaggacacctattttaaatataggcctgaattttgtaaagtaatatttaaggtggtccgtgataattaaataaaatgcttaattcatgtggctaa

SEQ ID NO: 15479 - DNA, 800 bp, Homo Sapiens
  misc_feature (330)..(357): n is a, c, g, or t
gggggaatagcgtcatcagttctataagagagcgtgtgccgaaggcctcggcctttcacattcgggaagcgtcgggattaggtgaaagaagctgagctgaacacattacgatggatgatggaaacataagactatcaagaaatccaagtggtaatgggcgaagtttattcagcatccggcaatggacttatcgtagttggggaaacgggtgttccgaataatatcctggaagttatcaggacacctattttaaatataggcctgaattttgtaaagtaatatttaaggtggtccgtgataattaaataaaatgcttaattcatgtggctnnnnnnnnnnnnnnnnnnnnnnnnnnnncatgttgtccgccgcctccctcctcaagaatctttcaacaccattctgttgggcggcggccccaggaaggagaagatcatggtcatagttgcttcctagaacatcctggtcatgactgctggttgtatccccaccaataaaaaccccccggcggcagcccgttgtgatgaactcctcaagatggagttcggaggtcattgctggatttatcaagagggcgtcccggcgatctctattaataaattaccccgccgtgcttgctcattttaggaagaggtgtaggtaattccataaatctttccccgccgaggtggaacgcccatccacggaccgggcatggaagcaccctataatccaccaggcgggaatcaacctccctttgccccgcccttgtcaaaataaattttcttccccccccggaaaacaaaagcggggcgggaaag

SEQ ID NO: 15480 - DNA, 601 bp, Homo Sapiens
ccgtgcagtctccttcctagccaggaagagcatatcctgtttattggcaagctgtcaccatttaaatggtatcagattctgacttgcacaagtaacattcactgttaaaaacctagagggtgccgggttattgggcaaaatttctaaaccgttgttcaatgtttctaggaagctgagctgaacacattacgatggatgatggaaacataaggtacattccttttttgatatttctgagttaatctgaaaccgcttagcggcaggacgttggaaagctaaagttggcccgttttgctggcttttgtagtttgagttaacaaccaactgaattagctgataagatctcaaaacagtgaggtaagtacacagctcggagttttataatgctttttttctcttgcagactatcaagaaatccaagtggtaatgggcgaagtttattcagcatccggcaatggacttatcgtagttggggaaacgggtgttccgaataatatcctggaagttatcaggacacctattttaaatataggcctgaattttgtaaagtaatatttaaggtggtccgtgataattaaataaaatgcttaattcatgtgaa

SEQ ID NO: 15481 - DNA, 1197 bp, Homo Sapiens
ttgtatccgtaatgtctcccggaacctctgctcagcctggtgaaccacacaggccagcgctctgacatgcagaaggtgaccctgggcctgcttgtgttcctggcaggctttcctgtcctggacgccaatgacctagaagataaaaacagtcctttctactatgactggcacagcctccaggttggcgggctcatctgcgctggggttctgtgcgccatgggcatcatcatcgtcatgagtgcaaaatgcaaatgcaagtttggccagaagtccggtcaccatccaggggagactccacctctcatcaccccaggctcagcccaaagctgatgaggacagaccagctgaaattgggtggaggaccgttctctgtccccaggtcctgtctctgcacagaaacttgaactccaggatggaattcttcctcctctgctgggactcctttgcatggcagggcctcatctcacctctcgcaagagggtctctttgttcaattttttttaatctaaaatgattgtgcctctgcccaagcagcctggagacttcctatgtgtgcattggggtggggcttggggcaccatgagaaggttggcgtgccctggaggctgacacagaggctggcactgagcctgcttgttgggaaaagcccacaggcctgttcccttgtggcttgggacatggcacaggcccgccctctgcctcctcagccatgggaacctcatatgcaatttgggatttactagtagccaaaaggaatgaaagagagctctaaccagatggaacactggaacattccagtggaccctggaccattccaggaaaactgggacataggatcgtcccgctatgatggaagtgttcagacagtttataatagtaagcccctgtgaccctctcacttaccccgagacctcactttattacaagatctttccaaatacccaaatgtccctgcaagcccgttaaataattccctatgctacccttaataacatacaatgaccacatagtgtgagaacttccaacaagcctcaaagtcccttgagactccccaatacctaataaggcatgcgaaatgttctcatgaactaccccacaacacgcctaaaactcaaaacacccaaaaatatctcctccaatgtcctgagacatgaacccaaaaagagacccacaataaactcgtgacttgtcccctca

SEQ ID NO: 15482 - DNA, 458 bp, Homo Sapiens
  misc_feature (130)..(130): n is a, c, g, or t
cctcagtgccagcctgtgtcctcttcatctgtccccccattctcttgaccaaatatatatggagcaccatagtagaaaggactgtttttatcttctaggtcattggcgtccaggacaggaaagcctgccnaggaacacaagcaggcccagggtcaccttctgcaatgtcagagcgctggcccgggacaggaaggctggcaatcttcgctgggctgagagataagccgcagctgcaccgtggagtggggactgggtgaaactctgggcctgtgtggttcaccaggctgagcagaggttcctgggagaaatcgggctgccaggcggagtcctgcgtttatccgaagctgccacgccctaagcaaacctcacttcttttccttagatgatgtgttttgcctggtggaaggattgctggcagttgtggagaacttaaagtccccttccaggccacatcttgc

SEQ ID NO: 15483 - DNA, 1684 bp, Homo Sapiens
  misc_feature (744)..(753): n is a, c, g, or t
  misc_feature (829)..(910): n is a, c, g, or t
  misc_feature (974)..(998): n is a, c, g, or t
  misc_feature (1009)..(1025): n is a, c, g, or t
  misc_feature (1112)..(1120): n is a, c, g, or t
  misc_feature (1154)..(1164): n is a, c, g, or t
  misc_feature (1294)..(1343): n is a, c, g, or t
  misc_feature (1491)..(1512): n is a, c, g, or t
  misc_feature (1561)..(1561): n is a, c, g, or t
ggcggccgctgcttctttcccgagcttggaacttcgttatccgcgatgcgtttcctggcagctacattcctgctcctggcgctcagcaccgctgcccaggccgaaccggtgcagttcaaggactgcggttctgtggatggagttataaaggaagtgaatgtgagcccatgccccacccaaccctgccagctgagcaaaggacagtcttacagcgtcaatgtcaccttcaccagcaatattcagtctaaaagcagcaaggccgtggtgcatggcatcctgatgggcgtcccagttccctttcccattcctgagcctgatggttgtaagagtggaattaactgccctatccaaaaagacaagacctatagctacctgaataaactaccagtgaaaagcgaatatccctctataaaactggtggtggagtggcaacttcaggatgacaaaaaccaaagtctcttctgctgggaaatcccagtacagatcgtttctcatctctaagtgcctcattgagttcggtgcatctggccaatgagtctgctgagactcttgacagcacctccagctctgctgcttcaacaacagtgacttgctctccaatggtatccagtgattcgttgaagaggaggtgctctgtagcagaaactgagctccgggtggctggttctcagtggttgtctcatgtctctttttctgtcttaggtggtttcattaaatgcagcacttggttagcagatgtttaannnnnnnnnnaacaacattaacttgtggcctctttctacacctggaaatttactcttgaataaataaaaactcgtttgtcttgtcnnnnnnnnnnnnnnnnnnnnnnnnnnnnnnnnnnnnnnnnnnnnnnnnnnnnnnnnnnnnnnnnnnnnnnnnnnnnnnnnnncctaaccaaaaacaccgcaagagcacataccaaaacgaaatcctcaatcattacccgggggacnnnnnnnnnnnnnnnnnnnnnnnnntttttgggcgnnnnnnnnnnnnnnnnnaaaaaatctttttaaaaaactctttttcttggccggccgccccccccaggggaaaagaaagacacggggaaacgactcttttccccnnnnnnnnnccccggggagaaaagaaccggaggggtttgttannnnnnnnnnnaaataaataaaacacgcccggggggggaaacaccgcaggctcctttaaaaaaaatccaccaaaagggcccctttccgcggcggcccccacccgcgtgggccccttctcgcgagcaaagggattcctacannnnnnnnnnnnnnnnnnnnnnnnnnnnnnnnnnnnnnnnnnnnnnnnnnggctccgttgtacggaagagagaggggcgggagaacttctctacaaaaaaattcttgtccccgccgctatgtggaacacccactccccacaacacctagtgtactgctcaacaaacacttgattttcgcccatgcgggcaactcttannnnnnnnnnnnnnnnnnnnnnggcgagataaatatactttcccgccgcgggaggaaaaacacgcgccggngaaaaaaattaatttctttaattattcgccaccccatttataacacacaagagcgggggggaccacacccccccgccgggtgttgtgggcgcacacaaaagaatatattttgtttttaataag

SEQ ID NO: 15484 - DNA, 873 bp, Homo Sapiens
  misc_feature (14)..(14): n is a, c, g, or t
  misc_feature (470)..(479): n is a, c, g, or t
  misc_feature (555)..(651): n is a, c, g, or t
  misc_feature (653)..(733): n is a, c, g, or t
  misc_feature (735)..(740): n is a, c, g, or t
  misc_feature (743)..(743): n is a, c, g, or t
  misc_feature (748)..(750): n is a, c, g, or t
  misc_feature (752)..(755): n is a, c, g, or t
  misc_feature (760)..(768): n is a, c, g, or t
  misc_feature (785)..(785): n is a, c, g, or t
aaaggttgaagganagaagagagagtgagactgtagagattgatttaactgtcttcattggtttttttctgtcggagtaaggaaggtccagccagacaggacctgaaggaggttgcttaggaatgtctgataacttgccctagggttattgccctgacagtggaggaaaggttccaaaccacttccactgagctgggacattacatccacaggtttctcatctctaagtgcctcattgagttcggtgcatctggccaatgagtctgctgagactcttgacagcacctccagctctgctgcttcaacaacagtgacttgctctccaatggtatccagtgattcgttgaagaggaggtgctctgtagcagaaactgagctccgggtggctggttctcagtggttgtctcatgtctctttttctgtcttaggtggtttcattaaatgcagcacttggttagcagatgtttaannnnnnnnnnaacaacattaacttgtggcctctttctacacctggaaatttactcttgaataaataaaaactcgtttgtcttgtcnnnnnnnnnnnnnnnnnnnnnnnnnnnnnnnnnnnnnnnnnnnnnnnnnnnnnnnnnnnnnnnnnnnnnnnnnnnnnnnnnnnnnnnnnnnnnnnnntnnnnnnnnnnnnnnnnnnnnnnnnnnnnnnnnnnnnnnnnnnnnnnnnnnnnnnnnnnnnnnnnnnnnnnnnnnnnnnnnncnnnnnnccnccccnnnannnntcctnnnnnnnnntctttttttgggttctnccccctttttttgtgcgcggcccgcgcccctttgtggttccataaaagaacatcggggttcgttccaaagtgggtgttttcccccccc

SEQ ID NO: 15485 - DNA, 721 bp, Homo Sapiens
agatgccgtatgcgccatcgtgtggtgatgaactcattgttaagcacaagttcacgaaagcctacaaaagtgtggagaggttccttcaggaggatcaggccatgggtgtgtacctctacggggtagctgatggtgagtgaggacgccagacagcagcagctcgcccgtaggtgcttcgagcggaccaaggagcagatggataggtcctcagcccaggtggtggccgaaatgttattttaacgaggaaagaccacagcaagattctttcattcgtctcctcctagcctgggggaccaggctcgaactgaccctggacatcaaaggagggattatgtggctgctaaagccatcggcccacagccctgttcacatcttggtgcttctctttcccagaggctggtcccagccaggcacacacaaaaggcagattctcgtaaacgcagcctccctccctggaggctgcctcctgccctggatctggagtggagctgctctgagattttgagttcttctgcagagatgattaaatatatccaagagacattggaaaacctgctgaacattttacattggtctgctcagcacatggctggatgcggatatttctataattccagaaagtcacacagctcctctgtatgagaccagtgggcgccatttaaaagaacaggatgagaatctaagatatattattaataaatgtaatggaaaaatattttgt

SEQ ID NO: 15486 - DNA, 839 bp, Homo Sapiens
  misc_feature (271)..(271): n is a, c, g, or t
ttattggaaccctttcaaaattaaatcccaggctaagagaaacattccaccaagcctttcccccatttaaagtagcagcccatcttccaagccaattaactggacttttaaaacagtagatggtccttcctgaatggtatcttagcactattttacgcaaaccggataaacctgctgttcatgccacgttgacaggccacgtcacacgctgctgtgacccgtccggaactgaaagggcctggtctctcctttcctgtgataaaatcctctntgaaagtgagagcaaaggcacacagaggtgcgcgctcacaagaaatcctcccggtgactgggtaatcaatgttactgctgtttcctttgcaggaaagaacacagcaagattctttcattcgtctcctcctagcctgggggaccaggctcgaactgaccctgaacatcaaaggagggattatgtggctgctaaagccatcgccccacagccctgttcacgtcttggtgcttctctttcccagaggctggtcccagcaaggcacacacaaaaggcagattctcgtaaacgcagcctccctccctggaggctgcctcctgccctggatctggagtggagctgctctgagattttgagttcttctgcagagatgattaaatatatccaagagacattggaaaacctgctgaacattttacattggtctgctcagcacatggctggatgcggatatttctataattccagaaagtcacacagctcctctgtatgagaccagtgggcgccatttaaaagaacaggatgagaatctaagatatattattaataaatgtaatggatttttttttgt

SEQ ID NO: 15487 - DNA, 385 bp, Homo Sapiens
ggacttgaaccttctcccaggtaggggcaggaggagccacatgagagagggagaaggaccgcgtttacctttagagttttgttttgttttttccttctgagtttgctgttggtgcaggaataagggaaaggcccaaggtatccaagcctggggaagggcaggccagccagcacctctgccttctcagggacaagagtagtcctttaccaccctcactctgcctgtcccctctcctactctacagcattaaagactgtgggaccaggaccctaagtctcctttccttctgggtggggagttctggggttcttggtgtgtgggagaagttttataattgcttccaaacagctgggtttaaatataaaatagacacactcaaaaaaaa

SEQ ID NO: 15488 - DNA, 1341 bp, Homo Sapiens
acgcaagcttcgaatggcagctccaatggccacagcctcatcacgggattgacagtttacttgtgggctctgctaaaaagatcctgtacagtctgctgaaccttgggcatcctagtcatgccacccacaagaatcacttctcctatgtcactcttgctgacttctgcatcttgcatagctttttggcatggagcgatagtccttctgattagatcagtgacaatcccttcaaattgagcacgggtcaacttcatattcaaatgcttgggtccagaagaatccattgtaagatagggcaaattgatgtcagtctgcacagatgaggagagttcacatttagccttttcagcagcttcccgtaccctctgaagtgccatgttgtctttagtcaaatcaacccctgtctctctcttgaactccttcacaatgtgccgtagcaaggcctggtcaaagtcttccccacctaagaaggtatccccatttgtggatttcacctcaaatactccgttctgaatgtccaggatagaaatatcaaaagttccaccacctaaatcatatacagcaatgactttgtcttctgatttgtctagaccataggcaagagcagcagctgtgggctcattaatcacccgaagcacattcagtccagatatctggccagcatctttagtggcctgtctctgcgagtcattgaaataagctgggactgtgatcacagcattttttgctgtgtgccccaagtaattttctgcagtctctttcatcttcatcaacacaaatgctccaatctgactcggagaatacaatttcccatgagcctcaacccaggcatcaccattggaggcacggacaattttaaagggaacatttttaatgtctttctgtacttcaggatcatcatatcgccggccaatgagacgcttggtagcataaaatgtattgtttgggttggtgacagcctgtcgcttggccggcattccaacaagtcgctcaccatctgctgtaaaggccacaactgaaggggtggttctggcaccttcggcattctccagcacctttgcttgtttaccttccataactgccacgcaggagttggtagtacccaaatcaataccaacaactgctcccttgattgcttctgatgcataatcccgccttgaaacaagtctaaaagcctcatgactaaggccattccagctatcctggtggcgggcggccgtagggccccgggaggctgcggcgcccacgagacgggctgctgcagctcggctggcacttatcatggcggataaatggaggagtacgaggcagcaaacaagcgctccgacggcaaagagcccc

SEQ ID NO: 15489 - DNA, 1037 bp, Homo Sapiens
cggcagtactatagcggtcattttgtttcgaggcctgggtggcgaattcggcacgagggataaaactcaaacctacccagaccttccccccactccatggaagtccttgggatgggcgtctgctctggacaccccaaagagctcctgccctctcagccctttattcaagcctcagatttctgctcatgatctacatagatttggaaactgttttcctctgttttggtctcttgggcaacatttttggcccaagtttgggcaacatttggcccaagtttgggcatttaggcagtagctgtatgggagaataaagagtaagaggaacatattcccacagccatgaagggtgaaacgggcaccttgtcgcctagactagggctgcctggtcagtcccaggtgaggccaagggctttctggccatctcagggaggggccaccaggttcctcccctcaccccatattccatcaccttcctcctctgctctgggtggtaagggaagccctcctggttcccacaggctatgatgctgcatggcagaggcaggtataacacagcactacatattggaaattttatatttttctaaataccaatgcagttttgctacggttacaattttgaaatattaactgagcctcaaaatcaccctttctgtcaagcatatcttggcctctcccatgtctcagtgttgcctgcatttctcccaggacttgggggtggggtgaaaagcgtacaaaagatacttaaaagggctcctggggtacacaagcccagcaggtcctgagtgaagccgtgggccctccaaatgctcgttttatagcaacctctctctaccctagttctccaaattcacttctgccttcctcaggtttgatatctggcaggtttgactatccagaggaaattaaatatttttatataaaattaaattataataaatattgccaaatgctttcctttagcattgttccaagtctaaatgttaacctcaagctactgcaatttagacaatgaaatgggctgggtctacccccag

SEQ ID NO: 15490 - DNA, 1176 bp, Homo Sapiens
cgccacccgcttcctcgccgcatggggcccgcccgctggcccgtttccggtccggtgggtacaagatgacggagccgggcgcctctcccgaggacccttgggtcaaggtggagtatgcctacagcgacaacagcctggaccccgggctttttgtagaaagcacccgcaaggggagtgtagtgtccagagctaatagcatcggttccaccagtgcctcttctgtccccaacacagatgatgaggacagtgattaccaccaggaggcctacaaggagtcctacaaagaccggcggcggcgcgcacacactcaggctgagcagaagaggagggacgccatcaagagaggctatgatgaccttcagaccatcgtccccacttgccagcagcaggacttctccattggctcccaaaagctcagcaaagccatcgttctacaaaagaccattgactacattcagtttttgcacaaggagaagaaaaagcaggaggaggaggtgtccacgttacgcaaggatgtcaccgccctaaagatcatgaaagtgaactatgagcagattgtgaaggcacaccaggacaacccccatgaaggggaggaccaggtctctgaccaggtcaagttcaacgtgtttcaaggcatcatggattccctgttccagtccttcaatgcctccatctcagtggccagcttccaggagctgtcagcgtgtgtcttcagctggatcgaggagcactgtaagcctcagaccctgcgggagattgtgattggcgtcctgcaccaattgaaaaaccagctttactgaccggttcttggaaacctggagaacagccaacaagaggcccttgaatctctacgtggccactgaactgctgggcccgggagactggactacaacacctcacactggtcagctggtttctacttggtgtttggtttttcccagccccattttatcttcagcggagccgcggtgtttgttttgtgaaagcttctgattaatttattatattgacgataaaactcaaacctacccagccttccccccactccatggaagtccttgggatgggcgtctgctctggacaccccaaagagctcctgccctctcagccctttattcaagcctcagatttctgctcatgatctacatagatttggaaactgttttcctctgtttt

SEQ ID NO: 15491 - DNA, 1364 bp, Homo Sapiens
ggggcatttgcagagtgagacaaagcggagaacgctggtgggcctgttgtggagtacgctttggactgagaagcatcgaggctataggacgcagctgttgccatgacggcccaggggggcctggtggctaaccgaggccggcgcttcaagtgggccattgagctaagcgggcctggaggaggcagcaggggtcgaagtgaccggggcagtggccagggagactcgctctacccagtcggttacttggacaagcaagtgcctgataccagcgtgcaagagacagaccggatcctggtggagaagcgctgctgggacatcgccttgggtcccctcaaacagattcccatgaatctcttcatcatgtacatggcaggcaatactatctccatcttccctactatgatggtgtgtatgatggcctggcgacccattcaggcacttatggccatttcagccactttcaagatgttagaaaggtcaagccagaagtttcttcagggtttggtctatctcattgggaacctgatgggtttggcattggctgtttacaagtgccagtccatgggactgttacctacacatgcatcggattggttagccttcattgagccccctgagagaatggagttcagtggtggaggactgcttttgtgaacatgagaaagcagcgcctggtccctatgtatttgggtcttatttacatccttctttaagcccagtggctcctcagcatactcttaaactaatcacttatgttaaaaagaaccaaaagactcttttctccatggtggggtgacaggtcctagaaggacaatgtgcatattacgacaaacacaaagaaactataccataacccaaggctgaaaataatgtagaaaactttatttttgtttccagtacagagcaaaacaacaacaaaaaaacataactatgtaaacaagagaataactgctgctaaatcaagaactgttgcagcatctcctttcaataaattaaatggttgagaacaatgcataaaaaaagttgcacaagttccttattttccttaatatttcacttctatttaatacaagctgggacataaaaattctgttggcgatacctgggggaagatgtgagaaactaatgctgaattcagcttatacatgatgaaaagaaaaaccagacaaaaggagcacataaatatgcatacagtgtaactgttattattttaatacccacaataagggatttttgttagcatgtttagggggaacgaggattggtgggatccttgggccacaggaatctgaggcaacggaagatatatagagtgatcgtccccctgccgaaggaacctggcatctgtcaagcagatgctgcag

SEQ ID NO: 15492 - DNA, 770 bp, Homo Sapiens
  misc_feature (695)..(719): n is a, c, g, or t
gaagatcccttgctgacttaccggttcccaccaaagttcaccctgaaggctgggcaggtggtgacgatctgggctgcaggagctggggccacccacagcccccctaccgacctggtgtggaaggcacagaacacctggggctgcgggaacagcctgcgtacggctctcatcaaatccactggggaagaagtggccatgcgcaagctggtgcgctcagtgactgtggttgaggacgacgaggatgaggatggagatgacctgctccatcaccaccatggctcccactgcagcagctcgggggaccccgctgagtacaacctgcgctcgcgcaccgtgctgtgcgggacctgcgggcagcctgccgacaaggcatctgccagcggctcaggagcccaggtgggcggacccatctcctctggctcttctgcctccagtgtcacggtcactcgcagctaccgcagtgtggggggcagtgggggtggcagcttcggggacaatctggtcacccgctcctacctcctgggcaactccagcccccgaacccagagcccccagaactgcagcatcatgtaatctgggacctgccaggcaggggtgggggtggaggcttcctgcgtcctcctcacctcatgcccaccccctgccctgcacgtcatgggagggggcttgaagccaaagaaaaataaccctttggnnnnnnnnnnnnnnnnnnnnnnnnntaagagaagttattttctacagtggttttatactgaaggaaaaacacaagc

SEQ ID NO: 15493 - DNA, 1192 bp, Homo Sapiens
cacaagtcctcatggccacttctcggccatccgcgttaaccaggacggtgcgcaagctctcgcccgtgccccagctgctctggcccttccacaccagcttcgagggaggactttgggccacccccgcaccaggctgcgacacaccagtgaccatgctggccggcgcgcaggatgtacttgggcgtgaacttgtaggcgatctcctccccgctccaagacgctgcctcgttgattcggccagttccccagagactgatccattgtccgagttgttcttgagctgcacaaacttgccctccaggtcgatctcctcgatgctgacgctgcccgaggccgaggcctgctgggccaggtggaagccaccagctgccacccgtgcccgtgcccaggacgcttgggccagctgcccaagggctcctccacctgccagccgcttccgcttactgcaggcccaggcgcccggtggcggacaagctgccgctgctgctcgaggtggctcagtgagacggtgacgcgcgaggatgggctgggggacagcttcagcctctcctcctcgccctccaggagcttccggtaggcgtttgatctccatgtccagggccagcttcacgtccagcagctcctggtactcgaccagctgctgctgcatcacgtccagcatctccggtcatctcctgctccttggcgtccaagcatcttccggaacttgtcccgctccccggccatggcactcctccagctcccgaatgcgatcttcagcggcactggcctgcttctggaggccggagagctggtagctgagggactccaggcgcatgcgggcctccttcagctcctcgcgagccgcactggccgccttgtcgttctggtcagagctcagcttggcgctgtccagcttggcctggtaggtctgctccagctccagcttgtagagccgcacttgctcgtcgtgctggctccgcagctcctccagcgcctgtgccatcttgaagtcgtactcctgctgccggctgctgtccacctccaccaggcgccgctcgtgccgccgccgcgtctcccgcacctcctcctcgaacacactcttccggaagtccagctcctcctgcaggctctggcagcgtttctccaggtccacacgcatcatcagtctgataacaataatgaaaagctgagccccaaaccaggacagtga

SEQ ID NO: 15494 - DNA, 1061 bp, Homo Sapiens
gaatgcctggcgacccattcaggcacttatggccatttcagccactttcaagatgttagaaagttcaagccagaagtttcttcagggtttggtctatctcattgggaacctgatgggtttggcattggctgtttacaagtgccggtccatgggactgttacctacacatgcatcggattggttagccattcaacgcctccggaggcgttgaatggccggggagcgtgacaagttccggaagatgctggacgccaaggagcaggagatgacggagatgcgggacgtgatgcagcagcagctggacgagtaccaggagcttctggacatcaagctggccctggacatggagatccacgcctaccgcaagctcttggagggcgaggaggagaggctacgcctgtcccccagccctacctcgcagcgcagccgtggccgtgcttcctctcactcatcccagacacagggtgggggcagcgtcaccaaaaagcgcaaactggagtccactgagagccgcagcagcttctcacagcacgcacgcactagcgggcgcgtggccgtggaggaggtggatgaggagggcaagtttgtccggctgcgcaacaagtccaatgaggaccagtccatgggcaattggcagatcaagcgccagaatggagatgatcccttgctgacttaccggttcccaccaaagttcaccctgaaggctgggcaggtggtgacgatctgggctgcaggagctggggccacccacagcccccctaccgacctggtgtggaaggcacagaacacctggggctgcgggaacagcctgcgtacggctctcatcaactccactggggaagaagtggccatgcgcaagctggtgcgctcagtgactgtggttgaggacgacgaggatgaggatggagatgacctgctccatcaccaccacgtgagtggtagccgccgctgaggccgagcctgcactggggccacccagccaggcctgggggcagcctctccccagcctccccgtgccaaaaatcttttcattaaagaatgttttggaactttaaaaaaaa

SEQ ID NO: 15495 - DNA, 797 bp, Homo Sapiens
  misc_feature (740)..(740): n is a, c, g, or t
ggcggttgtctgtggccggaggctgatcagtgttctagaacagatcagacattttgtaatgatgcctgaaataaacactaaccacctcgacaagcaacaggttcaactcctggcagagatgtgtatccttattgatgaaaatgacaataaaattggagctgagaccaagaagaattgtcacctgaacgagaacattgagaaaggattattgcatcgagcttttagtgtcttcttattcaacaccgaaaataagcttctgctacagcaaagatcagatgctaagattacctttccaggttgttttacgaatacgtgttgtagtcatccattaagcaatccagccgagcttgaggaaagtgacgcccttggagtgaggcgagcagcacagagacggctgaaagctgagctaggaattcccttggaagaggttcctccagaagaaattaattatttaacacgaattcactacaaagctcagtctgatggtatctggggtgaacatgaaattgattacattttgttggtgaggaagaatgtaactttgaatccagatcccaatgagattaaaagctattgttatgtgtcaaaggaagaactaaaagaacttctgaaaaaagcagccagtgggtgaaattaaagataacgccatgggtttaaaattattggcagcgaacttttctcttttaaatggggggataacttaaatcatttggaatcagtttggttggaccattgagaanaattatacgaaatgtggaattaatgtagggtaaattgaattacaggaaaaaaattta

SEQ ID NO: 15496 - DNA, 979 bp, Homo Sapiens
ttttgcgggggcccgggggacctttttccagaaccccttttcggggcaaatttcccccttaggcccccaaatttttcccccttggggttaaatccccttccaatcccagcttttcttttttcccccccctaaggcccaatttccctttagccggggtcctatttcctcaaatccaaaggtattttgaagcttccccgccctcagagggtgtcttagctgaagtaccagatgtgggtgcaagatccacatatgcatttgaaatgacaatgtctccagtttcttggacttggtttgaaaatgaattctgtttccttccttccacatctcagtttgtagagtttgtcctggatatactggttttgcaaaacagagccttaattgccttgaatcttgacacatcattatctgcaaactgctgtaacacacgcctggcagaaaatccaaatgtacataatccatgtaatatgggcttgtcaaaacctgctagactagcaaagttaggatcaatgtgtaagggattccagtctccactgaggcggtacaaagcagcctgattaagagaggtggtatctgtaagtacagcatcaggaggtctattaggtatggctacagctaccttgactttgtctgatgtccgttttccaccaaagcctccagagccaacaagaaagagagagaactgattgtggcatataagttccttctcagaataagaatagacatccataataatcactacaccggatcctttatctaggacatcagcaacaactgcttcacattttaattttcctgctctgggaagtggtttatataactctaagtactgctctccatgaagaacctttgcaaagttgattgaaagtccaggaatttctgctaatcctccacccatcatagatttctgacctatgataactccgaaggtgggcaaacaggagaaatcagaacttccttcataaataaatttcaaatcttt

SEQ ID NO: 15497 - DNA, 663 bp, Homo Sapiens
ggatcttaataagatcctcaggggtctccaagttttcaaatgccatattctcatctgttacctcacccctccctcattaaatgctgtgaagtatgactgaaattgttatggactctttcagaagcttagttattaataaatacagagctaaaaatcaacagtaagatgcctgtaatgaattctgccactaagagaaaatgaatacaatctctttcttcacttctgaaataagattagctgtgatcttataggtgtctataaactcaaggtgatggtggtggttgcagaccatgacctgagccactacagaactggaagttccacttctttacctcaaatttctgtattcttgtatttctatatttggctttttttctaaatgacagataatgtataattgatagatagaatatgtgtagaataagtgccacattaacatggaaactatagaaatgtctgcattgtacttggtttattttaccctcattttgttggagaaaaaaagatacacattggtttcttcctatttttcccagctattgacctgaaaagtgggtctggaaaagtgtacaaaggccctgcaaaaggtgctgctgataaaacaatcatactttcaaatgaaaatttcatggaggtggtcctgggcaagcttgagcctcagaa

SEQ ID NO: 15498 - DNA, 1849 bp, Homo Sapiens
  misc_feature (43)..(106): n is a, c, g, or t
  misc_feature (1565)..(1578): n is a, c, g, or t
  misc_feature (1699)..(1785): n is a, c, g, or t
tctgatcctctgattccgaaatgctatgaagagaatcaaagannnnnnnnnnnnnnnnnnnnnnnnnnnnnnnnnnnnnnnnnnnnnnnnnnnnnnnnnnnnnnnngcaagaagagtgcatctagtgagagtgaagctgaaaatcttgaagcacaaccccagtctactgtccgtccagaagagatccctcctatacctgaaaatagattcctaatgagaaaaagtcctcctaaagctgatgagaaggaaaggaaaaacagagagagagaaagggaaagagagtgtagtccacctaactcccagcctgcttcataccagagacgacttttagttactagatctggcaggaaaattaaaggaagaggaccaaggcgttatcgaactccttccagatccagatcaagggatcgtttcagacgtagtgagactcctccacattggaggcaagagatgcagagagctcaaagaatgagggtatcaagtggtgaaagatggatcaagggggataagagtgagttgaatgaaataaaagaaaatcagagaagtccagttagagtaaaagagagaaaaataacagatcacaggaatgtatctgagagtccaaacagaaaaaatgaaaaggagaagaaagttaaagaccataaatctaacagcaaagagagagacatcagaagaaattcagaaaaagaagacaagtataaaaacaaagtgaagaaaagggccaaatctaaaagtaggagtaagagcaaagagaaatcaaagagtaaagaaagagattcaaaacataatagaaatgaagaaaagaggatgaggtcaaggagtaaaggaagggatcatgaaaatgttaaagaaaaagaaaagcagtctgattctaaaggaaaagatcaggaaaggagtagaagtaaagagaagtctaaacagttagaatcaaagagtaatgagcatgatcacagtaaaagtaaggaaaaggatagacgcgcacaatccaggagtagagaatgtgatataactaaaggtaaacacagttataaatagcagaacaagagaacgaagcagaagtagggacagaagcagaagagtgcgatcaagaacccatgacagagatcgcagcagaagcaaggagtaccatagatacagagaacaggaatacaggagaagaggacggtcacgaagccgagagagaagaacaccaccaggaagatcaagaagtaaagataggaggagaaggaggagagactcacggagctcagagagagaagaaagtcaaagcagaaacaaagacaaatacagaaaccaagagagtaagagctcacacagaaaagaaaattctgagagtgagaaaagaatgtactctaaaagtcgtgatcataatagctcaaataacagcagggaaataaaaggctgatagcagatcaaagtcccttctcaaaaataagaacaatagcagtcaggacaatgaattaaagtcctccatgttgaaaaataaggaggatgagaagatcagatcctcagtggaaaaagcaaaccaaaaatcagaaaggtcaagaaaatgaccatgtacatgnnnnnnnnnnnnnntttgatcatgaatcaagccctggaagcagatgaagacaaaagcgggatgagtgagttatataaacttacttccattctgtttcggattttaagttttgagagacgtgctaatgaatctccnnnnnnnnnnnnnnnnnnnnnnnnnnnnnnnnnnnnnnnnnnnnnnnnnnnnnnnnnnnnnnnnnnnnnnnnnnnnnnnnnnnnnnntgataatctgcaatctggataatttgtactgctaaagttttaataaactcgacatgttataaac

SEQ ID NO: 15499 - DNA, 732 bp, Homo Sapiens
gtattggagccatgggaataaaggttcaacgtcctcgatgtttttttgacattgccattaacaatcaacctgctggaagagttgtctttgaattattttctgatgtgtgccccaaaacatgcgagaactttcgttgtctttgtacaggtgaaaaggggaccgggaaatcaactcagaaaccattacattataagagttgtctctttcacagagttgtcaaggattttatggttcaaggtggtgacttcagtgaaggaaatggacgaggaggggaatctatctatggaggattttttgaagacgagagtttcgctgttaaacacaacaaagaatttctcttgtcaatggccaacagagggaaggatacaaatggttcacagttcttcataacaacgaaaccaactcctcatttagatgggcatcatgttgtttttggacaagtaatctctggtcaagaagttgtaagagagattgaaaaccagaaaacagatgcagctagcaaaccgtttgcggaggtacggatactcagttgtggagagctgattcccaaatctaaagttaagaaagaagaaaagaaaaggcataaatcatcatcatcttcctcctcctcatctagtgactcagatagctcaagtgattctcagtcctcttctgattcctctgattccgaaagtgctactgaagagcaatcacagcaaagagtaaagaaacatcggaaaaattcccgaaaac

SEQ ID NO: 15500 - DNA, 1330 bp, Homo Sapiens
  misc_feature (1020)..(1261): n is a, c, g, or t
aaaaaaacaccgagacgtttctgtgacttcactttcacctgctccaggggtcaaggacttgccttgcctgataaccagccagcaggctccgaatcaccatctccctcacatgttatccggcaagagtgaattctaccaatggaagccaggttaatgattacaattaatcttttactgtacattcccaaggctttagttttaaatgccactgtgcctttaacaaggttgtaaatattttatgcccaccagagatgtggtcataagatctgatcctgagccagagattcagatggcacaggaagtattcatgtattttaacactggggttttctttctttcatactgagatttttattcagtatgtatcctccagctcttaaagcttacctgagaaagctttaaatgagaaaaggaccatgcgattggtgctgtgttacatacacatactttcttggcttctgagtagctcaggtgtggcttttggctgcagatgttaaattttgataccatgtaaacctacccagcttctcagacttgggtcttgttttttgatgggaacagaggtgtttagagaaagcctctgagtatgcctttcagattttgaacaagcggccttttctaaacatcgacttctactactctctagccttaaaataacttctgcttagatccagggcccttctactggagataggaaaagtagaattcaggaattaaaagaattactctttattcaatttgaggaacttggtgaaagcccctcctcttatgacagccaggttcctgctggctagaccagcctattcaagcgctttgctaggggattgggtggtccacgcactccgctaatacagttctccaggtgtggaatgatgtcaatacgattgcttggccttttccccctgtgcctttgctcggtgctctggtttcctcagcaacactccttgtaaggggcagagacagggtccaccaactccccaagatgaagaagccccttcaggccagtcgtggtggctcatnnnnnnnnnnnnnnnnnnnnnnnnnnnnnnnnnnnnnnnnnnnnnnnnnnnnnnnnnnnnnnnnnnnnnnnnnnnnnnnnnnnnnnnnnnnnnnnnnnnnnnnnnnnnnnnnnnnnnnnnnnnnnnnnnnnnnnnnnnnnnnnnnnnnnnnnnnnnnnnnnnnnnnnnnnnnnnnnnnnnnnnnnnnnnnnnnnnnnnnnnnnnnnnnnnnnnnnnnnnnnnnnnnnnnnnnnnnnnnnnnnagagtttttttaagactcttaaaaaaagagcctgggcaatttttttaagactctgtcttaaaaaaaact

SEQ ID NO: 15501 - DNA, 1862 bp, Homo Sapiens
  misc_feature (68)..(68): n is a, c, g, or t
  misc_feature (72)..(72): n is a, c, g, or t
  misc_feature (126)..(126): n is a, c, g, or t
  misc_feature (158)..(158): n is a, c, g, or t
tcaaaattcagctgcagcgatggttacatgaatacatcatatgccgagggatgcagaaagagtaaagnaagncaggttgtctttctatccaggccactcttcgtttcccatgtactgcatgctgtntgtggcacttatctcaaagcagaaatgaaggnagactgggcaagactcttacgccccacactgcaatttggtcttgttgccgtatccatttatgtgggcctttctcgagtttctgattataaacaccactggagcgatgtgttgactggactcattcagggagctctggttgcaatattagttgctgtatatgtatcggatttcttcaaagaaagaacttcttttaaagaaagaaaagaggaggactctcatacaactctgcatgaaacaccaacaactgggaatcactatccgagcaatcaccagccttgaaaggcagcagggtgcccaggtgaagctggcctgttttctaaaggaaaatgattgccacaaggcaagaggatgcatctttcttcctggtgtacaagcctttaaagacttctgctgctgctatgcctcttggatgcacactttgtgtgtacatagttacctttaactcagtggttatctaatagctctaaactcattaaaaaaactccaagccttccaccaaaacagtgccccacctgtatacatttttattaaaaaaatgtaatgcttatgtataaacatgtatgtaatatgctttctatgaatgatgtttgatttaaatataatacatattaaaatgtatgggagaaccaaatccacacttgcaggcatttgtagtcaactgtaatcaaacaggtggtcaataatttaaaatctcacattcctttagctgactctacaagtagaggctggcagcaaacacaatatctctcttgattttggtgattccttctgcaaatttattttccagctcagtgtttccaatggcttttgctgcttgacacatttgtcgaagcaattcttccaggcgcctcatacaacgaattatgctgccttcaaagacatctgtcattttgcagatatgggcaaatgtagctccagttgcccaggtatatactacatccattaagtgaggtttaaatgagcttagataagtttcctcatcaatttccaatttggcttctgctgaaacttttgcaattcttttagcacattcctgcatttgacgaagtggtcctgctaattgttctgttaatttgggcatctcactagaattctcttgaaacacaaagcagcttaataatgctgttgcctgttctgcagaaaggtcattgaaaaggccattaaacatcatctcagttagaaggagctcatcagcactgcttatctcacaagccactcgtcctttcatctctattacatcagaagaagtagcaaatcccaaccttcttaaaacacgtttgcgacatttgagttcatccatttgtaggactgttcttgctttcttcagttctcgctttgcagatttaatatctattgcaatctgtgcttttttttcacaaagcgtatacacagtttccaaatttggatcattgtgaagtggatgagaatacattcgatgctcaaaagcttctactttctgaatgacttttttcagcccttgatcttgaatgcccatatcatcaatagggtctaataaggggatgccgtcaggaaaacgtttctgaacttcctgtattgattttaaaacactctgtctattgtccaccggccgaaggtctttaggaatgtaaagcctaacactgctgatagcagacaggagatgcaccaaaactgggacaacctgctctctcctttatgcatcaggtgatgagcgatactgtctg

SEQ ID NO: 15502 - DNA, 1185 bp, Homo Sapiens
gggaacgcagcggcggacctgtgaggggatccgacttgccggcagaacttacgctgcgggaccccgggcactgttgctgctgcgggaggcagatgtgattctccttgtcacgtgctctatcagggagaaggctgagcagaccatctggaaccgtttacatcagcttaaagccttgaagacaaggcggccccgctcccgggttcctctgaggattggaattctaggctgcatggctgagaggttgaaggaggagattctcaacagagagaaaatggtagatattttggctggtcctgatgcctaccgggaccttccccggctgctggctgttgctgagtcgggccagcaagctgccaacgtgctgctctctctggacgagacctatgctgatgtcatgccagtccagacaagcgccagtgccacgtctgcctttgtgtcaatcatgcgaggctgtgacaacatgtgtagctactgcattgttcctttcaccccggggcagggagaggagtcggcctattgcctccattctagaggaagtgaagaagctttctgagcagcggcggaaagaagtgacacttcttggtcagaatgttaatagttttcgggacaattcggaggtccggttcaacagtgcagtgcctaccaatctcagtcgtggctttaccacccactataaaaccaagcaaggaggacttcgttttgctcatcttctggatcaggtctccagagtagatcctgaaatgaggatccgttttacctctccccaccccaaggattttcctgatgaggttctgcagctgattcatgagagagataacatctgtaaacagatccacctgccagcccagagtggaagcagccgtgtgttggaggccatgcggaggggatattcaagagaagcttatgtggagttagttcaccatattagagaatctattccaggtgtgagcctcagcagcgatttcattgctggcttttgtggtgagacggaggaagatcacgtccagacagtctctttgctccgggaagttcagtacaacatgggcttcctctttgcctacagcatgagacagaagacacgggcatatcataggctgaaggatgatgtcccggaagaggtaaaattaaggcgtttggaggaactcatcactatcttccgagaagaagcaacaaattacagcacca

SEQ ID NO: 15503 - DNA, 468 bp, Homo Sapiens
ggggcggacctgtgaggggatccgactttgccggcagaacttacgctgcgggaccccgggcactgttgctgctgcgggagactgtgggctgtttagtgccatgcaccctttacagtgtgtcctccaagtgcagaggtctctggggtggggaccattggcctctgtgtcttggctgtcgctgaggatgtgcagggcacacaagcagtctctctagtaaccatgtgtcccagcccagagaggcaggaggatgggagctcggaaggatttcagctccagggctggctgctggaccgactttttcaacaatttttttaaaaagtgcctcagcttcctcaggagaaagctgtcttcagaaagtgggaagaccccacctccctattctcatgatggatgaaacttcttggaaggcagagaaaagtctacctcgagacctatggctgccagatgaatgtgaatgacacagagata

SEQ ID NO: 15504 - DNA, 1181 bp, Homo Sapiens
  misc_feature (53)..(84): n is a, c, g, or t
  misc_feature (159)..(172): n is a, c, g, or t
  misc_feature (586)..(594): n is a, c, g, or t
  misc_feature (610)..(610): n is a, c, g, or t
  misc_feature (823)..(882): n is a, c, g, or t
cgaacacgtcgtggctgtgtgtgtagggactgggtttcaccatgttgcccagnnnnnnnnnnnnnnnnnnnnnnnnnnnnnnnnagggactgggtttcaccatgttgcccaggtgtgtgtttgtgtgtgtagagactgggtttcgccatgttgcccagnnnnnnnnnnnnnnaaagactgggtttccccatgttgcacaagctggtctattctcaaactactgagctcaggcaatctgcccaccacagtctcccaaagtgcttggattacaggcagaagccacagtgcctggccagcataaactattctaaatagctttttttatttaactaataaatctagacagattaaacattttagaggacctctaaaatactatgccctgtggaaaacaagacaaagcactaattccatacagcttgccttgggacagattctcccttcagtctcatctgtgtaatacttattattctcaaagaaagtgaacacatagagcgacatttaaattccaagatgtaacaaaaccttaatgttaacattaaaaaattaaaatctcagagtgtgccacaccataggtgcttaattnnnnnnnnncatactaaacagtganaatggatgacccagtccttagcctatgttatggagttagcgaagcaagctccagtgccctgtggcttagtcatacaataaatacttactgtcacacagtggctgctcagtaaatatttatgctttttaaactaaacagtgaaaatgggtgaccagtccttagcctttgcttatgaagtgagcagaagcaaactccagtgcccagtggcttagnnnnnnnnnnnnnnnnnnnnnnnnnnnnnnnnnnnnnnnnnnnnnnnnnnnnnnnnnnnncaacaaggacactgtttggtcattaaggaaacatggaaaagtgagggatgccccctctccaagcaagcctgaccccctccgcatggcctccaacacacggctgcttccactctgggctggcaggtggatctgtttacagatgttatctctctcatgaatcagctgcagaacctcatcaggaaaatccttggggtggggagaggtaaaacggatcctcatttcaggatctactctggagacctgatccagaagatgagcaaaacgaagtcctccttgcttggttttatagttggtggtaa

SEQ ID NO: 15505 - DNA, 1477 bp, Homo Sapiens
  misc_feature (1083)..(1210): n is a, c, g, or t
  misc_feature (1222)..(1237): n is a, c, g, or t
  misc_feature (1284)..(1332): n is a, c, g, or t
  misc_feature (1414)..(1415): n is a, c, g, or t
  misc_feature (1420)..(1420): n is a, c, g, or t
ggggttcgcgccggaagtggaagaccaggcagcccagctgaaggcagtaagctcggctcacagtcgcaggagagttctggggtacacgggcaaaggggcttgagaaggcccggaggcgaagccgaagagaagcaactgtgccccggagaagagaagctcgcccattccagactgggaaccagctttcagtgaagatggcagggccagaactgttgctcgactccaacatccgcctctgggtggtcctacccatcgttatcatcactttcttcgtaggcatgatccgccactacgtgtccatcctgctgcagagcgacaagaagctcacccaggaacaagtatctgacagtcaagtcctaattcgaagcagagtcctcagggaaaatggaaaatacattcccaaacagtctttcttgacacgaaaatattatttcaacaacccagaggatggatttttcaaaaaaactaaacggaaggtagtgccaccttctcctatgactgatcctactatgttgacagacatgatgaaagggaatgtaacaaatgtcctccctatgattcttattggtggatggatcaacatgacattctcaggctttgtcacaaccaaggtcccatttccactgaccctccgttttaagcctatgttacagcaaggaatcgagctactcacattagatgcatcctgggtgagttctgcatcctggtacttcctcaatgtatttgggcttcggagcatttactctctgattctgggccaagataatgccgctgaccaatcacgaatgatgcaggagcagatgacgggagcagccatggccatgcccgcagacacaaacaaagctttcaagacagagtgggaagctttggagctgacggatcaccagtgggcactagatgatgtcgaagaagagctcatggccaaagacctccacttcgaaggcatgttcaaaaaggaattacagacctctattttttgaagaccgagcagggattagctgtgtcaggaacttggagttgcacttaaccttgtaactttgtttggagctggcacctcttgaaataaaaaggaggatgcacgannnnnnnnnnnnnnnnnnnnnnnnnnnnnnnnnnnnnnnnnnnnnnnnnnnnnnnnnnnnnnnnnnnnnnnnnnnnnnnnnnnnnnnnnnnnnnnnnnnnnnnnnnnnnnnnnnnnnnnnnnnnnnnnccttttttgcgnnnnnnnnnnnnnnnnaaaaaaattttttaaaaaaattcttttgtgggggcgcggcccccacnnnnnnnnnnnnnnnnnnnnnnnnnnnnnnnnnnnnnnnnnnnnnnnnnccccggggaacaaaattgtggtgttcccaaaaaacccgggcacggttaaaccaaggttggttgggttaagggccggctaatnngcggnctcatgtttatcaagcagaccgccgatcgggagtcaagcgattaggcctaggaaggg

SEQ ID NO: 15506 - DNA, 1054 bp, Homo Sapiens
  misc_feature (51)..(51): n is a, c, g, or t
gcagcagagttctgtgctagccgggcataggagcgagagaaggcccagagncgacgtcagagagaagcaactgcgccccggtgaagagaagctcgcccatcaccggctgggagccagctttcagtgaagatggcagggcagaactgttgcttgactccaacatctgcctctgggtggtcctacccatcgttatcactcttcgtaggcacgatccgccactacgtgtccatcctgctggagagcgacaagaagctcacccaggaacaagtatctgacaggggacaaggcacccacagtccctctccaataagcctgccaagaagattgatgtggcccgtgtaacctttgacctgtacaagctgaacccacagggacttcattggctgcctgaacatgaaggcgactttttatgatacgtactccttttcttatgatctgcactgctgtggggccaaacgcatcatgaaggaagctctccactgggcccttttcagcatgcaagccacggggccacgtgctgcttcacctcctgttacctgcagcagctcctcgatgccacagaggacgggcatccccccaagggcaaggcctcatccctcatcccgacctgtctgaagatactgcagtgaaagcccaagccctagctttccccagtgaaggactagacttaggggccccacgctcaactggtagtggccacaagcctggcagctgtagagccgctaacctcccgacacctccctcaccacacaggaccctgagtgaggaggaggggctggaaacctgggatgggttggccaaaggagaacctcaggctcctggcctggcccagctccttcctgcccaaggtagcttagcccatccagactggtcctgaagtctgtccctccattggcatgaagtctgcccctcagcagtccggcctcacaggctgtactttcatggtgctctctaccttttggcccccatcccagaacattcgtgagtgaattcgcaagcatactagcatgtgatattagggagtttgcaataaattattgatgctgaaaaaaaa

SEQ ID NO: 15507 - DNA, 835 bp, Homo Sapiens
  misc_feature (91)..(91): n is a, c, g, or t
tgggcccatccaggggtctctatggggaggccaggggacttggaaatggtttcctttaaaaaccagcaaggctgtgaactgggctgttgantaaagatgccagtctggccatgccctggggtgtattccctctatccagtcaattggggggcctgtatagtcgtttaagaaaagaatctctcttggggagaagcagatctgggaagtgacagtaaaataggatcttcttccgccgtctagccagcctgaacactgggatacaggcagacaccaaggtaaaaagcttgaacttttctccaaaaaccaatggggagccatgtacaagttttaataggggcatgatatattcagcttggcgtttttaacacatgacactgctgaggacggtgtggcctggctccgaacacaaggacagtgggatgcaaatggcctggtcgcacactaccacgtcgaactcctcgtcggcgaggaacagcacgtagagcgccaggaaaaccatgcgcacgtaggcgcagacggcggcgccgcggccgccccagcccaggcctcgcggcagccagtccccggcacagcgcaccggtagctcgcggctctcggcgaaacagtggcccgggtcgtagtgcgctgtccagatcttcacgctacacccgcgcgcctgcagcgccagcgccgcgtccaacaccagccgctcagcgccgcccacgcccaggtctgggtggaggaacagcaccgacggcttgggaaccgagtcccgttcccggccctgctcctccgccatggccctggagccgcaactgcaccccgcaccctgatgggggtcttctgcgcaagctcc

SEQ ID NO: 15508 - DNA, 1417 bp, Homo Sapiens
  misc_feature (1356)..(1356): n is a, c, g, or t
gcgccgccgtctgcgcctacgtgcgcatggttttcctggcgctctacgtgctgttcctcgccgacgaggagttcgacgtggtagtgtgcgaccaggtgtctgcctgtatcccagtgttcaggctggctagacggcggaagaagatcctattttactgtcacttcccagatctgcttctcaccaagagagattcttttcttaaacgactatacagggccccaattgactggatagaggaatacaccacaggcatggcagactgcatcttagtcaacagccagttcacagctgctgtttttaaggaaacattcaagtccctgtctcacatagaccctgatgtcctctatccatctctaaatgtcaccagctttgactcagttgttcctgaaaagctggatgacctagtccccaaggggaaaaaattcctgctgctctccatcaacagatacgaaaggaagaaaaatctgactttggcactggaagccctagtacagctgcgtggaagattgacatcccaagattgggagagggttcatctgatcgtggcaggtggttatgacgagagagtcctggagaatgtggaacattatcaggaattgaagaaaatggtccaacagtccgaccttggccagtatgtgaccttcttgaggtctttctcagacaaacagaaaatctccctcctccacagctgcacgtgtgtgctttacacaccaagcaatgagcactttggcattgtccctctggaagccatgtacatgcagtgcccagtcattgctgttaattcgggtggacccttggagtccattgaccacagtgtcacagggtttctgtgtgagcctgacccggtgcacttctcagaagcaatagaaaagttcatccgtgaaccttccttaaaagccaccatgggcctggctggaagagccagagtgaaggaaaaattttcccctgaagcatttacagaacagctctaccgatatgttaccaaactgctggtataatcagattgtttttaagatctccattaatgtcatttttatggattgtagacccagttttgaaaccaaaaaagaaacctagaatctaatgcagaagagatcttttaaaaaataaacttgagtcttgaatgtgagccactttcctatataccacacctccctgtccacttttcagaaaaaccatgtcttttatgctataatcattccaaattttgccagtgttaagttacaaatgtggtgtcattccatgttcagcagagtattttaattatattttctcgggattattgctcctctgcctataaaattttgaatgatactgtgcccttaattggttttcatagttttaagtgtgtatcanttatcaaagttgaattaatttgggcttccatagtataaatgaagaagcaggggctaattgg

SEQ ID NO: 15509 - DNA, 788 bp, Homo Sapiens
gggacctagatgcaaagcaggattcaaaagaacatctttgcgttttctaccggctccccatcatcgtactagggaggaagaagcgggtgagaaacaaaacttctttccattgtcctgcccgtttctgcggacttgttctgaggccgaggagcctgtgttggaagagatggtgatgggcctgggcgttttgttgttggtcttcgtgctgggtctgggtctgaccccaccgaccctggctcaggataactccaggtacacacacttcctgacccagcactatgatgccaaaccacagggccgggatgacagatactgtgaaagcatcatgaggagacggggcctgacctcaccctgcaaagacatcaacacatttattcatggcaacaagcgcagcatcaaggccatctgtgaaaacaagaatggaaaccctcacagagaaaacctaagaataagcaagtcttctttccaggtcaccacttgcaagctacatggaggttccccctggcctccatgccagtaccgagccacagcggggttcagaaacgttgttgttgcttgtgaaaatggcttacctgtccacttggatcagtcaattttccgtcgtccgtaaccagcgggcccctggtcaagtgctggctctgctgtccttgccttccatttcccctctgcacccagaacagtggtggcaacattcattgccaagggcccaaagaaagagctacctggaccttttgttttctgtttgacaacatgtttaataaataaaaatgtcttgatatcagtaagaa

SEQ ID NO: 15510 - DNA, 438 bp, Homo Sapiens
ctacatcatcacccctcatgccttgcctatgttccgtgagccccgccaacggagtacaaggaaacagctggagaaggacagactggatcccctgaagtcgcataaacctgaacctcctgtagcaggcccaggtcgtgggggccgagttggaacccacgggggcactctctcttcctatattgtgaagaacattgctttggacaagaccgatgacagtaatcctcgggaagccattttgcgtcatgccaaagcagcagaagacagcccatattgggtttctccagcatattccaagactcagcccaaaaccatgtttgcccaagttgaatctgatgatgaggaagcaaagaatgagccagaatggaaaaaacgtaaaatttgaagaatctcatttgagagctgtttgcatgagtgggaggggtatgggacaggtttggg

SEQ ID NO: 15511 - DNA, 1115 bp, Homo Sapiens
gggtctttaaagagggctgctcaactgcaaggacgctgtaagcaggaagagaagccacagcgcttcagaaaagagtgggacagggacaagcatatctaagaggctgaacatgaatccacagatcagaaacccgatgaaggcaatgtatccaggcacattctacttccaatttaaaaacctatgggaagccaacgatcggaacgaaacttggctgtgcttcaccgtggaaggtataaagcgccgctcagttgtctcctggaagacgggcgtcttccgaaaccaggtggattctgagacccattgtcatgcagaaaggtgcttcctctcttggttctgcgacgacatactgtctcctaacacaaagtaccaggtcacctggtacacatcttggagcccttgcccagactgtgcaggggaggtggccgagttcctggccaggcacagcaacgtgaatctcaccatcttcaccgcccgcctctactacttccagtatccatgttaccaggaggggctccgcagcctgagtcaggaaggggtcgctgtggagatcatggactatgaagattttaaatattgttgggaaaactttgtgtacaatgataatgagccattcaagccttggaagggattaaaaaccaactttcgacttctgaaaagaaggctacgggagagtctccagtgaggggtctccctgggcctcatggtctgtctcctctagcctcctgctcatgctgcacgggcctcccctccaccctggacccgctctgtttctgcctggtcatcctgagcccctcctggcctcagggccattccacagtgctcccctgcctcaccgcttcctcctcgctcttccagactcttcctgcagaggctcctttctgcctccatggctatccatccacccccacagaccccgttcctccagcctgcgtgcccctaacctggcttttcccatctccccagcataaccaaatcttactaaactcatcctaggctgggcatggtgactcacgcctgtaatcccccagcaatttgggaggcaaaggtgggagaattgcgtgagcccaggagttccagaccaggctgggtcacatgacaaagccccatctctacaa

SEQ ID NO: 15512 - DNA, 1704 bp, Homo Sapiens
ggatcgctcccatggcgcacattaccattaaccagtacctgcagcaggtgtacgaagccggcggcagcagagatggagcatcttgtgcagagttggtgtcttttaaacatcctcatgttgcaaacccacgacttcaaatggcctctccagaggagaagtgtcaacaagtcttggaacccccttatgatgaaatgtttgcagctcatttaaggtgcacttatgcagtggggaatcatgacttcatagaggcatacaagtgccagaccgtgatagtccaatcattcttgcgagcattccaggcccacaaagaagaaaactgggctctgcctgtcatgtatgcagtagcgcttgaccttcgagtgtttgccaataatccgtgctggtatagaggactctaagaagtggggcatgctgtttctggtgaaccagctgtttaaaatctacttcaagatcaacaaactccatttatgtaaacccctaattagagcaattgacagctcaaacctgaaagacgattacagcactgcacagagagtaacatacaaatactacgttggacgcaaggctatgtttgacagcgattttaagcaagctgaggagtacctgtcatttgcctttgagcattgtcaccgttctagtcagaagaacaaaaggatgattctgatctatttgcttccagtaaaaatgctattgggtcacatgcccactgtggagctcctgaaaaagtatcacctgatgcagtttgcggaagtaaccagagctgtgagcgagggcaacctgctgctgctgcacgaggcgctggcgaagcacgaggccttcttcattcgctgcggaatcttcctcatcctggagaagctgaagatcatcacctacaggaacctctttaagaaagtgtatttgttactgaaaacacaccagctgtctctggatgcttttctggttgccttgaagttcatgcaggtggaggacgtggacattgacgaagttcagtgtattctggctaacttgatatacatgggacacgtcaaaggctacatatcgcatcagcatcagaagctggtggtcagcaagcagaacccatttcctcccctgtccacggtgtgttgaaagtacacggagccccgaggacgggtgagcagttgtttctttccactttggttgtgctgatgagaccggtccggtactgcaacaaggctccctgaagccggaactcttggaggcgcttttcccagggatgctgaggctgagattttcagcacacccgagttaatctccttcatttgtaactaatttcagcctgatgaaaacctggaattcctttttcacagactcggctggttctggagtctttgtgagacttctttgaaggaggctttgcgtgaaggctgctcggctcacttttcctaagtgtggttcctgaaggctgtctttgtaactttttgtagttctttgtgtaaaaagcgtattctgaatttatacacatggcatgttcttcattatatcttccaggatacatctatttttatatattaaatttgaatgtgttatcaaaatgcttggttaacttaaggcacctttttaaaagcagaatttaatttgatttaaattttccagattttatagcttgcctgtatggatgctcctcaatttatgatggggttacatcccaataaacttattttatttgcctttgctttgttggtt

SEQ ID NO: 15513 - DNA, 1245 bp, Homo Sapiens
  misc_feature (38)..(38): n is a, c, g, or t
  misc_feature (47)..(47): n is a, c, g, or t
  misc_feature (1114)..(1115): n is a, c, g, or t
ggtggaggccgctctagcaactagtggatcccccgggnctgccaggnaattcggcagcagccggcgtcggccgccgccgatcacagcagcaggagccaccgccgccgcggttgatgtggttgggccggggctgaggaggccgccaagatgccgcagtccaagtcccggaagatcgcgatcctgggctaccggtctgtggggaaatcctcattgacgattcaatttgttgaaggccaatttgtggactcctacgatccaaccatagaaaacacttttacaaagttgatcacagtaaatggacaagaatatcatcttcaacttgtagacacagccgggcaagatgaatattctatctttcctcagacatactccatagatattaatggctatattcttgtgtattctgttacatcaatcaaaagttttgaagtgattaaagttatccatggcaaattgttggatatggtggggaaagtacaaatacctattatgttggttgggaataagaaagacctgcatatggaaagggtgatcagttatgaagaagggaaagctttggcagaatcttggaatgcagcttttttggaatcttctgctaaagaaaatcagactgctgtggatgtttttcgaaggataattttggaggcagaaaaaatggacggggcagcttcacaaggcaagtcttcatgctcggtgatgtgattctgctgcaaagcctgaggacactgggaatatattctacctgaagaagcaaactgcccgttctccttgaagataaactatgcttcttttttcttctgttaacctgaaagatatcatttgggtcagagctcccctcccttcagattatgttaactctgagtctgtccaaatgagttcacttccattttcaaattttaagcaatcatattttcaatttatatattgtatttcttaatattatgaccaagaattttatcggcattaatttttcagtgtagtttgttgtttaaaataatgtaatcatcaaaatgaagcatattgttacactactattaactaggcttcagtatatcagtggttatttcattgggttaaaaggatacttggaaataaaataactgccaaaccgccnntccccgcgcgaaaaagacaacttaaacatgtcaggccggcctcggccctccaaaaaactttctaaacccattcgttttggggccggcgggccccgtaaaggaaatgggaccatgggccataacccgtgtt

SEQ ID NO: 15514 - DNA, 451 bp, Homo Sapiens
  misc_feature (46)..(46): n is a, c, g, or t
  misc_feature (52)..(52): n is a, c, g, or t
  misc_feature (116)..(116): n is a, c, g, or t
aaaaaataaagagcaaagtactttaactagaattttattttttcanaagggngatcagttatgaagaagggaaagctttggcagaatcttggaatgcagcttttttggaatcttcngctaaagaaaatcaggtaacagattctataaacctcattttgcaatgcgttctcaacagtcgcagggatgtgttcctgtgcacgtggcatttgacctctgtcatgatcactcccgtgtaacatctggccttcctccatttctaaaaccaagttttgtgttgctttaggaagaaactacttaggtgttaataaattcagtcagtattcaacttacagtggaacctaggatatttgtaggataaacagaaactattagtaaaggaaatactaccttttgtaaacatatatttttggtttgtattaatagctggtacagaaataagtccatacagggg

SEQ ID NO: 15515 - DNA, 800 bp, Homo Sapiens
  misc_feature (579)..(579): n is a, c, g, or t
  misc_feature (582)..(582): n is a, c, g, or t
  misc_feature (586)..(639): n is a, c, g, or t
  misc_feature (647)..(647): n is a, c, g, or t
ggggcagtggtcaaggccgcgctcgcgccgaggggctgcgagagtgaccgcggctgctccagcgctgacgccgagccatggcggacgaggagcttgaggcgctgaggagacagaggctggccgagctgcaggccaaacacggggatcctggtgatgcggcccaacaggaagcaaagcacagggaagcagaaatgagaaacagtatcttagcccaagttctggatcagtcggcccgggccaggttaagtaacttagcacttgtaaagcctgaaaaaactaaagcagtagagaattaccttatacagatggcaagatatggacaactaagtgagaaggtatcagaacaaggtttaatagaaatccttaaaaaagtaagccaacaaacagaaaagacaacaacagtgaaattcaacagaagaaaagtaatggactctgatgaagatgacgattattgaactacaagtgctcacagactagaacttaacggaacaagtctaggacagaagttaagatctgattatttactttgtttattgtctatatgccttttaaaaaaataaacttgttatgcaaaatacnccnaccnnnnnnnnnnnnnnnnnnnnnnnnnnnnnnnnnnnnnnnnnnnnnnnnnnnnnncaaccaanccccgggtgggccgccctggggccctcgaaaaagttttttaaaccttttcttttgggggcgggggccccagaagggaaaggggaacgggggccataaccgggttcccaaaagaaaaccgggggccaggaaaaaggggcttgggatcccccccc

SEQ ID NO: 15516 - DNA, 433 bp, Homo Sapiens
tatacatctaccacacatatttttcagcccagagacattttccttttgtcaaacacgtgaaagtttggggagaaaggctgaatctgttgggggagggttctaatttttataggctcttgactccattcccacccttttagttcacgctaagttgctttaaagacacaaatgtcttgctaaaattggtagaaatcttttctcggaaaatctgagttatgctttattagaaatgttctgacactcatttaattttcctcccagttcaacagaagaaaagtaatggactctgatgaagatgacgattattgaactacaagtgctcacagactagaacttaacggaacaagtctaggacagaagttaagatctgattatttactttgtttattgtctatatgccttttaaaaaaataaacttgttatgcaaaataaa

SEQ ID NO: 15517 - DNA, 617 bp, Homo Sapiens
agcaaagtagtatgagagtcttaaaacatggaatctggctgtcgcttggccacagtcacctatgactctttagcatagcctcctggatctcagctttatctctaagaaaatgatatagattagtcacatggtccattctaattgcctgaaatcccactataaaatttctagcacctgtcacgcaataggtacttaagaaatgttggtgatggtgtttgaactgaggctccactctgatgaaactgtaaagctcaccttccagcctggtaggttgtcacctgtgtaatataaagctggttctttgagggcaaaaggggattctacttgaatgtagctgcagccttatgtacagcaactaccataatgcagtttgtataccgcaggccccatgtggagacacatactggatgggttctttctcgtatgttacatgggaatgccgacagctgtgtattaattgtgttcgacctatgttttcgttgtagggaagcagacatgagaaacagtatcttagcccacgttctggatcagtcggcccgggccaggtgtcagcatctttgatttcatctccatacaagtagctagagttagtggcatggcgtgcgatacaggggggt

SEQ ID NO: 15518 - DNA, 1265 bp, Homo Sapiens
  misc_feature (244)..(253): n is a, c, g, or t
  misc_feature (359)..(379): n is a, c, g, or t
gaggatccccctggctctgaacttagggtgaaagatccagtgttggaattctttggtgtaaataaacgtttggttttatttatcaaggttagatttaagttccctgtgtaaaggtcttgctgggtgggtgtctcatgttcacatctgaggggcctgcagccctgtaccgtggaggcttcccaaggcccccattttatacacccctcgttcgacccatggtaccgggcagagcagagaggccttnnnnnnnnnngcaccacaagccaaagcgtctctggggattaaggatcctttgccataaaactcattttgtgtctcagcagtgcagggattggggatggaaaaagtcgccagttttnnnnnnnnnnnnnnnnnnnnnaaagtggactttccactgtaatccaaccacctaagtttatcaggtgcttcactgaggaagcctagttttttaagcacaatagcaaaaccatcagctctgtattttctcctgttatttcattacagtagctgcttgtgggaactaggaaaaattcttccaacatattttaaggcctaaaatcttagttccccattctcctaccttatagattcacaggcctttctcgcctaggcatcatagataaacgtaattgtttggggagttgaatttaatgaacttatctaactttgtaacccatcttggcttttagtaactttatcaaggtggtggcctttactgaatataatgggtaaactttagaggaagctaaagccttccttttatagcgcttctcaacggtaagggagagctgaaaggaaaacattctgactgtgtggcagggtgattttcttccttatgaccacttacagtggatatttattgtacttgacccttttatgccctagaatgctgtgaggggtaccatgttgaatttgtgcagaagctaaaagcaccagatgtgccagagatgcaatttgtgattatgtttgcactggattgtgatttgaacaggacacttataactaatgagttctttcttttgagctggggagagggttgtaaatcaagacttcataccctatccttgtagctcggaaattgaggtgtagcttaggctgatgcggagagctgcagacagctggacctccttacacccatcagaccctggaataaaccgaaggtgaatgcagaggactctgaggtgccacctcaagagccttttaaaataaatagatagtttttaaaaatgctactcaagagtcactgcagaagcatggagagagag

SEQ ID NO: 15519 - DNA, 919 bp, Homo Sapiens
  misc_feature (97)..(138): n is a, c, g, or t
ctcccctcccaaatttagttcctccaccgtcccacactttagggggttggtatctcgtgctcttctccagagattacaaaaatgtagcttctcaggnnnnnnnnnnnnnnnnnnnnnnnnnnnnnnnnnnnnnnnnnncccaatctataggagcagtggactgcttgctggtcgcttacatcactttactccataagcgcttcagtggggttatcctagtggctcttgtggaagtgtgtcttagttacatcgagatgttgaaaatctacccaaaatgcagacagatactaaaaacttctgttcagtaagaatcatgtcttactgatctaaccctaaatccaactcatttatacttttatttttagttcagtttaaaatgttgataccttccctcccaggctccttaccttggtcttttccctgttcatctcccaacatgctgtgctccatagctggtaggagagggaaggcaaaatctttcttagttttctttgtcttggccattttgaattcatttagttactgggcataacttactgctttttaccaaagaaacaaacattgtctgtacaggtttcatgctagagctaatgggagatgtggccacactgacttccattttaagctttctaccttcttttcctccgaccgtccccttccctcacatgccatccagtgagaagacctgctcctcagtcttgtaaatgtatcttgagaggtaggagcagagccactatctccattgaagctgaaatggtagacccgtaattgtgggaaaactataaactctcttgttacagccccgccaccccttgctgtgtgtatatatataatactttgtccttcatatgtgaaagatccagtgttggaattctttggtgtaaataaacgtttggttttatttatcaaaccccaaaaa

SEQ ID NO: 15520 - DNA, 927 bp, Homo Sapiens
  misc_feature (641)..(696): n is a, c, g, or t
  misc_feature (712)..(712): n is a, c, g, or t
  misc_feature (800)..(800): n is a, c, g, or t
  misc_feature (873)..(873): n is a, c, g, or t
  misc_feature (887)..(887): n is a, c, g, or t
ggtatgagcatttatttgtgcaacatgacataaaatatattcccacagaagatgtttcagatctaccagtggaagaacaattgcggagactacaagaagaaagaacatgtaaagtgtgtatggacaaagaagtgtccatagtgtttattccttgtggtcatctagtagtatgcaaagattgtgctccttctttaagaaagtgtcctatttgtaggagtacaatcaagggtacagttcgtacatttctttcatgaagaagaaccaaaacatcatctaaactttagaattaatttattaaatgtattataactttaacttttatcctaatttggtttccttaaaatttttatttacttacaactcaaaaaacattgttttgtgtaacatatttatatatgtatctaaaccatatgaacatatattttttagaaactaagagaatgataggcttttgttcttatgaacgaaaaagaggtagcactacaaacacaatattcaatcaaaatttcagcattattgaaattgtaagtgaagtaaaacttaagatatttgagttaacctttaagaattgtaatattttggcattgtactaataccgggaacatgaagccagctggtgctggtatgtgcctgtagtcccnnnnnnnnnnnnnnnnnnnnnnnnnnnnnnnnnnnnnnnnnnnnnnnnnnnnnnnnactgagaccctgcctntaaaaacaaactgacaaaagcaaaccccggggaccatttctctgtcttttttgatcagggcctatacatcgaaggtgtgcatatatgntgaatgaacatttagggactgtggtttttataaagaattcggggagaaaaatttataaggccacgacccgggnttaacagaaaaggnaaaaaactggttggcgccttcgggcctcaagaggttttct

SEQ ID NO: 15521 - DNA, 802 bp, Homo Sapiens
  misc_feature (232)..(258): n is a, c, g, or t
caaacacaatattcaatcaaaatttcagcattattgaaattgtaagtgaagtaaaacttaagatatttgagttaacctttaagaattttaaatattttggcattgtactaataccgggaacatgaagccaggtgtggtggtatgtgcctgtagtcccaggctgaggcaagagaattacttgagcccaggagtttgaatccatcctgggcagcatactgagaccctgcctttnnnnnnnnnnnnnnnnnnnnnnnnnnnccagggacacatttctctgtcttttttgatcagtgtcctatacatcgaaggtgtgcatatatgttgaatgacattttagggacatggtgtttttataaagaattctgtgagaaaaaatttaataaagcaacaaaaattactcttattcttcattgctttatttcaatgacattggatagtttagtcactcccagactctttccataccttcttaaagcctctcaaatattgaactacagtttatactccttcccataagatgcttcttcattgccacttgtagaacacgggggtcaacccatcataaaatctattatggaatgcctgagacaagaatcaaacagtccctttagtaagtttgtttattcacttctctattgattcattcaagaagtctcatgccagccccacctattggaagaaggtctgagttttattcttatctctttggtattaattctgaaacttagaaagtacactggttagcaatgcttgggaccaacaggttgctctggtaaataaatctgtttcatattgacagtgc

SEQ ID NO: 15522 - DNA, 1311 bp, Homo Sapiens
  misc_feature (95)..(362): n is a, c, g, or t
ggatgtttggaactctgaaggatttagacaaggttttgaaaaggataatcatgggttagaaggaagtgtttgaaagtcactttgaaagttagttnnnnnnnnnnnnnnnnnnnnnnnnnnnnnnnnnnnnnnnnnnnnnnnnnnnnnnnnnnnnnnnnnnnnnnnnnnnnnnnnnnnnnnnnnnnnnnnnnnnnnnnnnnnnnnnnnnnnnnnnnnnnnnnnnnnnnnnnnnnnnnnnnnnnnnnnnnnnnnnnnnnnnnnnnnnnnnnnnnnnnnnnnnnnnnnnnnnnnnnnnnnnnnnnnnnnnnnnnnnnnnnnnnnnnnnnnnnnnnnnnnnnnnnnnnnnnnnnnnnnnnnnnnnnaaaaaaatatatatatattgaaaaccaaaggaggcaaaattttgacagggaaggaagtaactgcaaaacactaggcggtagtaggtacttatataaaatctagtccagttctctcatttaaaaaaatgaagacactgaaatacagacttaaatagctcagatagctaattaggaaatttcaagttggccaataatagcattctctctgacatttaaaaataatttctattcaaaatacatgcataattgattttacacctcattactggtggataaattatgggatgtggattgctggtgtccagcatgacccataaacaggtcaaaagaaatgatggaaatgttttagaataaactccctgcttatagtatactacacagttcaaaagaagtttaaaatgcttttgtatttactgccattgaggattccattgtggtaatgtccattaactgggctatgcttatttctagaccacagacttttgatttttctgtagataaattttgtcacccaagacaagagaaagtataacaaggcagcaccaagcaaaagcacaaaggcaatatccagtaaaaaatactgacaaaaggagatctgatggacagcggcacgtaggtgatgggctccattgtgacgaataatataatctatccaatagatagttcgattgacagggtgaccaggttgatccttgtgaatttccgaaagcttctgagccctctgacggtagctgggattattgataaccttcactagtgcttcatagagctctttttcagtaactgtcttccattctagcaatatccccatgccttttgcctgtacttctggtcatagtatcataatggtctccaaagagtgaaattcccactacacgcacaccatgatacatagtttcaaaatactgtcaaaccacaatgcacgtgatagggatcgtctagagtcact

SEQ ID NO: 15523 - DNA, 1087 bp, Homo Sapiens
  misc_feature (151)..(418): n is a, c, g, or t
ggcaacaaagtgaactgttttggttgttttaaactcatgaagtatgggttcagtggaaatgtttggaactctgaaggatttagacaaggttttgaaaaggataatcatgggttagaaggaagtgtttgaaagtcactttgaaagttagttnnnnnnnnnnnnnnnnnnnnnnnnnnnnnnnnnnnnnnnnnnnnnnnnnnnnnnnnnnnnnnnnnnnnnnnnnnnnnnnnnnnnnnnnnnnnnnnnnnnnnnnnnnnnnnnnnnnnnnnnnnnnnnnnnnnnnnnnnnnnnnnnnnnnnnnnnnnnnnnnnnnnnnnnnnnnnnnnnnnnnnnnnnnnnnnnnnnnnnnnnnnnnnnnnnnnnnnnnnnnnnnnnnnnnnnnnnnnnnnnnnnnnnnnnnnnnnnnnnnnnnnnnnnnaaaaaaatatatatatattgaaaatcaaaggaggcaaaattttgacagggaaggaagtaactgcaaaacactaggctttagtaggtacttatataaaatctagtccagttctctcatttaaaaaaatgaagacactgaagtacagacttaaatagctcagatagctaattagggaaatttcaagttggccaataatagcattctctctgacatttaaaaataatttctattcaaaatacatgcataattgattttacacctcattactggtggataatttatgtgatgtggattgctggtgtccagcatgacccataaacaggtcagaagaatgatggaatgttttagaataaactcctgcttatagtatactacacagttcaaaagatgtttaaaatgcttttgtatttactgccatgtaattgaaatatatagattattgtaacctttcaacctgaaaatcaagcagtatgagagtttagttatttgtatgtgtcactagtgtctaatgaagcttttaaaatctacaatttcttctttaaaaatatttattaatgtgaatggaatataacaattcagcttaattccccaaccttattctgtgtgtagacattgtattccacaattttgaatggctgtgttttacctctaaataaatgaattcagaga

SEQ ID NO: 15524 - DNA, 655 bp, Homo Sapiens
  misc_feature (421)..(477): n is a, c, g, or t
tttatggatggagctgtcggtactaaattgaataacgagtaaataatcttacttgggtagagatggcctttgcctacaaagtgaactgttttggttgttttaaactcatgaagtatgggttcagtggaaatgtttggaactctgaaggatttagacaaggttttgaaaaggataatcatgggttagaaggaagtgtttgaaagtcactttgaaagttagttttgggccagcacggtagctcacccttgtaatcccagcactttgggagctgagtggttagattacttgagcccagaaattcaagaccacctgggcaacatggtgaaaccctgtttctataaaaaataatctgggctttgtagcatatgcctgtggtcccagctactgaggaggctgaggtgggaggattgcttgagcccannnnnnnnnnnnnnnnnnnnnnnnnnnnnnnnnnnnnnnnnnnnnnnnnnnnnnnnngagtaagacaaaaaaatatatatatattgaaaatcaaaggaggcaaaattttgatagggaaggaagtaactgcaatacactaggctttagtaggtacttcatataaaatctagtccagttctctcatttagccacatgaagacactgtagtacagacatgctgtgctcagatagcgca

SEQ ID NO: 15525 - DNA, 1433 bp, Homo Sapiens
  misc_feature (45)..(45): n is a, c, g, or t
  misc_feature (58)..(58): n is a, c, g, or t
  misc_feature (109)..(109): n is a, c, g, or t
  misc_feature (135)..(135): n is a, c, g, or t
  misc_feature (178)..(178): n is a, c, g, or t
  misc_feature (185)..(185): n is a, c, g, or t
  misc_feature (201)..(201): n is a, c, g, or t
  misc_feature (253)..(253): n is a, c, g, or t
  misc_feature (263)..(263): n is a, c, g, or t
tttcttaaaggcccagggaaaaaatttttaaagtgattttcccanctggggaaaaaanccaatgggcctgtatttcagcaaaaatggggcaaaatgaaaacccagtccngaatttcctccatgctgggacccctnccatgattacaggctctgttgtactgaaacggtgaatggttangcaaagnaatataaacgaaagtnccaatgtccatgcttttctttcctgtgtccactgttacagcaataagtgcanccaaaaattntaatcaaagccagaacaaaggagattccaaaatatccagtgagggaaaaaaggaacgcataaccataggtccgaactggattctttgcacaaaatgttactgcagggcctaatccactagtgcatgtcaatcccagtaaaatgtatacaaaaccaattgaatacgaatacaataccatttcagaattagaagcattatgaagtttcatagctttctcttgaacatttccaatgacggcatctgcacatagtgccagggaaataagcaccacacccgtcaggttgaaatttggtgcagttgtgctgtcagcgagggtaaaccatatcaggccaaggctcatacatatggcagcagacacatctgcaacattataacgctttccttgaataaaaactcctcctagcataacaggaatcaatttgcagcacttgaagatgacttgggtagggtaattcaggtagcccaaggaagtgtttgataaccccatagtaccccacagttagaaaagctattatcatgtaggtttttcctgggtattctcctccttttgtcctgaataagctgaagttctattaggccaaatatggagtaaaaggcaaactgcactaaggtaaggtaccagccacaggacttaaaaccctccactgaaaatattaattcctgtaaatacccataaattaggtaaaatacaaaaactccagcaacacatatgaaaaactgagtaagtttgttaaacttgctgagattcatgccaagtaccacaacgtcgtcaactgacttgatgtgtggtgacattgtttgggttttggatggcacagtgatagaaatatatttcctggaattgttgaacttgagatccattgttattttgctgcattcaatgctttcagagttatttttgttggtttcctggactgttatgttctgtatgtcttttgcttgctgtgtcaagtccccaaggccggtatgtcacccggaagggtgacggcagcctgcgtggcgtctgagctagacggagcatctccccctcccctggtccgtcgccatcacctcctcttcctcctcctcctcgcccactcctgcactttccaccgcggcggtcgcctccccggaaagcactctcaactccggcgcccgcaggcatcccgggaattccggacccggtaccag

SEQ ID NO: 15526 - DNA, 403 bp, Homo Sapiens
ttaaaaatgcaatgctagttataataattatttcatcaaattacgtgtatcaccattttttaaatctgtctaatttgaagaaaaaacactagagtatttaccatttcagaattagaagcattatgaagtttcatagctttctcttgaacatttccaatgacggtatctgcacatagtgccagggaaataagcaccacaccttcaagaaggtattaaaaaaacatacaaaaaaaccctccttatttaaacatatgaactataatcaagctttatcagaaatttcattggtctaaaaaacaaagcagatcttcaactacatttgttcggtaatccagaatattctattcacatcggttggtacaagtaatatgtgatgatatgaaaagatatactaatacactga

SEQ ID NO: 15527 - DNA, 933 bp, Homo Sapiens
  misc_feature (155)..(155): n is a, c, g, or t
  misc_feature (255)..(282): n is a, c, g, or t
  misc_feature (525)..(540): n is a, c, g, or t
tggatttaaaagtccaagccactagagataagtgggattaatactttttttgccggttccctaatattccaggatgtatagtacaagtaacaatggccaaccagaatgttccaggattactttaacccaaaaaacccggaccatcaaaaatgaangtgtgtgaggaaaggtgctgctgggtctccctacaaactgttcatttctttgtggggcagggggtagttcctgaatggctgtggtccaatgactaatgtnnnnnnnnnnnnnnnnnnnnnnnnnnnnggaactgtcatttccacgaaagcacagcggcagtgattctagcaggcctcagggccctgggcctggggaggctacatgagggggagcctcagtcacaggatcaacctggggcccgaaggagcagggttccctgcctctccctctgcaacagatcatcccatccaacacaacccccaaaatgttgatgatgacgcaacatggtcaaccctcaagacctttaagacaaaacagagcagcataggnnnnnnnnnnnnnnnncgcaccaatttctgcatgtgtcaatggtagggcaccattttaaaaagtctgtctaaaacagtctgtcttcacttggagggacgtagtgcaaagcataattcctctgttagtgaagaaaccatgaacgcactcctagctcaactcctaagtttagtcagaacaattaaaacttcctgtctcccccttccaagtttaaagcagcatatccataaactggggatgggggaaatcaactgttctataaatatcagtaaggattcctgttcaggtaagctatacacagtttctcttagtttatggatttcagatccctaggaagtcatatattatgtatggcagtatctcaaatacaggcagcatcttcaatagccaagagtggtcatgtttttaata

SEQ ID NO: 15528 - DNA, 729 bp, Homo Sapiens
  misc_feature (186)..(213): n is a, c, g, or t
ggaacattttgggggttgtgttggatgggatgatctgttgcagagggagaggcagggaaccctgctccttcgggccccaggttgatcctgtgactgaggctccccctcatgtagcctccccaggcccagggccctgaggcctgctagaatcactgccgctgtgctttcgtggaaatgacagttccnnnnnnnnnnnnnnnnnnnnnnnnnnnnacattagtcattggaccacagccattcaggaactaccccctgccccacaaagaaatgaacagttgtagggagacccagcagcacctttcctccacacaccttcattttgaagttcgggtttttgtgttaagttaatctgtacattctgtttgccattgttacttgtactatacatctgtatatagtgtacggcaaaagagtattaatccactatctctagtgcttgactttaaatcagtacagtacctgtacctgcacggtcacccgctccgtgtgtcgccctatattgagggctcaagctttcccttgttttttgaaaggggtttatgtataaatatattttatgcctttttattacaagtcttgtactcaatgacttttgtcatgacattttgttctacttatactgtaaattatgcattataaagagttcatttaaggaaaattacttggtacaataattattgtaattaagagatgtagcctttattaaaattttatatttttcaaaaaaaa

SEQ ID NO: 15529 - DNA, 923 bp, Homo Sapiens
  misc_feature (111)..(111): n is a, c, g, or t
  misc_feature (114)..(115): n is a, c, g, or t
  misc_feature (121)..(121): n is a, c, g, or t
  misc_feature (125)..(125): n is a, c, g, or t
  misc_feature (138)..(139): n is a, c, g, or t
  misc_feature (145)..(146): n is a, c, g, or t
  misc_feature (155)..(155): n is a, c, g, or t
  misc_feature (217)..(264): n is a, c, g, or t
gtcccaccacgaaattgcgggtttggtttgggggcagggaatcccactccctaatgttccctgggtatttcggatccccggtccaatgaaatccgtggtaatttcatcctnccnntatccntatnccacattatgatnntgaatnnccaatgatnccagctcccaaggattgggatcacagtgagccctcttccaatccaaaacctttataaccagnnnnnnnnnnnnnnnnnnnnnnnnnnnnnnnnnnnnnnnnnnnnnnnnggtttctggggaatgatgagttatgtctgtcatcagtttaacagatgcacatcaataactatcaaattccccaaaacaagtttctgaatggtgttcagataaattttagaaacttaatcatgcatagagactaattggaagaagcattttgtatttacagttcaactgataatgccaacacttgttactggtacagcgtgattacaggtttcgtggttgcaagaagttacgtaatttaagtttactggcattgctacccacctaagtctaaaactaaatctaatgctcccatttgcaatttaatttgtaaattaaagtcttttaaacatatgaaccaattatgaatattagtttaaaggggaaggtgagacttaaaagtattcccaactagattatctacaccaatacattggaactctatattttgctttcattttgtcttaaaaaaatgaaatagcaacgctctatcagtcacacagaggacatgcagatttagcagtattgatattatactctatcttgttggatttaaaaacaccctgtacccacatgtacaccaacagcaggtcacacattaacagttgtaactaagcactgtgacaaattagccagttcttcccacattagtccctattaaaacaaaaatggggggaagggag

SEQ ID NO: 15530 - DNA, 1578 bp, Homo Sapiens
aaaaaatgtttattttttcaaagaaaacggcaatagccaattggaaacctacttattcttcaactccaattttgttttctttaaatttagaagtgacttactgatttactattttaaacaaaccccccctttcccctttaaatgtttaccatctactcgtgctgaatccttccaaggagattgctccagcgtttatctccaggtcctcgctttgctccattgcctccattattgatctgatcctcctcaatcctccttttgacaatcctaaaatgattgaaatgtgctccacaatccttaatccaaagcattcttaatccatctcttcagatatgtctacagaaagacacatgaaaagcaagataaacataagaacttccccaggtaagataaccacaaacacccccaacatcccagttcacacaaaccagggcagatagacatttacacaatatcacagtctgaagagtatggagttaactaaatttaaacaatcctgtctatgacatcacttaaaatacaatttatcaaagacacgaagggaatgtagatgttaggagcaaggggatattacaagaatgcaattcaacactttagcccattctgaacaaaacagtttgaattaaaaaatgaaaagattgtactgaataaaggaaaactgtatacaacatgggttctacaaaaagtgtcaccaatcatcttatgtacgagagcgagatctgctatgacggggagaatagcgtggtgatcctctgcttctccttggggagtaactgcgactcctgctgttgcttctgctacggcttctgctacgactacggcttcgagatcgagatcttccataacttggacttctgggcccatcaactttaacccggatgtaggcagtttctccctcatgagatctaaacttagtgttatccagttttcgaactgcataggtcatatcttctttccgtacaaactccacgacaccagtgccatctcggtaaacatcagcataacatacatcacctgcttcacgcatgtgatcctttaaatcctgccaacttccacttggaggcagtccagagacaaccactctgttttcagaccgcctggatggggggccatagcgacctcggggagctccgccacctccacccccgccgccgcctcggcctgttccacggccgcttcgaggaaactccacccgcagacggtacccatcgtaatcatagccgtcgcgaccatacaccgcgtcttccgcgtctcgcgggtcctcgaactcaacgaaggcgaagggcggtcccccgcggcgattcttgaggtcgatgtcgcggatagcgccgtatttgtagaacacgtcctcaatgtccttggttcggatgtctggaggtaagttacccacgtagatgcggcaatcgttgttccctgcggggccacgaatcacaccacctcccgacatggcggtgacgaaaagcgcggactcgagaacaggccttcccaccaagcctagcgcacggcagagcgagcccgcagcggcaccacgtctcccgcggcccctccaaaatggcgcctttatcagctcggcgcccc

SEQ ID NO: 15531 - DNA, 1194 bp, Homo Sapiens
  misc_feature (298)..(315): n is a, c, g, or t
  misc_feature (317)..(417): n is a, c, g, or t
  misc_feature (471)..(565): n is a, c, g, or t
  misc_feature (1083)..(1083): n is a, c, g, or t
gaagagcgagaaagtgcatagtgacatatagacccgctgtgttcacaccaagcaggctggtaccggtccggaatcccgggatatcgtcgacccacgacgtacgaccacgcgtacggccagctcaagttctttttcagagaaagggacttggccagtggtttaagtacctgccccattcacctctcagacgaggcagctgacgaggcagctggcccagatcttgggagtctgctcaggacagtggtggagctgggtcttgaaccccagtctgcacctaaaaaaactaaaggaaatggannnnnnnnnnnnnnnnnngnnnnnnnnnnnnnnnnnnnnnnnnnnnnnnnnnnnnnnnnnnnnnnnnnnnnnnnnnnnnnnnnnnnnnnnnnnnnnnnnnnnnnnnnnnnnnnnnnnnnncccccaccagctgggactacaggcacatgccaccatgcccggctaatttttttnnnnnnnnnnnnnnnnnnnnnnnnnnnnnnnnnnnnnnnnnnnnnnnnnnnnnnnnnnnnnnnnnnnnnnnnnnnnnnnnnnnnnnnnnnnnnnnggaaaatgggtcattttcaaaggggcaacagtgataccatccctgcactcctgggtcctgctcttccaatgcccaaggcatggcatggtggcagctgtgcccccgcccattgctttggagcacagatgacttctgggggcagaggtgggctctgtttaggagggcagtgagaccacccagccaaattgcttctcaaccctagacaaagcctttggccaagaagggagggtgctgttagttgggcagccccttctggggttcagaagaccggtggttggctctagactggtcctcatctccattgccttaatgccaggtggcccaggagtacccatgcacagcaggctgtgggggtgtgggcatctttcagggggtgttctgggtaaaaatcgttagaatagcctgtatgaaggaaaaccagtggggaggaaaatgaaagttttcaggaatggtggggaatgtggatttagaaccggtgcacatgcttgttaagggcctggtccactagggaagtgggnctttcatgggaagggggggtaaacaggaaccttcagttccaagcccaaaaatgtttagaaaaaacatcaaggtctctggttccccaaaaggaaggggcttcctccgggggt

SEQ ID NO: 15532 - DNA, 601 bp, Homo Sapiens
agctcggtaccccttcgacggtgttctggtaaaatcgttagaatagctgtatgaaggaaaccagtgggaggaaatgaagttgtcaggatggtgggatgtgatttagacagtgcacatgctgttagggctgtcactagggagtggccttcatggagggtggtaacagcacctcagtccagccaaaatgtttagaaacactcagtctctggtcccagaggatggcttctcagggcatgccacaagttaaaggtcaccttcctgaaagatgaatgagaaagctgcccattctcaagactcatctgcctagggagggtcacagaggcaggatgtaagacacactgtgttgcattcttgcacaagtcatgaaaatggagccagagagcctggacatcagggacttttgcccacagcacatgacaccgacagctgcccagcctgttcacatgctggggaccagcacagcacctgaagccatgtgggacagttgggctttgttcattctagccacggggatgaaagggatcttttgcattgcagagattttatatatattttgtttgtaatgagccattctcaataaacattattctcactgcaaaaa

SEQ ID NO: 15533 - DNA, 864 bp, Homo Sapiens
  misc_feature (638)..(638): n is a, c, g, or t
  misc_feature (772)..(772): n is a, c, g, or t
  misc_feature (778)..(778): n is a, c, g, or t
gggagacttgagtggccggaacccttgagaccagaggcttaccatgctgctccctaggagggccaggaactgctgacgtgaccactggacagttattcgtgtctcttacaattaccaaacagaatggacaagcttaataaaataaccgtccccgccagtcagaagttgaggcagcttcaaaagatggtccatgatattaaaaacaatgaaggtggaataatgaataaaatcaaaaagctaaaagtcaaagcacctccaagtgttcctcgaagggactacgcttcagagagccccgctgacgaagaggagcagtggtccgatgactttgacagcgactatgaaaatccagatgagcactcggactcagagatgtacgtgatgcccgccgaggagaacgctgatgacagctacgagccgcctccagtagagcaggaaaccaggccggttcacccagccctgcccttcgccagaggcgagtatatagacaatcgatcaagccagaggcattccccacccttcagcaagacacttcccagtaagcccagctggccttcagagaaagcaaggctcacctccaccctgccggccctgactgctttgcagaaacctcaagtcccacccaaacccaaaggcctccnttgaggatgaggctgattatgtggtccccctggaaagataatgatgaaaactatattcatcccacagaaagcagttcacactccaccctgaaaaagctccccaggggggaatagaatcaaccaggccaaaattnctcaanggcccgccttctcctccaggaaacagctttcaggtcgaaaacagtgggggccctggggaaacccagggcaccctcccaccaggcta

SEQ ID NO: 15534 - DNA, 415 bp, Homo Sapiens
ggcggtaccacttgaccagaggcttaccatgctgctccctaggagggcaggaactgctgacgtgaccactggacagttattcgtgtctcttacaattaccgaaacagaatggacaagcttaataaaataaccgtccccgccagtcagaagttgaggtaagattttccccacccaatacccttcttcatctcctttttttccccccagtgctcttatggcatctcagaaatactgaaatcctggaatgcttggctagtttccagtgggtggcacttactatagggaggtggactgagcttttagggaaagcattgggtggcacttgctatagggaagtgaactgagttcttaaagaaatgtgtaggaacaagagagacttgctttagctgcctcttacaataaagtgtaaagctct

SEQ ID NO: 15535 - DNA, 650 bp, Homo Sapiens
aggtgatgggcagcagaaagggggtagttactgatggacaccagtcttctctgtatactccacactgacctaagaaaagaacagttttgtcagccaactctgtcactcagtagctgttacagcccttctttagggcaggaaaactatggctgagctagtatttcagctgtgctgttgaatatcaaatccctacaaaggatgaagaaggtcctaactgtgacttccaattatggcagcagccctcaaaggatgtgccctggggcaggggtgtggaactgtcaagtgtctttctagctcattgtaagcattgttaaaaatgcctactgctctgggaaattctatactaagttccagctctaccaagaatttcagggttgagcccagaccttaccttgccatgggccaaggcccctaccacaaaaacaataggatcactgctgggcaccagctcacgcacatcactgacaaccgggatggaaaaagaagtgccaactttcatacatccaactggaaagtgatctgatactggattcttaattacctaagtacaaagagagaaaagtcagccccagaaacattcccagaaccagccttcaactaacaggtttcatactacacctgtgctccttcgggatcctctagatcaccgc

SEQ ID NO: 15536 - DNA, 751 bp, Homo Sapiens
  misc_feature (683)..(683): n is a, c, g, or t
ggggaactgccttcagcagagatgattgacttccaaaaaagccaaggtgacattttacagaaacagaagaaagtttttgaagaagtgcaagatgatttttgtaacatccagaatattttgttgaaatttcagcaatggcgagaaaagtttcctgactcctattatgaagctttcattagtttatgcataccaaagcttttaaatcccctaatacgagttcagttgattgattggaatcctcttaagttggaatccacaggtttaaaagagatgccatggttcaaatctgtagaagaatttatggatagcagtgtggaagattcaaagaaggaaagtagttcagataaaaaagtcttgtctgcaatcatcaacaaaacaattattccccgacttacagactttgtagaattcctttgggatcctttgtcaacctcacagacaacaagtttaataacacattgcagagtgattcttgaagaacattccacttgtgaaaatgaagttagtaaaagcagacaggatttacttaaatccattgtttcaagaatgaaaaaggcagtagaagatgatgtttttattcctctgtatccaaagagtgctgtagaaaacaaaacatcacctcattcaaagttccaagaaagacagttctggtcaggcctaaagctctttccgcaatattcttncttttggaatgggactcccttacagaatgacaacctttgccaaggaactaaggaaactaggggaaagc

SEQ ID NO: 15537 - DNA, 227 bp, Homo Sapiens
ggtgaccctatccttctcagtagatgaaaaaactcagtggattttagaagagatagaatctcgaaggtacctatatcaagtagaagattaaaagacaagcatcattgagacaaaaagaagacaagcaagggtgctttctgggaatcgtaaccatcaggaaagaacatctagtgatgatgaactgccttcaggcagagatgattgacttccaatgacagccaaggtga

SEQ ID NO: 15538 - DNA, 459 bp, Homo Sapiens
  misc_feature (306)..(355): n is a, c, g, or t
  misc_feature (424)..(424): n is a, c, g, or t
  misc_feature (430)..(430): n is a, c, g, or t
accaggtgctgctgcttgtgccgcgtggatttgaccgccaggatggcctgacgattcttgtactgcaccatctgcagcgtgatctcggcgttccagccctggtcttgcgggcaccgaaagtcgatctccttgccctctgccatcaccacagtgaagtacaatgtacttgcccttgcgctccacacagtccacggtcttcatgttggagaagtgcagttccttgagcttgaccggcggctcgaggctggcgacagcggggccactgggttgggacggctcgggccggcccctgcccgggctgttgtnnnnnnnnnnnnnnnnnnnnnnnnnnnnnnnnnnnnnnnnnnnnnnnnnntgggcgggataagcagcagcccttcctcggtgaggatgcaacactttttcttccagagctgcaacaacnccagantgcgcttctccagcacgccctccttcagc

SEQ ID NO: 15539 - DNA, 661 bp, Homo Sapiens
  misc_feature (401)..(445): n is a, c, g, or t
cctcacacactgcgcccgcatctcgcaccaaatatccgcacgccacacccacagccgcactcgcagccgcacgggcaccggcttctccgcagcacctccaactctgcctgaaaggggcagctcccgggcaagacaaggttttgaggacttgaggaagtgggacgagcacatttctattgtcttcacttggatcaaaagcaaaacagtctctccgccccgcaccagatcaagtagtttggacatcaccctactgaaaacttgcgattcttcttagttttctgcatacttttcatcacgatgcaggaaacgatttcgagtcaagaagacttttatttatgaacctttgaaaggatcgtcttgtatggtgaattttctaggagcgatgatgtactgtaattgtnnnnnnnnnnnnnnnnnnnnnnnnnnnnnnnnnnnnnnnnnnnnnaatgcttgttctaagacatttctgaatgtagaccattttccaaaaaggaaactttattttcaaaaacctaatccgtagtaattcctaatcttggagaataaaaaagggcggtggaggggaaaacattaagaatttattcattatttctcgagtactttcagaaagtctgacactttcattgttgtgccagctggttgaaattaaaactctgatatt

SEQ ID NO: 15540 - DNA, 1108 bp, Homo Sapiens
  misc_feature (600)..(600): n is a, c, g, or t
ggaagagtggtatcaacgcagagtgcattacggccggggattctggggttcgtttagaggtttgaattttctcggagaaagacaggccggccacgaggaaaacagaaacaagccgcagcaacatctaagcccttgaaaggatcctgagagaggggggaaagggaaaacagcagccaccagcccaaccacttgtgtcttctgccccttcccacctatcttgcccaccccaccagcccacgctgcttgggacttgaaatctgtggccgaaggaccgtcactacataacttcaaaaataatcaaccaccctcccttcccaaaccacccaaattcactcatccagcgtttacttttttgaatccactcagaacttttttctgcgacccccctccctaaatggagttgggtgggggggaaatgaatactgagttggcctttattttttaaaagactttttgatccaatgaggccccctaaataattgagttttgggtcctggttggttgctttattttttttcctccaaaattttaccccctcccccctgagcccgaggtgctgacgtcgcaaaaaaattggataaaaccaccatcatgggttcngggtcccatagacccccaaagaacttctcaagggcctggacagcttccttaaccgagatggggaagtccaaaagtgtggatgggatttcccagatcttcagtttgatgaaggaaagacgaaagatggtgagtccgatgcacttacttgaacattctcctgcagaaccgttcccccaaaaaatatgggtccaatttattggcgtttggcggcttacaaactttctaaaccattgggctgacccatttcaaaagaccaaccacaaaatttccccttcttccaggaaattttctactggaccctggccaccttctaccggtcccctggaaacccatcctccaggcgaaaaccaacacatcttaaaactgggcgaagacctcctgggagcaagttcaaggggggggatgtaaaagctccggcaaaatgcccccctgatacccttgtcacgccaacgtggagggcttgtaataccggttctaaaaaaagaaacccagcctgtctgggaaaaaa

SEQ ID NO: 15541 - DNA, 1010 bp, Homo Sapiens
  misc_feature (407)..(407): n is a, c, g, or t
gggattctggggttcgtttagaggtttgaattttctcggagaaagacaggccggccacgaggaaaacagaaacaagccgcagcaacataaaccaccatcatgggttcgggtcccatagaccccaaagaacttctcaagggcctggacagcttccttaaccgagatggggaagtcaaaagtgtggatgggatttccaagatcttcagtttgatgaaggaagcacgaaagatggtgagtcgatgcacttacttgaacattctcctgcagacccgttcaccagaaatattggtcaaatttattgacgttggcggctacaaacttcttaacaattggctgacgtattcaaagacaaccaacaacattcccctcctccagcaaattctactgaccctgcagcatctaccgcngactgtagaccatctcaagcagaacaacacagctaaactggtgaagcagctgagcaagtcaagtgaggatgaagagctccggaaattggcctcagtccttgtcagcgactggatggctgtcatccgctctcagagcagtacccagcctgctgagaaagataaggaagaaacgtaaagatgaaggaaaaagtcgaactacccttcctggagcgacctttgacagaggtgaaggctgagacccgggctgaggaggccccagagaagaagagggagaagcccaagtctcttcgcaccacagcacccagtcatgccaagttccgttccactggactagagctggagacaccatccttggtgcctgtgaagaagaatgccagcacagtggtggtttctgacaagtacaaccttaaacccatccccctcaaacgtcagagcaacgtagctgctccaggagatgccactccccctgcagagaagaaatacaagccactcaacacaacacctaatgccaccaaagagatcaaagtgaagatcatcccgccacagcctatggagggcctgggctttctggatgctcttaattcagcccctgttccaggcatc

SEQ ID NO: 15542 - DNA, 793 bp, Homo Sapiens
  misc_feature (611)..(616): n is a, c, g, or t
ggggagccggagaagatggcggtgcggaagaaggacggcggccccaacgtgaagtactacgaggccgcggacaccgtgacccagttcgacaacgtgcggctgtggctcggcaagaactacaagaagtatatacaagctgaaccacccaccaacaagtccctgtctagcctggttgtacagttgctacaatttcaggaagaagtttttgccaaacatgacagcaatgcaccgctcactaaactgccgatcaaatgtttcctagatttcaaagcgggaggctccttgtgccacattcttgcagctgcctacaaattcaagagtgaccagggatggcggcgttacgatttccagaatccatcacgcatggaccgcaatgtggaaatgtttatgaccattgagaagtccttggtgcagaataattgcctgtctcgacctaacatttttctgtgcccagaaattgagcccaaactactagggaaattaaaggacattatcaagagacaccagggaacagtcactgaggataagaacaatgcctcccatgttgtgtatcctgtcccggggaatctagaagaagaggaatgggtacgaccagtcatgaagagggatannnnnnttcttctgcactggggctactatcctgacagctaccaaacgttggatcccaccgagagaaaaatgagggcttcttggggaagatgctcccaacttcctggagaaaccctagggaaggttccctggcaaagtggggatccctgggaaacccgaccccccttccaatgatatgggaagt

SEQ ID NO: 15543 - DNA, 1363 bp, Homo Sapiens
  misc_feature (19)..(19): n is a, c, g, or t
ctcaacgctttatacttcnctagcctatattcaagtggcaatcacatgctaagaggggtgggcagatagtacaattaagtgaaactgtctgagtactgaaccggaggtgacaaagagagtgtagctgtaaagaaactacagatttgtgccctgctgtaggcaacagtaaggtgccagggaacagtcactgaggataagaacaatgcctcccatgttgtgtatcctgtcccggggaatctagaagaagaggaatgggtacgaccagtcatgaagagggataagcaggttcttctgcactggggctactatcctgacagttacgacacgtggatcccagcgagtgaaattgaggcatctgtggaagatgctccaactcctgagaaacctaggaaggttcatgcaaagtggatcctggacaccgacaccttcaatgaatggatgaatgaggaagactatgaagtaaatgatgacaaaaaccctgtctcccgccgaaagaagatttcagccaagacactgacagatgaggtgaacagcccagattcagatcgacgggacaagaaggggggaaactataagaagaggaagcgctccccctctccttcaccaaccccagaagcaaagaagaaaaatgctaacgaaaggtccctcaacaccttacactaagtcaaagcgtggccacagagaagaggagcaagaagacctgacaaaggacatggacgagccctcaccagtccccaatgtagaagaggtgacacttcccaaaacagtcaacacaaagaaagatctcagagtcggccccagtcaaaggcggcaccatgatccgatcctggatgaacaggaagatgaaagcatggagacgacgggcaaggatgaggatgagaacagtacgggggaacaagggagagcaagaacaagaatccagaactgaactgagggaatcggacaatggaacagaaagcccgacgagcataactcagtacacaggatacggcaagccatgagataggacctaaccaagaagaagtcacggacaagtgaagcaggaagggacacaccacagcaaatcgaacaaacggcaacagaaagcagacaaatcataccacgagatactaaccgtgggcactaaaagagaacactgaggaaagcgacaacataaccggacgtcgagaacccacagagggaaggaaagcaataaaccacgaacaccggcactgggcgagaggaacagctcataacaggagggacagccaagaagcacagcagagacagaagcaaaaacagaatccctaaggagaaaagagagaggacaaaatagaagaaaccacaagatgaacagcaagacgaaggcaaaaacaagagccaa

SEQ ID NO: 15544 - DNA, 716 bp, Homo Sapiens
  misc_feature (473)..(482): n is a, c, g, or t
  misc_feature (485)..(485): n is a, c, g, or t
  misc_feature (488)..(491): n is a, c, g, or t
  misc_feature (495)..(553): n is a, c, g, or t
  misc_feature (626)..(626): n is a, c, g, or t
gggtgttcaggcgcgggtgcgcgcgcagctgctgtggccctgcttggtgcgcccgctgtcaccgccatggctgccccgtgtttgctgcggcaaggacgagccggggcgctgaagactatgctccaggaagcccaggtgtttcgaggacttgcttctacggtttctttgtctgcggaatcagggaagagtgaaaagggtcagccacagaattccaagaagcaaagtccaccaaaaaagccagccccagtgcctgctgagccgtttgacaacactacctacaagaacctgcagcatcatgactacagcacgtacaccttcttagacctcaacctcgaactctcaaaattcaggatgcctcagccctcctcaggccgggagtcacctcgacactgagggccctcggtgtgaagatgaaccttccaccgtcttcactgcatcctggagtgcaaaaataaaatccactcaagagtcannnnnnnnnnaanaannnnaaannnnnnnnnnnnnnnnnnnnnnnnnnnnnnnnnnnnnnnnnnnnnnnnnnnnnnnnnnncccttgtgggccgcccttgggcccctcaaaaaacttttccaagaccttttcgtttgggcgcccgggggcccantaagggaaagggaaacctggggcctaaacttggtttccccaagggaaatacccgggccaaagaacaaaagtgcttgtgaatttccccccc

SEQ ID NO: 15545 - DNA, 1154 bp, Homo Sapiens
ggaccggtccggaatttccgggattgtggccctgcttggtgcgtccgctgtcaccgccatggctgccccgtgtttgctgcggcaaggacgagccggggcgctgaagactatgctccaggaagcccaggtgtttcgaggacttgcttctacgggttctttgtctgcggaatcagggaagagtgaaaagggtcagccacagaattccaagaagcaaagtccaccaaaaaatgtagtggaaccaaaggagaggggcaagctcctagccacccagacagcagctgaattgtctaaaaacttatcttcacccagttcttacccgccagctgtgaataagggcaggaaggtagctagtcccagtcccagtggcagcgtgctattcacagatgaaggggttccgaaatttttgtcaagaaagactttggtagagtttccacagaaagttctgtctccattcagaaaacagggctctgattcagaagctcgtcaggtgggtcggaaagtgacgtcgccttcgtcttcatcctcttccagctcctctgattctgaatctgatgatgaggctgacgtttcagaggtcactcctcgagtggtgagcaaaggcagaggggggcttcgaaaaccagaggcctctcattcctttgaaaacagagccccccgagttacagtatcagcaaaagagaaaaccttgctgcagaagccgcatgtggacattactgatccagagaagccccaccagccaaagaagaaagggtcccctgctaagccatcagaaggcagggaaaatgcgagaccaaaaaccacaatgcccagatctcaagtagatgaagagttttttggagcaaagtttaaaggaaaacaattgcagaaaaccatttagatttaatgggatagataaagaaaggccaaagcccttttgaaggttaagggaccctacttggccacacaaaatcagggttgtctggcgccacccgaagggcagcccaaaccccctgctggggtgggcaaaaaaaggcacaaccaaaggggcagctgcaaaccattccttctgggggcgggaaaaggggcatcttggaaaaacccggggccaaagcccccaggccaaaggggggcccctcccccgttgccaaaaaggggaaccctctcggagaccccgc

SEQ ID NO: 15546 - DNA, 589 bp, Homo Sapiens
  misc_feature (277)..(312): n is a, c, g, or t
tgtactgccatcctcctcctggaagagatcctgtaacttttcagcatcaacaccagcgactcctagagaacaaaatgaacagtgatgaaataaaaatgcagctaggcagaaataaaaaagcaaagcagattgaaaatatcgttgacaaaacttttttccatcaagagaatgtgagggctttgaccaaaggagtccaggctgtgatgggttacaagcccgggagtggtgtagtgactgcatccactgcgagctctgagaacggggcggggaagccctnnnnnnnnnnnnnnnnnnnnnnnnnnnnnnnnnnnngtcgtagactctacaagcacctggatatgtgaggttgggctgcaacagaaatgtcatctgcattgtgcagatggaaaagagcagaagctgcctgttgcctgtggaaccgtcccaagacactagcactgtagaacgggccctgctcttgcagagcacggctgcacccaacagtctccatgtcaagaccaagggcctcctggaaacaccaactctgacaaaaaggagtcatctgggagcccgagaatcctactcctggccgggcacagtggctcacgca

SEQ ID NO: 15547 - DNA, 562 bp, Homo Sapiens
ccatgtcaagaccaagggcctcctggaaacaccaactctgacaaaaaggagtcatctgggagcccgagaatcctactttgcaagggatggttcacgagacacatttgggacgaaggtgaaagagaaattccccattctgagtgtcctagttgggttcctccgactctaaacaagggacttgggttcagttagtgtacagcgggggctcacgtccactaaggaacatgtagaatgtaaccaccgggtgacagggaagctgcggtatttactacctagcccccatcttcactggttattccacttatttaaaatgtccagaataagcaaatctccatatagaggaagtagattagtggttgcttcgggatgggaggaatgggaagattgaggtctttcttttgcagtgataaaaatgtcctaaaattgactgtagcgatggtcacacaactctgaatatgcttaagaccattgaattacacactttacattggtgaattgtatggtatgtaaattatagttcaataacatagttacaaaagataatcaaaagcatgaaaaaaaa

SEQ ID NO: 15548 - DNA, 831 bp, Homo Sapiens
tgggacaacgacatagagtaccggcttctgaaccgtatgggttgctagcacattttcatatcccaaaccaggagagctgttttagggcagccctctgaccccaccaccaactcagctgtcatcttgcataccccatctcagctgtcatcctgcatacctctgaccctatctcagctgtcatcctgcacacctctgaccccatctcagctgtcatcctgcacaatctctgacccatcaccatctcagccgtcatcctgcacacctctgacccatcaccatctcagccatcatcctgcacacctctgactcatcagcatctcagccgtcatcctgcacacctctgacccatcaacatctcagccgtcatcctgcatacctttgacccatcaccatctaagctgtcatcctgcacacctctgacccatcacacatctcagctgtcaccctgcacacctctgaccccatctcagttgttgtcctccaccaaccgggtctaactttatcccgctcgctctggggacacacgtgatgtcccccccatctcccaggctctccaccctgggccaaggagtcagagcatggggcagggagaagatccaaagggtggtgtccctgtctagtgggccccctcacctctgccttcagggcgcattagccctgagccaaggcggctttgatgacggccaccaacttcagaaacttgctttccgtgtccacgtagccatcgcctttctagggaggggaggaagagggaaggggtgagctgggaccgagacaccaacctcagccccaaccccatgctagccccaaaaccagagaggggcggagcag

SEQ ID NO: 15549 - DNA, 803 bp, Homo Sapiens
  misc_feature (87)..(87): n is a, c, g, or t
acagttagctttatcctagacagaacatctatcaaactacaggtcaatatgctaatcatatttttatattatacattaaatatatanctaaatagaaaatattaatttgaataccatctaaaatcttcttgtgaaccagggatacacacatcagacattggcaaacagtagtacagatttaagtgtgagaaaacccaggcataagaaggaagaaggtaagttatttgctcaaagacaaaggctaaggtgagcaccagggtctctggacccttcagtagggtttttcataggtcactgaatgcatcctttggtgcacagaccagaaatgactgtgaatgcatccaagactcatctgtgaggctaccaagcggggggaaagatcagtcacttaccagccatgtacgtgaaattgcttgggaacctgaactcccgctggaatttctacctggaaagggttgctgatgctctatttttgttatccaacctcctgcccgctctggcccctaagaggcaccagggactatgttttatctcaccttagccaaaacctagtcttacaacactcctttccagtgggtaggggtgtgggggaatagccctgctggaggcttccaggctggctccgagatgcccacttctgcagaggaggccaaggttgcctgtgctcgaggcatgtggtaggcgtgaggttcctgctagcagggtgttcaagctgcagagggatggggctggagaaagacttctagtcctgtaactgtcaggtcgctgggccccggggcccattgttggctgcagcccccgca

SEQ ID NO: 15550 - DNA, 773 bp, Homo Sapiens
  misc_feature (573)..(573): n is a, c, g, or t
  misc_feature (738)..(738): n is a, c, g, or t
  misc_feature (744)..(744): n is a, c, g, or t
gggagcggcagagggcagtgtccttgctgaagcaggctgcagactcaggcttgagagaggcccaagctttcctcggggtgcttttcaccaaggagccctacctggatgagcagagagctgtgaaatatctttggcttgcagccaacaatggggactcacagagcaggtaccaccttggaatttgctatgagaaaggccttggtgtgcagaggaatctgggagaggccttgagatgttaccagcagtcagccgctctgggaaatgaggccgcccaggagaggctgcgagccctcttttccatgggggctgcagccccggggcccagcgacctgacagttacaggactgaagtctttctccagcccctccctctgcagcttgaacaccctgctagcaggaacctcacgcctaccacatgcctcgagcacaggcaaccttggcctcctctgcagaagtgggcatctcggagccagcctggaagcctccagcagggctattcccccacaaccctacccactggaaaggagtgttgtaagactaggttttggctaagaacttctcacctcagccctanagagggagcctgtgggttctcagagagatatcacaatttgagtcccaaagaagaggccagatacccacccaccttcccccaaatcttaagcacctgcgccagtacagtcaagaagagggaagtgttgtgaagaacccaggtctgggctctgcccacttgcctggnccatgntcacccttggaagctggtgacctggactc

SEQ ID NO: 15551 - DNA, 1406 bp, Homo Sapiens
ttttccaccacagggccccccctttaagggtcgccactgagcccccccgcggggttttctctccctaaaggggaaaaccacaggcgtttagggggccccaatggtgtcccactttaaccccttaaaggggggcccgcgccggccgcccgaaagcgaaaatgggtcttagggaaaagttttctttgaggggcccaagggcggccccgccaaggccacattagtttcggggtcggcgtgctgttgttgggggagtgccatttaatgggtttttgaccaatttctttctgggtcgtgtttttaaactcccccctccccaggtccaacaatggtaaaaaaaaccccacggagttgggcagggccttattaggccagcccaaagccttcagagcactcctggatagccaacagtagcatgtggcggagcttctcaaagctctcataggcaggcagatccagctgattaaaacatgtgtgagctgaaggcaggcgatctgtggacctgtcatctcgatggatctgaaacttctgaatgccattcatgccttcgagggcagcaaagccttgcaggggtaccttggaaatacccgtgacaaactggaggaacttggcacggtcagcttgatcgaaagaacgcaatgctctccagaaccactggatctgaatagagttggactggtacttgtggtattcagtgttggatttcagatcatcgatgtcaatggtgggcagtcctgatataagcagctctaactcctgctcagtgaagatggaaatgaggcgctttggaatgatctcatagaagccttctaagaaagccgccaactgcttgcggatggctcctgtcattctcatctggcataccaggtgtacatactccttcttattctcctctgttaccaagatgttggccccattgggtttgaggtcacgaacttcacaaactccaaactcttggacctcagtgctgaaggtgaggtcatagcctagtgtggagacatcattttccagcagataaaccagaccttggtagaagtggtaatcttcactctccatatctgtatatctgactgacttgcccaagatgtgtttgtaaaaggatcgagtaaagtagcactccagaagacggttgtcatatacagctttggccacaatgcgtacgacaaacttgaagtagctgaggtggttggggttgcagtgggaagatggattgatggtgtaggtgactcgatcaccaggtgaggtacggaacaaggcatacatagggttaaacatctctcgagagatgatcatataccactcccgcaggagcccgccagcatcctgcccttctgctccttcaaatactatatacaatcgattcttcatttcttcgggggatttgcgatgcagctcacgataggagtctt

SEQ ID NO: 15552 - DNA, 863 bp, Homo Sapiens
  misc_feature (96)..(131): n is a, c, g, or t
gagacgagagtatacagcatacttgatgttttcaggaccctaccaagatggggaacacaaatgtggctgagtcctggacctgggtaactcacaatnnnnnnnnnnnnnnnnnnnnnnnnnnnnnnnnnnnngtgctagacacagtgggggcgtggggagacactgtcaggtaaacagcaccacaagagagcatggtgtattccagggccagcgtgactggagcaaggaggagttgcagggagcaaaagtctaaagagctcagcagaggtccgattaccagtgactctgaaaaccaccttcaagtttgcactttagcctatgggcgagtgaggccagggtgtttaaggaggagtgacagggtcagatttttggttttggtgcctgatggccagtttgggagccagataaagggggacatactgggctgagacaagattgggagtcatcaagaagcagggagttggtttcttcagggaggggaggggctggtgggcaccatgggaacacacagatttggttatctgtcatccctcaccacaaactgatctttcttctttccttagttttaatcagctggatctgcctgcctatgagagctttgagaagctccgccacatgctactgttggctatccaggagtgctctgaaggctttgggctggcctaataaggccctgcccaactccgtggggttttttttaccattgttggacctggggaggggggagttaaaaaaagaaccagaaagaaattgtcaaaaaccaataaatgaaatccaccaactcaccgtgtgtgtcccagcagccccatcttccccagcgcatacctgttcctcttctaattctctgcactcccgtaccaggg

SEQ ID NO: 15553 - DNA, 811 bp, Homo Sapiens
ggaaggcaagctaatgaccagttagagaagacaatgaaagataagcaggagctggaagacttcataaagcaaagcagcgaagattcgagtcaccagatctctgcactcgtcctaagagcccaggcctccgagatcttacttgaagagttacagcaggggctttcccaggcaaagagggatgttcaggaacagatggcggtgctgatgcagtcacgggaacaggtttcagaagagctggtgaggttacagaaagataatgacagtctccagggaaagcacagcctgcatgtgtcattacagcaagcagaagacttcatcctcccagacactacagaggcactgcgggagttggtattaaaataccgtgaggacatcattaatgtgcggacagcagcagaccacgtagaagaaaagctgaaggctgagatacttttcctaaaagagcagatccaagcagaacagtgtttaaaagaaaatcttgaagaaactctgcaactagaaatagaaaactgcaaggaggaaatagcttctatttctagcctaaaagctgaattagaaagaataaaagtggaaaaaggacagttggagtccacattaagagagaagtctcaacagcttgagagtcttcaggaaataaagatcagtttggaagagcagttaaagaaagagactgctgctaaggctaccgttgaacagctaatgtttgaagagaagaacaaagctcagagattacagacagaattagatgtcagtgagcaagtccagagagattttgtgaagctttcacagaaccttcaggtgcagttagagc

SEQ ID NO: 15554 - DNA, 646 bp, Homo Sapiens
gctccaccgacggggtgggctggttgggaagagtcttacatggtatgctaaggagtcagtactttactcataaggaggcaaaattggcaaggcatacagaaaaagaaaaatgggccaagtgtgaagaacacaccaggtttctggcttgaatgatgaagttccagacatttggggtggaggtaggagcagccagtctctaaacctctagctactgccagtggtcaagtcagggatcggcaaggttctgtcccccaaaactgccttcgtgctctgtatgtggttccccaaatgcctcacctgaagggtctgtgaaagctttacaaaatccctctggacttgctcactgacatctaattctgtctgtaatctctgagctctattcttctcttcaaacattagttgttcaacggtagcctaaaaaatacaagttttgaatgaagattaatgccaaagggccgaattacttaggaaatccagtaacttgtagttacctactactagggcagaaaggtgggtggatatccgtcgcactcctatacacgaccaatctctttatctatagggcaagcgtgcaggccatctagactaattgctctaagtcctgagatgaactgggtatgaaaagccacagggagaaatggattac

SEQ ID NO: 15555 - DNA, 1037 bp, Homo Sapiens
gaggtgatctagagtttcccctgtacgggagtggtatcatggtgattaataaattcaaacaaagctgaatgataagaccccaggatggaatacagtctgagaaaggcctgggcaaagggaggcagagggactgaaggaagcaggtcaagggaagatacacccatggtagcctaggaaattggcagtagtgttggtgggtggggaaaaggagggtttggctgtatgcctagctttcacaaggtaggggatgaggaagatgatcatgatattgcacagaggacccaacactgaattgtgggagctagaggttgcttgaggcaaagtaaaaaggcttcggacactttcaaaaggaggctggccaaaggcgtgattagggactccagtaatggacatactagaggccctcgggcacctcaagccctgaatgggtcagcagctccccatcccagagagcaaaggcaggcaccactggaccccggaaatctgtctgtagcgtgtgaaccacagagacctggctcacatccaccaggctcagcttctgggcctcatactccagcaacagccccaccttctctggctgcccaataccctcaactggggctttctcgttggccaacatggtgtaccacttgcgctgggcataggtgaacacccaggaacgatcatcaacaccaatgcagctatcccgggacatgtccacatctgccactcctatccggaactgctgggagcgcttcactgtcacttcccagtagtgtctgccactggtgaccgctgtgtctgccagcaccactgcccactcccggaagcgctccacattcaaggccaccttggtgggctccaatcccaccaagccatatttgacacccgtatcatctctgaagagtgccaggctgctgtgggcggttttttcttccagtttgaaactgacgcctctctgggcctctgtggaggcaactcccaatcgtttggctccccagcggcacaagcgcaaagaacgtgcaaaaagcagcgccatcttgcgccttggatgaccc

SEQ ID NO: 15556 - DNA, 898 bp, Homo Sapiens
  misc_feature (637)..(734): n is a, c, g, or t
cgaaagctaggcatacagccaaaccctccttttccccacccaccaacactactgccaattgcctaggctaccatgggtgtatcttccttgacctgcttccttcagtccctctgcctccctttgcccaggcctttctcagactgtattccatcctggggtcttatcattcagctgtgtttgaatttattaatcaccatgatacctctccctccctttgtccacatgtaacttgttctaggggctctaccagatggctgaagagtaaatcctttctacctctggctgaaggagtggtgcagtcaatgacttggccctttttctacagcacatttagagtttgggctctggctccctcagtaagtgctttattaactcagtgtgtcaaaatgaaaacagagccctccttccccagtagctcagtgccacagaccttcagccccacacagctgtagctatccttaccctgagtccatctaccttaaatctgtacctctgacagccagccagtctgtcataatcattatcccagttataacccttgaccaaaagggggaagagagacacttgggggatatctaggggatgagtgctagaaactatttatttattttcgagacagagtactcactctgtcagnnnnnnnnnnnnnnnnnnnnnnnnnnnnnnnnnnnnnnnnnnnnnnnnnnnnnnnnnnnnnnnnnnnnnnnnnnnnnnnnnnnnnnnnnnnnnnnnnnaccaggtgtgtgcccaccaggcccggactcatagagactctacggagtagacgagggggtaaaggcacaatgggccaggccggcctcgaagctcctggcctcatgtgaacagcccaaccttggacgtccacagtgcgggaatcaagcgtgagccacgcaccggt

SEQ ID NO: 15557 - DNA, 558 bp, Homo Sapiens
gtacattctgggggaaatgtcagggctggagactatgggctaatccatgcaggactgagtggtggggcacagctgctatccaactcaccaggatggctggaggtattcctctggtcacagctggctccccagaagaagcttcaaatggcagaaaagcttggagcagctggtggattcaattacaaaaaagaggatttctctgaagcaacgctgaaattcaccaaagtacaagcaaatgctggtgaatgctttcacggagcaaattctgcctcacttctccacggagggcccccaacgtctgctgccggttctggacagaatctacccagtgaccgaaatccaggaggcccataagtacatggaggccaacaagaacataggcaagatcgtcctggaactgccccagtgaaggaggatggggcaggacaggacgcggccaccccaggcctttccagagcaaacctggagaagattcacaatagacaggccaagaaacccggtgcttcctccagagccgtttaaagctgatatgaggaaataaagagtgaactgggccat

SEQ ID NO: 15558 - DNA, 821 bp, Homo Sapiens
ctggggctctggggctcgggctttgtcaccgggacccgcaggagccagaaccactcggcgccgcctggtgcatgggaggggagccgggccaggaacaatatgttagccgtgcactttgacaagcctgggaggaccggaaaacctctacgtgaaggaggtggcctaagccgagcccgggggagggtgaagtcctcctgaaggtggcggccagcgccctgaaccgggcggacttaatgcagagacaaggccagtatgacgccacctccaggagccagcaagcatttctgggacttgaggcatctggacgatgtggcagagctggggcctggctgccagggacactggaagatcggggacacagccatggctctgctccccggtgggggccaggctcagtacgtcactgtccccgaagggctcctcatgcctatcccagagggattgaccctgacccaggctacagccatcccagaggcctggctcaccgccttccagctgttacatcttgtgggaaatgttcaggctggagactattgtgctaatccatgcaggactgagtggtgtgggcacagctgctatccaactcacccggatggctggagctattcctctggtcacagctggctcccagaagaagcttcaaatggcagaaaagcttggagcagctgctggattcaattacaaaaaagaggatttctctgaagcaacgctgaaattcaccaaaggtgctggagttaatcttattctagactgcataggcggatcctactgggagaagaacgctcaactgcctggctcttgatggtcaatggtcccgcacg

SEQ ID NO: 15559 - DNA, 625 bp, Homo Sapiens
  misc_feature (514)..(514): n is a, c, g, or t
  misc_feature (570)..(570): n is a, c, g, or t
  misc_feature (583)..(583): n is a, c, g, or t
  misc_feature (587)..(587): n is a, c, g, or t
  misc_feature (597)..(597): n is a, c, g, or t
  misc_feature (612)..(612): n is a, c, g, or t
agttacaacagctccagttacaacagctccagttacaacagctccagttacaacagctccaggtacaacgagctacagctacaacagctccagttacaacagctccagttacaacagctggtcctaacttttatacaaagtgaaactatatagagctcctttgccaacataaggagctacataatttctattacacttgcctaggcatgagaaacgcaaaagcaactcaaaaggagcaagtccaggaaaagaaaagctatgaaggagagaaagactagcagatgaaacacatactctgaaaaactccaatctgccattcaagtattggaaataccccaaaggggacaatgaatgggatctattacaacaaagtcagcaaagtaaaatgcaaatctcacacatgataaatggccctgataggctgtttgctgaaagacctaaggctagtgattcagtccacaatttcttctggaccctaaagaaggggttcatataaaagtcatacttgtctttntgcaattttctcttggttgtcttcagagaatagtcatttgcttctttcattcaggntatgcagaccatntctntaaaccccanaaagagtaataattntcatatactaaaa

SEQ ID NO: 15560 - DNA, 515 bp, Homo Sapiens
  misc_feature (470)..(470): n is a, c, g, or t
ctccagttacaacaggtccagctacaacagctccagttacaacagctccagttacaacagctccagacacaacagctgcagtagataactgatgcatatgtattgtatcatattaattaaaatcgtaaaaagatggttagcttaatatgaaggtttggtgcaagtattgcctcaacaggtaatgagtcttttccatgtagctgatttaaatttattcaacaaacatttaaggtgcgcacactgtgctaggcttggggtttatggaacatatgcagtaatggggagaaacataggatatacatagtaagcaaatctcaagtactgtggataaagaaaatgtgtaagaggataccaagtttgggagtgccagcactgtgaatgtctgcgagtttgtggtggaatgggatgaaatttagaaagactttgaagacagaaccttgctcatgctggatgagatggtttgggatggngtggaagcagggagccgtgtcaggtctcagggtaattaaagctca

SEQ ID NO: 15561 - DNA, 437 bp, Homo Sapiens
ttacaacagctccattacaacagctccagttacaacagctccagttacaacagctccattacaacagctccagttacaacagctccattacaacagctccagttacaacagctacctccttcaaaggataaattgtattgataagggattaatagtttttcttaaatggacatttggtctgggatagcaccattggaagaattctgaaacgcttatctcacaggttttcttaaagcatccaatcggtacccctcattttacagatgtgaatatggaagcccatggagactaagtgtcctgcccagggtcatgcaaaaggtgagggcagagctgagggcaaactgagactccatttccattccaggctttcttccaccctactgtacagccacacgtccttgtcctgtggggtggatagctttctcccatctaaatga

SEQ ID NO: 15562 - DNA, 1307 bp, Homo Sapiens
agcaacacaccggacatagcatcctgtcgcaagttacaacagctcaagttacaacagctccagttacaacagctccagttacaacagctccagttacaacagctccagctacaacagctccagttacaacagctccagttacaacagctccagttacaacagctccagttacaacagctccagttacaacagctccagttacaacagctccagttacaacagcttcagttacaacagctccagttacaacagctccagttacaacagctccagttacaacagctccagttacaacagctccagttacaacagctccagttacaacagctccagttacaacagctccagttacaacagctccagcttacaacagcgccagtgacagcacctcagattctgtcagaagatcatccaataaggatgatttatacagctggcctactagctcactctgaagagtgtctttcacatgattaaccaaaaaatgcattactgcctttggcacactgtcttgaatattctttctgacaatgagaaaatatgatttaatgagtcgttcaataacctcacaatctcgctgttcccgagcagatagttttcgtgcaacaggaactggcacatctagcaggttcacggcatgacctttttgtggactggctggcataattggaatgggttttgatttttcttctgctaataactcttcagcttttgaagttttcagcattcctctccagttgcctgtggttggttcttgaacaccatctccaaccccaccacctccagatgcaacattgtctagtgatacagctgaagctaattctctgaataaacttgtctcgtgatacagctgaaggtaattctctggctagcctgtttctcctttgttcctctatattattgttcattagcccacaagcatcagcaaagtctggatgttttgtgttgatataagccagttcaattgccactaagttatggaccatttcatttgtaacaggcaaccttttacgaagaagacaagtcaccacttcaactatggcatcatgaagtttaggaaatcgtaacaattcctgagtactgtaattgctacagtgctgaatgatcctttgcatttcctcatgaaccagttccacacagcggaggctgggctcttctagacgtttgatttgccgcttcaccagtaactcaaatgaaacctcaggcacaaataaagcaggacgaggaccagtagcatttctaatggcagtcaaaatgtcaatagtgttaaggccaccaagtggatcaacactcgtgccgaatgtgcc

SEQ ID NO: 15563 - DNA, 877 bp, Homo Sapiens
ggggccctgtgagttcctccggccgggctgcggggctccgctcagtccgggagcgcagctgggccgcggcgctccgacctccgctttcccaccgcccgcagctgaagcacatcccgcagcccggcgcggactccgatcgccgcagttgccctctggcgccatgtcgcagaacggagcgcccgggatgcaggaggagagcctgcagggctcctgggtagaactgcacttcagcaataatgggaacgggggcagcgttccagcctcggtttctatttataatggagacatggaaaaaatactgctggacgcacagcatgagtctggacggagtagctccaagagctctcactgtgacagcccacctcgctcgcagacaccacaagataccaacagagcttctgaaacagatacccatagcattggagagaaaaacagctcacagtctgaggaagatgatattgaaagaaggaaagaagttgaaagcatcttgaagaaaaactcagattggatatgggattggtcaagtcggccggaaaatattccccccacaggagttccctctttaaacaccccgaagcgcacggcccaccctcagaatgagggaacacgagccgtcatgaaagaaagggggcaatattctctgcagaaattcctgaaaagttttccctcccatctctgctgggtcttttcatttggctggcccatcgggatggggggaacctataattgggcaagggcgttctgaaaaaaccctccccccaagacactttttttgaattgaaaaaaactggggaagcctcgacacttggggtctccttttaagggggagatttaccttttcttggaagctcttggcaaaacatatacgcctccacta

SEQ ID NO: 15564 - DNA, 698 bp, Homo Sapiens
  misc_feature (106)..(210): n is a, c, g, or t
tctagaggatcctctctggatgcaagtgtcatcattgagtgtttttctgctgacaggacctacaccttctgatgtcttcaaacagtactcacaccttacagagaannnnnnnnnnnnnnnnnnnnnnnnnnnnnnnnnnnnnnnnnnnnnnnnnnnnnnnnnnnnnnnnnnnnnnnnnnnnnnnnnnnnnnnnnnnnnnnnnnnnnnnnnaattaatgtaatagtgacatggaaaaaatacagctggatgcttaaaatgaattgggacagagtagctccaaaagttctgtgacagcctacctcttttacagacatgggagaaaaatagctctcagtctgaggaagatactgagaaaaggaaagaagttgaaagcatcttgaagaaaaattcagatcggatatgggataggacaagtaggccagaaaatattccccacaaggagttcctctttaaagcacctgaagcacgtagctacccagcatggaatataaagcctgatgaggaaagggggcattattctcagcagaatttccaaagggtttggctgctgtctcatctggtggccatgggattggggatctatattggaaggcatctgacaacttctagcagcaccttttgatgaataatttgatccagctttgtgcgtatagtggggattctatctgagcttgtgcaaagctaactcaggagctgt

SEQ ID NO: 15565 - DNA, 1840 bp, Homo Sapiens
gggtgggtggggttatgtgagggtatgaagagctgtcttcccctgagagtttcctcagaacccacagtgagaggggagggctcctggggcagagaagttccttaggttttctttggaatgaaattcctccttccccccatctctgagtagaggaagcccaccaatctgccctttgcagtgtgcagggtggaaggtaagaggttggtgtggagttggggctgccatagggtctgcagcctgctggggctaagcggtggaggaaggctctgtcactccaggcatatgtttccccatctctgtctggggctacagaatagggtggcagaagtgtcaccctgtgggtgtctccctcgggggctcttcccctagacctccccctcacttacataaagctcccttgaagcaagaaagagggtcccagggctgcaaaactggaagcacagcctcggggatggggagggaaagacggtgctatatccagttcctgctctctgctcatgggtggctgtgacaaccctggcctcacttgattcatctctggttttcttgccaccctctgggagtccccatcccattttcatcctgagcccaaccaggccctgccattggcctcttgtcccttggcacacttgtacccacaggtgaggggcaggacctgaaggtattggcctgttcaacaatcagtcatcatgggtgtttttgtcaactgcttgttaattgatttggggatgtttgccccgaatgagaggttgaggaaaagactgtgggtggggaggccctgcctgacccatcccttttcctttctggccccagcctaggtggaggcaagtggaatatcttatattgggcgatttgggggctcggggaggcagagaatctcttgggagtcttgggtggcgctggtgcattctgtttcctcttgatctcaaagcacaatgtggatttggggaccaaaggtcagggacacatccccttagaggacctgagtttgggagagtggtgagtggaagggaggagcagcaagaagcagcctgttttcactcagcttaattctccttcccagataaggcaagccagtcatggaatcttgctgcaggccctccctctactcttcctgtccctaaaataggggccgttttcttacacacccccagagagaggagggactgtcacactggtgctgagtgaccgggggctgctgggcgtctgttctttaccaaaaccatccatccctagaagagcacagagccctgaggggctgggctgggctgggctgagcccctggtcttctctacagttcacagaggtctttcagctcatttaatcccaggaaagaggcatcaaagctagaatgtgaatataacttttgtggaccaatactaagaataacaagaagcccagtggtgaggaaagtgcgttctcccagcactgcctcctgttttctccctctcatgtccctccagggaaaatgactttattgcttaatttctgcctttcccccctcacacatgcacttttgggcctttttttatagctggaaaaaacaaaataccaccctacaaacctgtatttaaaaagaaacagaaatgaccacgtgaaatttgactctgtccaaacatttcatccgtgggcatgtgtatgtgtgtgaatgtgggaaaccgccaagtcatctttttaaatgggggtgttgccccattttgaacctggttgggccccctccctcgggggttggtgctcgggattcaacctttctggcccgttatgaatctgaacatttgactttgaacccaaaggaaacttttccccgggggacccaaataaaagaatattttttacccgc

SEQ ID NO: 15566 - DNA, 737 bp, Homo Sapiens
cattgacgggcttgccttatctggggaaggagaataaagcggagtgaaaacaggcggcttctggctgctcctcccttccactcaccactctcccaaactcaggtcctccctagtcctccagcgtcaacactatcccttgggagttgtagctgctgtcactgactcccggctatacatggccggtcgaccacgtaatagccctcaggcatgttgaactggctctctaagagaggtggggaccaggctaggttccgggtgacgcccaggagaggtggtggccttcacacatgcacatggagttgaggaccagggagctgcagggaaagcaacagctataggtgccttgctcttctgtcggaggctgctgggggcaagagcagctgcacaaggccagggcaagtgctagggcccctcccccatcacatggtcacactgggacaggcgtgcagctcactgaactccaagcgagccagccctctcttggactagaaggcctactgtcagcccttcgcttacaaactgcaggctcaatccgaaggggacggccggcgggggctctcctagtgcccagagacaggcccagaggtttacaagttttctaagcttttgataatgtgaagctccaggccgagaggatgctgttgagcacattgcagctatgtaatttttggtgtatgtatgtaatatttaaggttggaaaaaaaactcaaaagcaaagatattaactcttattagaa

SEQ ID NO: 15567 - DNA, 1012 bp, Homo Sapiens
ggatatataaacactgggacttcaacatcatagataaagataccagcagtagtcgcctctctttcagcagttacccagggtttttggagtctctggatgatttttacattcttagcagtggattgatattgctgcagaccacaaacagtgtgtttaataaaaccctgctaaagcaggtaatacccgagactctcctgtcctggcaaagagtccgtgtggccaatatgatggcagatagtggcaagaggtgggcagacatcttttcaaaatacaactctggcacctataacaatcaatacatggttctggacctgaagaaagtaaagctgaaccacagtcttgacaaaggcactctgtacattgtggagcaaattcctacatatgtagaatattctgaacaaactgatgttctacggaaaggatattggccctcctacaatgttcctttccatgaaaaaatctacaactggagtggctatccactgttagttcagaagctgggcttggactactcttatgatttagctccacgagccaaaattttccggcgtgaccaagggaaagtgactgatacggcatccatgaaatatatcatgcgatacaacaattataagaaggatccttacagtagaggtgacccctgtaataccatctgctgccgtgaggacctgaactcacctaacccaagtcctggaggttgttatgacacaaaggtggcagatatctacctagcatctcagtacacatcctatgccataagtggtcccacagtacaaggtggcctccctgtttttcgctgggaccgtttcaacaaaactctacatcagggcatggcagaggtctacaactttgattttattaccatgaaaccaattttgaaacttgatataaaatgaaggagggagatgacggactagaagactgtaaataagataccaaaggcactattttagctatgtttttcccatcagaattatgcaataaaatatattaatttgtcactttcaaaaaa

SEQ ID NO: 15568 - DNA, 1568 bp, Homo Sapiens
caggaaggcgtgtgcaaggcggggtccggcccgcgcaggtcgggtaagcgcgtctagggcgctgcgcggcgcagcgaaaatggcggcttccaggtgggcgcgcaaggccgtggtcctgctttgtgcctctgacctgctgctgctgctgctactgctaccaccgcctgggtcctgcgcggccgaaggctcgcccgggacgcccgacgagtctaccccacctccccggaagaagaagaaggatattcgcgattacaatgatgcagacatggcgcgtcttctggagcaatgggagaaagatgatgacattgaagaaggagatcttccagagcacaagagaccttcagcacctgtcgacttctcaaagatagacccaagcaagcctgaaagcatattgaaaatgacgaaaaaagggaagactctcatgatgtttgtcactgtatcaggaagccctactgagaaggagacagaggaaattacgagcctctggcagggcagccttttcaatgccaactatgacgtccagaggttcattgtgggatcagaccgtgctatcttcatgcttcgcgatgggagctacgcctgggagatcaaggactttttggtcggtcaagacaggtgtgctgatgtaactctggagggccaggtgtaccccggcaaaggaggaggaagcaaagagaaaaataaaacaaagcaagacaagggcaaaaaaaagacaggaaggagatctgaaatctcggtcttccaaggaagaaaatcgagctgggaactaaaagagaagaccttgtgatggggcagcactgacgccccgcgcggggaccagcgggacgtggagagctcttctgcccaccccctgggggcgggcagcgccccctcacggtaaccggtcaccaccggcatggaacccctccaagcgggcctctctcacacaacaggggccccggcccacatttggacccccgcttctgggcggccccacaaggaaccctcccctctgcccttacaaataacggggcttttctacaccccgtaaatcgtacgcgcgcctggctgcaggtggcctcttccccgcttccacctggtttctatacactcggcggggcgcagcgagcgcccgcggcgccgtatcaactattcccgcacgccctcgggggctcacctccgctcataccagttacaatatccgcgacccgcccgtaaccaacccatcgcggccgcccacaacggcgccgtcctcatcgttgtcgcccgccccagagcctacttttttttaatcgtaccctcctcttccctatctctcacactcttatgttgttgagcgcgtattctcctcactcactacacacactccctccctactccccaaatattattagtgcgtcaccctctccctctagttatttacacacagagcctcatcccagcatgccgactctccgccccactcattagcctgcgcatttcccgcccccctcgctatcctctactcgtcttccagttgcgctcctcatccttttctcgcgacctttctctgccgcggcgatcctatgtcttttgtgcagtccccattg

SEQ ID NO: 15569 - DNA, 1118 bp, Homo Sapiens
gggacaagggcaaaaaaaagaaggaaggagatctgaaatctcggtcttccaaggaagaaaatcgagctgggaataaaagagaagacctgtgatggggcagcagtgacgcgctgtggggggacaggtggacgtggagagctctttgcccagctcctggggtgggagtggtctcaggcaactgcacaccggatgacattctagtgtcttctagaaagggtctgccacatgaccagtttgtggtcaaagaattactgcttaataggcttcaagtaagaagacagatgttttctaattaatactggacactgacaaattcatgtttactataaaatctccttacatggaaatgtgactgtgttgctttttcccatttacacttggtgagtcatcaactctactgagattccactcccctccaagcacctgctgtgattgggtggcctgctctgatcagatagcaaattctgatcagagaagactttaaaactcttgacttaattgagtaaactcttcatgccatatacatcattttcattatgttaaaggtaaaatatgctttgtgaactcagatgtctgtagccaggaagccagggtgtgtaaatccaaaatctatgcaggaaatgcggagaatagaaaatatgtcacttgaaatcctaagtagttttgaatttctttgacttgaatcttactcatcagtaagagaactcttggtgtctgtcaggttttatgtggtctgtaaagttaggggttctgttttgtttccttatttaggaaagagtactgctggtgtcgaggggttatatgttccatttaatgtgacagttttaaaggatttaagtagggaatcagagtcctttgcagagtgtgacagacgactcaataacctcatttgtttctaaacatttttctttgataaagtgcctaaatctgtgctttcgtatagagtaacatgatgtgctactgttgatgtctgattttgccgttcatgttagagcctactgtgaataagagttagaacatttatatacagatgtcatttctaagaactaaaattctttgggaaaaaccctcaattgtgattttaataaattaaaagtagcacattacatggttaaaaa

SEQ ID NO: 15570 - DNA, 1357 bp, Homo Sapiens
gggcagctggagggagagaaacactggcgcctctaccaccccactgtgcccctggcacgagagtacagcgtggaggccgaggaaaggatcggcaggccggtgcatgagtttatgctgaagccgggtgatttgttgtactttcccagaggaaccattcatcaagcggacactcctgcggggctggcccactcgactcacgtgaccatcagcacctaccagaacaattcatggggagatttccttttggataccatctcggggcttgtatttgatactgcaaaggaagacgtggagttacggaccggcataccccggcagctgctcctgcaggtggaatccacaactgttgctacaagacgattaagtggcttcctgaggacacttgcagaccggctggagggcaccaaagaactgcttttcctcagacatgaagaaggattttattatgcacagactccccccttactctgcgggagatggggcagagctgtcaacaccaggtggaaagttaccgaggctggacagtgtagtgagactgcagtttaaagaccacattgtcctcacagtactgccggatcaagatcaatctgatgaaactcaagaaaagatggtgtacatctatcattccttaaagaatagtagagagacacacatgatgggaaatgaggaggaaacagaggtttgtttcaactgaaaacaaatgcctatcctgtgacttgggtggtggttgggaagaattgattatttttgatttacaggtaatatgctttttatggctgcactgtggacttaaccattttgcactactcacagagctcctgcatggggatgattaagtcagacatttctgtgatacatgcacaccagttttaagacatactagctgggacctgtagccttataggaatggtataatgtaaaacatttcaaattactaatatcacttactacataaattaggatgccttttatatagaagttggcatcttttatgttatctaattgtagtgtgtctaaaatactcatgaggggtatcaaaaataatgatgtatggagaataaatttacaggaaaatgctacttcaatgacataagtagtatacatatattttgacaaataaatttatcctttcagtttcatggacttcgcttccctttgtcacatttggatgcactgaagcaaatttggaatagtccagctatttctgtcaaggacctgaaacttactacagatgaggaaaaggaaagcctggtattatccctctggacagaatgtttaattcaagtagtctagtgcctttgcagaatcaaatgcctactattttatatgcatatattaaaagaaaagcaaagacctg

SEQ ID NO: 15571 - DNA, 1042 bp, Homo Sapiens
agacgatagtaatatgaacagtggtaaaaaagcaggtggtaccggtccggaattccgggatatcgtcgaccacgcgttccgctgtccctggaccgatttgaaaaccaggtggatagtgaaagttgccgaggtactgtctgaatgccgcctgctcgcctacatatcccaggtgcccacgcagatgtccttcctcttccgcctcatcaacatcatccacgtgcagacgctgacccaggagaacgtcagctgcctcaacaccagcctggtgatcctgatgctggcccgacggaaagagcggctgcccctgtacctgcggctgctgcagcggatggagcacagcaagaagtaccccggcttcctgctcaacaacttccacaacctgctgcgcttctggcagcagcactacctgcacaaggacaaggacagcacctgcctagagaacagctcctgcatcagcttctcatactggaaggagacagtgtccatcctgttgaacccggaccggcagtcaccctctgctctcgtaagctacattgaggagccctacatggacatagacagggacttcactgaggagtgaccttgggccaggcctcagggaggctgctgggccagtgtgggtgagcgtgggtacggatgccacacgccctgccctgttaccgttcctccctgctgctctctgcctgccccaggtctttgggtacaggcttggtgggagggaagtctagaagccttggtcccctgggtctgagggcctacgtcatggagagcctcagcccccataatgagaccgggaccatgccaccttacttcagaactgggggccagggcaccaaagtagagccattagcatagcaggagaaccgcgacatgagcagcagccaaaggagaaaaggggaccgcccaaaggagaagcaggcgggcggccgaagggtgacggcagggggacaaaagggcgagcccgaaagcgcaagagcgacaggaaccggggcaaacacccaaggaagaggaagcgagcggagaagaacaaccacagagcaag

SEQ ID NO: 15572 - DNA, 642 bp, Homo Sapiens
cctcgagcctatgattcggcacgaggcttgtgggaggcagtcctagaagcccttggtccacctgagtctgaggcccctaggtcatggagagcctcagtccccataatgaggacagggtaccatgcccacctttcattcagaaccctgcggcccaggcccacccagaggtaagaggacatttagcattagctctgtgtgagctactgccggtttcttggctgtcagtcagtcccagagtggggaggaagatatgggtgacccccaccccccatctgtgagccaagcctcccttgtccctggcctttggacccaggcaaaggcttctgagccctgggcaggggtggtgggtaccagagaatgctgccttcccccaagcctgcccctctgcctcattttcctgtagctcctctggttctgtttgctcattggccgctgtgttcatccaagggggttctcccagaagtgaggggcctttccctccatcccttggggcacggggcagctgtgcctgccctgcctctgcctgaggcagccgctcctgcctgagcctggacatggggcccttccttgtgttgccaatttattaacagcaaataaaccaattaaatggagactattaaataactttattttaaaaatgaa

SEQ ID NO: 15573 - DNA, 442 bp, Homo Sapiens
cccttatcccacatactgaaaaatcaatggtttttgcaaacgagtcttgatgcgtatagctgactgcatgttcatgtggatggatgattaagcatcaattgcaggttaggttttcaactgctagaaatccaagcagcttggcaggtcttcagctaaaataaaacagccttgatttcagccctcatttcacctgcttttggttgtttcagtattggaggccattattgcaaacattcttggaattcttttctttccccagaaagtaatgtatttgtaggcatcacttttagcccttttcttttcacgtaggttaagtaattaaaaaattccttcttcacgcagttattgtgggagatattggcagctgttaaaatatcagatgtttttttctttcagatctttgtttttgcggacgcgtggggactagttctagatcgcgagc

SEQ ID NO: 15574 - DNA, 524 bp, Homo Sapiens
tcctacatagaagaggcagacaggaagctttgcagttataggctctaacctggacatgtcagaagccaactacaaactgatggaacttaatctggaaataagagagtctctacgcatggtgcaatcataccaacttctagcacaggccaaaccaatgggaaatatggtgagcactggattctgagacacttcaggcctttaggaaagaaactaaactgaagatgatgaagaatattaaccaagcaccttttatggacccttgcattcactgataactttctggcagcatctactttttagtgtaactaatgtcaaactgtatcatcaaaaacaaagatctgaaagaaaaaaacatctgatattttaacagctgccaatatctcccacaataactgcgtgaagaaggaattttttaattacttaacctacgtgaaaagaaaagggctaaaagtgatgcctacaaatacattactttctggggaaagaaaagaattccaagaatgtttgcatatgcctcttctatg

SEQ ID NO: 15575 - DNA, 955 bp, Homo Sapiens
agtactataacggtcgttatggtagcgacgcctgggtggcgaattcggcacgagggattcggggcgctgacatcgcccaggacaccactctgactttcctcgacagccactgtgaggtgaacagggactggctccagcctctgttgcacagggtcaaagaggactacacgcgggtggtgtgccctgtgatcgatatcattaacctggacaccttcacctacatcgagtctgcctcggagctcagaggggggtttgactggagcctccacttccagtgggagcagctctccccagagcagaaggctcggcgcctggaccccacggagcccatcaggactcctatcatagctggagggctcttcgtgatcgacaaagcttggtttgattacctggggaaatatgatatggacatggacatctggggtggggagagctgtgaaatctccttgcgagtgtggatgtgcgggggcagcctgagagatcgtgcccctgcagccgagtggggcacgtacttccggaagaagcacccctacgttttccctgatggaaatgccaacacgtatataaagaacaccaagacggaccaggctgaagtgtggatggatgaatacaagcaatactataacgctgcccggacattcgcctggagaggaccttcgggaatgtcgagagcacattggacctgaggaagaatcctgcgctgacagaggtcaagtggtaccggagactatctaccctgaactgcgaatcccaaggagtcaccccatcggaagggaatctccgccggcaacgaaaggctggaacctcagggggacagagcaagacacaagctaggtgaccgggcaggatcaaggagatggagccggattggggaacgaaacgcaaagacacagtaccagggaacaggagagcattgccacaggagaagtggacgggaccagcccggagaggcgcc

SEQ ID NO: 15576 - DNA, 1061 bp, Homo Sapiens
  misc_feature (64)..(108): n is a, c, g, or t
tcgccagtaactataacggtatttaggtagcgaggcctgggctggcgaacttcggcacgaggtnnnnnnnnnnnnnnnnnnnnnnnnnnnnnnnnnnnnnnnnnnnnntggggaacatctcggcagccaccgcgcttctcccgctggagcgggcgtccagcttggctgccctcggtccttccctgccacgtttcgggtcgccctgcaccccccacccaggctcgcttctcttcgaagcgggaagggcgccttgcaggatcctgccgcccctccaaccggatcctgggtctagagctccccagagcgaggcgctcgccaggactcctgccccgccaaccctgaccgccggggggtgcccccgggacgtagcgccgcggagaggaagcggcaaaggggaccatgcggcgcctgactcgtcggctggttctgccagtcttcggggtgctctggatcacggtgctgctgttcttctgggtaaccaagaggaagttggaggtgccgacgggacctgaagtgcagacccctaagccttcggacgctgactgggacgacctgtgggaccagtttgatgagcggcggtatctgaatgccaaaaagtggcgcgttggtgacgacccctataagctgtatgctttcaaccagcgggagagtgagcggatctccagccaatcgggccatcccggacactcgccatctgagatgcacactgctggtgtattgcacggaccttccacccactagcatcatcatcaccttccacaacgaggcccgctccacgctgctcaggaccatccgcgagtgtattaaaccgcacccctacgcatctgatccgggaaatcatattagtggatgacttcagcaatgaccctgatgactgtaaacagctcatcaaattgcccaaggtgaaatgcttgcgcaataatgaacggcaaggtctggtccggtcccggatacggggcgctgacatcgcccaggacaccactctgactttcctcgacagccactgtgaggtgaacagggactggctccaagcctctgttgcacagggtcaaagaggacta

SEQ ID NO: 15577 - DNA, 571 bp, Homo Sapiens
gctccaagcaaaatccacatgcaggaaatggaacttaaaagaactggcagcgatcatacaaatcccactagcccattacttgtgaaaccatctgaccttttagaagatgaattaaggccagaagttgatgaacatacacaaaagacgggagtcttagctgctgttcttgcattcacaaactatctattcccagatctgtagggaaagataagaaagctattcaggcatcaattagacgtaataaggaaaccaacaccgttttggccagattgaatagcgaattgcagcaacaattaaaggatgttcttgaggagagaatttccctggaagttcaactggaacaacttcgaccattctctcacctataagccaattgccgttaactgtgaacatacttgtttttaagtggttttgggttcaaagccaatttggagacctagacattcagctcactgcttaactcaacattaaattttatgattctgttttgccctatatgttcaccgttgtatttaagtatcttttattttttaatttcgacaataaaaaggtcaggatggcgttttctgga

SEQ ID NO: 15578 - DNA, 1572 bp, Homo Sapiens
cgcaatggaatatagacaggtttacaaaaagcggccggtaccggtccggaattccgggatatcgtcgaccacgcgtccgatcagctacaactgccattgaaattcgtaggcaatccagtagttatgatgatccctggaaaataacagatgaacaaagacagtattatgtaaatcagtttaaaaccattcagcctgatctaaacggatttattccaggatctgcagctaaagagttttttacaaaatcaaaacttcctattcttgaactttctcatatttgggaactctcagactttgataaagatggtgcattgacactggatgagttttgtgctgcttttcatctggtggttgctaggaagaatggctatgatttaccagaaaaacttcctgaaagcttaatgcccaaactgattgatttggaagattcagcagatgttggggatcagccaggtgaggtaggttattcaggctctcctgctgaagctcctccaagcaagtcaccatcgatgccatcactaaaccagacatggcctgagctgaatcagagcagtgagcagtgggagacatttagtgaacgctcttcaagctcacaaactctgacccaatttgattctaacattgcaccagctgatcctgatactgctattgttcatccagttcccattcgtatgactccaagcaaaatccacatgcaggaaatggaactttaaaagaactggcagcgatcatacaaatccccacttagcccattacttgtgaaaccatctgaccttttagaagaaaataagataaattcatcggtgaaattcgcttctggtaatactgtagcagatggttacagtagttcagactcttttacttctgacccagaacagatcgggagcaatgtaactcgtcaaaggtctcattcaggaacgtcgcctgataacactgcaccaccacctccccctccaaggccacagccctctcattctagatcatcatctttagatatgaatcggacctttacagtcaccacaggacaacaacaggctggagttgttgcccatcctcctgcagtgcctccaagaccacagccctcacaggctcctggtcctgctgtgcatcgcccagtggatgccgatggcctcataactcacactagtacctcacctcagcagataccagagcaaccaaattttgcagatttcagtcagattgaagtatttgctgcatcaaatgtaaacgacgaacaagatgatgaagccgagaaacatccagaagtcctgccggctgaaaaagcttctgatcctgcaagttctcttcgagttgccaaaacagatagtaaaactgaagaaaagacagctgctagtgctcctgccaatgtgagcaaaggcacaacaccacttgctccaccacctaaacctgttcgaagaagattaaaatcagaagatgaattaaggccagaagttgatgaacatacacaaaagacgggtgtcttagctgctgttcttgcatcacaaccttctattcccagatctgtggggaaagataagaaagctattcaggcatcaattagacgtaataagg

SEQ ID NO: 15579 - DNA, 413 bp, Homo Sapiens
catatacaactgatacacataacctgaaggtaattttattaaaaatatttttgtgggccaggagcagtggttcatgcctgtaatcccagcactttgggccagtttgattatttttaattgtcgtgctttttcttcctagtaattaaatgtgtctaggaatagctttgattacctgggaatagaaggttgtgatgcaagaacagcagctaagacacccgtcttttgtgtatgttcatcaacttctggccttaattcatcttctgattttaatcttcttcgaacacggtttaggtggtggagcaagtggtgttctgaacgtgctactatatatgtttcacaactgttgttttagcttatgcctatttcttctgcctagaggacgagttattatccgccgtcacctctgatcaggc

SEQ ID NO: 15580 - DNA, 304 bp, Homo Sapiens
agataccatcggcgtcatctgcggggtgatgggaggctccaggccgggcagatcagcgaaagctgagggcagccagggccggcccaggcaaacgcaggattgtctccaaggggaaacccaccagctgtcttttcttcagttttactatctgttttggcaactcgaagagaacttgcaggatcagaagctttttcagccggcaggacttctggatgtttctcggcttcatcatcttgttcgtcgtgtacatttgatgcagcaaatacttcagcctggctcttatctgcaaaatgcggccgctccg

SEQ ID NO: 15581 - DNA, 1110 bp, Homo Sapiens
  misc_feature (247)..(484): n is a, c, g, or t
  misc_feature (506)..(530): n is a, c, g, or t
ggcggtgtgcactgagttgatctgacctaatttcaggtggtcatatgtttatgtgcatgctctggaggatggggcactgcacgtataggtttatgtgggttgctaattaatatcaaactatggttatggtgtggggataatttacaaagggccgaatggtgcgataagggctaaagcccccccaatttatttcatgtcgtcaggaagcttactttaaaagaatagcttggcctggctggtggttcannnnnnnnnnnnnnnnnnnnnnnnnnnnnnnnnnnnnnnnnnnnnnnnnnnnnnnnnnnnnnnnnnnnnnnnnnnnnnnnnnnnnnnnnnnnnnnnnnnnnnnnnnnnnnnnnnnnnnnnnnnnnnnnnnnnnnnnnnnnnnnnnnnnnnnnnnnnnnnnnnnnnnnnnnnnnnnnnnnnnnnnnnnnnnnnnnnnnnnnnnnnnnnnnnnnnnnnnnnnnnnnnnnnnnnnnnnnnngagagagtgagattctgtctcnnnnnnnnnnnnnnnnnnnnnnnnntcttaaacactgataaggctgacactctagatgcatcttctaggaaggcctctgtggaagggacaagggacctgggaccggactggcaccttctgagccctgaggctgagcgtcctgcacagaaggcccagcaaaggcaaagaccaggaggcagcagcaccctgtgccttccagaagtgcaggggacaacgcgtgggatgccagatggaagtgggagaggatggaagtgcaaagaccagaaaggtcaccccccactcctaaaactccacagacacaacagtctgaatgtgtgatcttcaggcaattctaactttgtcccacccaaaccagtcccggaacaaaacacacaatgccttgagacagaaaagaccaaaaactcctggaatgactacctgcataaatgatccttccatgactgaaatactatggagaagggtttgctggaaagaggctgaaatggttactgaggtcttaaaacaataatagaacaggacacaagaagaaaaccttaatgcgtcagccattctaggtcctgttgccacagtgtttaagaattgacatttctgagatgagtcagatg

SEQ ID NO: 15582 - DNA, 649 bp, Homo Sapiens
gctattcttttaaagtaagcttcctgacgacatgaaataattgggggttttgttgtttagttacattaggctttgctatatccccaggccaaatagcatgtgacacaggacagccatagtatagtgtgtcactcgtggttggtgtcctttcatgcttctgccctgtcaaaggtccctatttgaaatgtgttataatacaaacaaggaagcacattgtgtacaaaatacttatgtatttatgaatccatgaccaaattaaatatgaaaccttatataaaaagaggtgtggtttttgtctcccgccccccaacctcccctcctcctgtgaatcagctctgagtgacaggaaaccagggctgtgctcctgctgggactccttccttcctccctcccctctgttttcaggcttggcctcctggggggggtttcctgaatccgactccccagagtttaaagagctaggttcctggggactgggattcatacctccttcccctctctctcctgcctgctcctccctctggggacagggacaccaatgttggcctggctcacccacagcctcccaggagagttctctgggctgccgggttgcatctggttccgacagctctcggggaatgggcggtgggtccctgaagttgggggg

SEQ ID NO: 15583 - DNA, 1755 bp, Homo Sapiens
  misc_feature (177)..(181): n is a, c, g, or t
  misc_feature (183)..(183): n is a, c, g, or t
  misc_feature (185)..(187): n is a, c, g, or t
  misc_feature (189)..(245): n is a, c, g, or t
  misc_feature (248)..(248): n is a, c, g, or t
  misc_feature (250)..(250): n is a, c, g, or t
  misc_feature (252)..(255): n is a, c, g, or t
  misc_feature (258)..(279): n is a, c, g, or t
aaattcccaaacccctctagtttccttggccccggggattttcccttatggggaagccacgcttattggccccaaggttccccctttcccttactggggggcccggcgggcgcccaaaaagaaatggtttttagaaaagctttttttgaggggcccgagggcgggcccaacaaaagnnnnntntnnntnnnnnnnnnnnnnnnnnnnnnnnnnnnnnnnnnnnnnnnnnnnnnnnnnnnnnnnnnggngngnnnnggnnnnnnnnnnnnnnnnnnnnnngaaggttaatgctttaatgtattgacattttcacttacaaatgtacaatttgcgtatgtaggaaaaaatcagttctctagacacaacagaatactactagagacgggaaagcaatcacaaaaagatcaactctggggagaaagtggaactgcattccatgccttgtatctacatacactagggaaggaaaaagaaatattacacaggatcaaaacttgtggaaaatacacttgggtcattttgtctcaactgcaggaccttcttatgatccagatggctaccttaagtcctggatagcctaaaatgggcaaagtctggccttgttcacaaatgatgatccaaaacattaaccacagttctccttctctttagtatccaagaccctgaagttgactcaaggaatgaaaagaacaatcagatcagcatgtatataatatcatcggccaacttcttcaagggtatggattatttaaaagtacacatggaagtaaaatgcttactcaaacctgaataagaagtttcttgtaactcaagcacttcttgactcacactaagtgtagcactgtaaacaaaagacatcgttgagaaactgaggctatcaaaacattggcatctatgggagttgtggccaaggaaataaaatacctgagcaaccttatacccagtatgcatttcataccaggatcaagtcactaatgacagccaagttccaggcttatctatggctgcctaatgagactggccccactaggatggggactggggaggggacacacatgagtgcccaagcttcagtctacacctccccccttcagccagaagcagccaggggagcacagggacatctgcttcaagagcattttggcagcaaaaatcaatactctgtggttcctggaattcccacccagtaattccaagttcaaaagtaccaccagtgcaacatgaaaaactgttaatagtttttaagtaaagtgtacatacagctttaataacgattataatctgaagaaagccattcttctgatacaggatggaaaatcctcaaagcaacattttaaaccatggacactagagtagtcaaacatctattcagaagatgagagataaacagacatccttccatgtggaaacagacactcccatgtcaacaagtcccctaggatcagagagacaagcagacccgtggtcatcactaggtgtctctggtgtctcgctaaagatggagtcctatgtaggttgacctaagttggcctcagagggaggtggctgagcagcaaagcaagacagcatgtgtgtaaccagccaggcaaaataacaagtctgtgctacctggagtgtattttcaggaaaacaggaccatatggagtgtggggcagggacattcgctgtgctaaactgccactgtaaaagcacactgttgaaagcatgcaggacagaaaactgcaataacagtcagcttgttgtcaagaaatggcc

SEQ ID NO: 15584 - DNA, 342 bp, Homo Sapiens
cgcattcaggcgcacttctcgaaccactcagggtcctgtggacagctcacctagtggcaatggctccaggctcccggacgtccctgctcctggcttttgccctgctctgcctgccctggcttcaagaggctggtgccgtccaaaccgttccgttatccaggctttttgaccacgctatgctccaagcccatcgcgcgcaccagctggccattgacacctaccaggagtttgaagaaacctatatcccaaaggaccagaagtattcattcctgcatgactcccagacctccttctgcttctcagaagcagaagtgcgcctgggtgcagaagtgcgcctgggtg

SEQ ID NO: 15585 - DNA, 893 bp, Homo Sapiens
gggacgtcacgtgagagtgggcggagggggtggaggtttgtctccgctgtttcatctctatggctgtcagaggtgggcggctttgaccgagaggctgctggagctcgtgtttggacgcgatgtttcgtctgaactcactttctgctttggcagaactggctgtgggttctcgatggtaccatggaggatcacagcccatccagatccggcgaagactaatgatggtggctttcctgggagcatctgcagtaactgcaagtactggtcttttgtggaagagggcccatgcagaatctccaccatgtgtagacaacctaaaaagtgacatcggtgataaagggaagaataaagatgaaggggatgtttgtaaccatgagaaaaagactgcagatcttgcccctcacccagaagagaacaagaagaaacgttctggattcagagacagaaaagtgatggaatatgagaataggattcgagcctactccacgccagacaaaatcttccgatattttgccaccttgaaagtcatcagtgagcctggtgaagcagaagtgtttatgacaccagaagattttgtgcgatccataacacccaatgaaaaacaaccagaacacttggggtctggatcaatatataataaaacgctttgatggaaagaaaatttcccaggaaacgagaaaaatttgctgatgaaggcagtattttacaccctttggagaatgtgggctcatatccttttcagactacattttcctcacaactggttcttttcccctcctcagagaaaattttgaaattgcccttcaagaagttttggatttggattgggagatgggagaaaatacatatggggaacaatttgtgaaacagggtccagaagccatcacttccga

SEQ ID NO: 15586 - DNA, 921 bp, Homo Sapiens
cattccttattgctcagttcccaatgcattcacagtcaaagagtcaaaccccacttcacacacgtgttctgagagctcccactttaccaactgtcctggccacctgctgccatgctcacttgatcaagagatgctccagccatatggtaaaactcaatgcagttgtccacatcattaatgttctttaggaaagtaaagaagttctccacctcctgaaatgtcagaccctttccttctttgaagtgcttcttgagctgcctctgcatggcggtcagcttcttggactgcaccccactgtaggcaagtagcatgccaccaaactgcctctcagtaattctcccatccacagggtcatggcgttcaaactcaagcttcagaacatcatgctgcagtttacgctgaaattcgaggaagttctttgattgtcagctttcccttcagatcagctccaaaaaagtaggttgtgagggctgaacacaagccagacttgagggtgttgccagtagttggacgatctctgtggcgcatacccatactggtttgggagcgaatgatgctctgaacctgttcaaattcttccatatctacttctccatctccattcaaatcaaacatcttgaaggcaatttcaaaatttctctgaggagtggaaagaacagttgtgaggaaaatgtagtctgaaaaggatatgagcccacattctccaacgggtgtaaaatatactgccttcatcagcaaatttttctcgttcctgggaaattttctttaggagtgtccttgaagatctccttggcccgtctgtaagtatatattcttttcatggttttctccaaatatttagttgcttttccaaattaaagtcattgattagctcagaaaagcaaaataataaagtctttctaggtgtcccatttgtttccc

SEQ ID NO: 15587 - DNA, 1065 bp, Homo Sapiens
  misc_feature (116)..(136): n is a, c, g, or t
cacagttttggaaaaaggtctgtggtagtctggagttgatgaggaaggggtacaagatgtggttagaaacatttctttgttctggaaacaaagtactgttgaaaccagcttggaannnnnnnnnnnnnnnnnnnnnaagttcagttctcccttagtggctgcctttcaaacaagttaccttttatctgatgccttgtatcttcccttggttaagcgtgtaactgtgatgtagggctcaagggttttggtgacaacgaggcacactccacacagagaggactatgagtgagaatatggccatcacctgaaaagtttgcttatcttctgtgctttgggtccctggaaacaaatccgcctatgtatgaagctagttgatttccagttgcactatttccagctgcctctgaagttcacaggcaatacattgtctagtcctttgcgaatttctctgatttgtgggcacagtttatgaagtttccccacatgtgaagacaggtacaaaatagcagagccaagcagacagtgggtctattcttcattagctcagtgacttgtccacactcgtcttagcacttacgtttcaaaagcttgtcacaaacccttggagtcattcccagataatagaactggaaatgataaatcccctaatgccaagggtctagtgtgttcttagtggttatactgggaagtgtgtggagatttaggtgctgctctgctgctctggatggctgaaggctcctgggccatcttcatgtgctgcttgaagagctcctattttgtactcctggctagaatgctgtggaacaaatacaaagtgaaaaaagttctctgtagatttctgaagtgcatattcattgatgcccagacaaagaaaaaggtgccttttttgaacttgtaacccatgttatcgcgcacccctccaaggttttggggggccgccttccgccctcgaaaaattttttctaaaaccctttcgttttgggcgcggcgggcctcaattagggcataaggaaaaatggggcccttaagctgtgtattcccagaagagaaacctcggcgccttgg

SEQ ID NO: 15588 - DNA, 976 bp, Homo Sapiens
  misc_feature (343)..(343): n is a, c, g, or t
  misc_feature (769)..(816): n is a, c, g, or t
  misc_feature (823)..(832): n is a, c, g, or t
  misc_feature (966)..(966): n is a, c, g, or t
gcctctaacagaagcatcaagccactgacttttattcccatgagctcctactatgatgacataacatgtcacatttattgctcttacctacttcctaagttactgcttgcctaataaggaaaagggcaagaaataagagtccaaaagacactcagaacaccagcagcagctttcaagtaaggactcagggtcagggtctcacaactcctccatttcatgtttcatttacattgtcttcgtgctccagcagcaaggctgacatgtgctttggggtaggagcctggagtatttctgccagatggtctgaggtgacgtatactcctagagcccaagtgaccaccanaaagggacttggtaaacagcagggcgaaggccatacatgaggatcacactccctcagacgtcatcagccccatgctttatcctttgactccccctgatcctcaaggccaggtggggtgcccctgctgcatgctccagagaactgtgggcctctcctaccatggctctcaatgcactgttccataactggcttctcccctggacagagccaccctggtctccttgtaagctttagttgggcttgtccctgagtgtgtggggtaggaataggagtgtgttcttgtgtatgttgcaatctttaggctcaggagacaaggagttagacctgagtcctgacatgtgcactcatttgtactcaccattacattctatttaattgctttgagccagacaggctgttttctttaccatgaaatatactaatcannnnnnnnnnnnnnnnnnnnnnnnnnnnnnnnnnnnnnnnnnnnnnnnggcaacnnnnnnnnnnctgggcatcaatgaatatgcacttcagaaatctacagagaacttttttcacttggtatttgttccacagcattctagccaggagtacaaaataggagctcttcaagcagcacatgaagatggcccaggagcatncagccgggag

SEQ ID NO: 15589 - DNA, 541 bp, Homo Sapiens
  misc_feature (49)..(184): n is a, c, g, or t
  misc_feature (207)..(223): n is a, c, g, or t
ggctcaaatgagccaaaggttataaacttgccttaaaactatagtcctnnnnnnnnnnnnnnnnnnnnnnnnnnnnnnnnnnnnnnnnnnnnnnnnnnnnnnnnnnnnnnnnnnnnnnnnnnnnnnnnnnnnnnnnnnnnnnnnnnnnnnnnnnnnnnnnnnnnnnnnnnnnnnnnnnnnnnnngacagagcaagactcttgtctcnnnnnnnnnnnnnnnnncatatatactgctgtatcatgccaggatttatcagcattcccaagggagcttgcacggtactgaccgagtgctgagactactggtattcccagctgccatgtggcagcagcaggagctactagaatattctcagcacaggaatgaggcttccttggtttccatgtctgtaagggttactgatcacttaccttcttctctttcagacttgaatctgtagacatttctttattgatatggcaaattgcttgcagatatttttaaatgacagcaattttctaatatttggtttaataaaatgtgaataatgtccctttaaa

SEQ ID NO: 15590 - DNA, 660 bp, Homo Sapiens
ggttatttcatggaaactccgggaagccttttcatagctgaggggttaagtgaagttttaggaaaatcactctagttttagggtggaagatgaggactgggagagggttcagaccaggaactgctaaaaagctcttgcaggcttctggagggagctgtgatgtggacacgctgaaatcggtggggaggaagcggaagattcaagggacctcaagagacagaagagtcaggactggatgactcccattcattcacaaacgtttactgtgtgcctactatgtgtcaggattcctgtgctgtacgagggagaaggttcccaggctgcggatgatgtattcaggatgctgagggcttacctgtgggggtatcactttgaaggaactggattaaagtagtgtaagtgatggtggggtgagggtgcggaggtctgatgagagggcagcagcagacttgtttagggcctgtttgaaactagcctaggagaggaaaccttcaaagcacggtaggcgtgatgggtcggggaaagctggggcagggagagggccctaagaagcaggcagtaaggggaccagccacgctgatctaggtagattaggcgagactgggcagctgcggcgacctggaggctgtcacgccggtcctggccctgggcagccgggga

SEQ ID NO: 15591 - DNA, 1241 bp, Homo Sapiens
  misc_feature (251)..(251): n is a, c, g, or t
  misc_feature (333)..(333): n is a, c, g, or t
aaccgggttctcatcccagatgggggctaaacataaagggttagtccaaactttaatcccactgtttcaaaataatttccccaaaaagatctacttttggggccagaggaaaaacccaaattttggagtgaaaaatattgggttactactgtttacccgagtacttttcccaccctattcccatttttcctcaaaattttctattttaacatacacatgaccagaaattatatatttttcagataatacanaatgagttatttggggcaaaaagaagttttttaacaacaaatattcccaagttaattcagtttcaaagaaaaaccttcattnttagcctccatctatttccaattaattaaagagacactagcattcctatcttaacactaaatacacaaatgacaagccctagctgagacagtatcttattttggttaagtttcaacaattaaaatacaggttactctcagagatgattaactattaaaattacttttacaaatgtgacaccaatttttttccttagcggaagggaaataggaaggaagaggcaaatggagaagaggcacaagatggtggatcagggctacataaagctgtgcatttagtacatgattttggtcactttttcacaacacggtggttattttcttgtatatcttactaatcctataataaaagacagtgctaaacctacaaattcaataaaacattcatctttaagtttcataaatatatgcaattctaatcataaagtctctacaatacatttgcacgttttcatagactaacataatacacaaacttatggaagtctcctgttattgtgttatttttgtctacatctgacattatcttcataaatattcaatgaagccacaaaggtactgtaacttttggaatctatccaagttttaaagaaaaaatgatcagcagcaattccataaaacagaagggtgtcaatcccttactttcttttgctttttgtgtcagttgtttgaaaaacactagaagctgacatgagattttctatatattgtccaagaacttggttttctgattttagcttcagattttcttccttaactgcatctactcttgcagagagatcatccatgtcagcattcatcatcttgggtaacaaacttttgggccttggatacaaaattcttgaggaatggtcttccgcttgaggcgccgggagaaggagggatccggccgacacctcaggccgggac

SEQ ID NO: 15592 - DNA, 853 bp, Homo Sapiens
  misc_feature (806)..(806): n is a, c, g, or t
gggactgtgcctcttgtttccgagggaagaaggactgattaagtcatctaaatggatgcaatactgaattacaggtcagaagatactgaagattactacacattactgggatgtgatgaactatcttcggttgaacaaatcctggcagaatttaaagtcagagctctggaatgtcacccagacaagcatcctgaaaaccccaaagctgacccaggagttaaatcagaatgtctcgcaagacttccagcatcatttgctcctataagcttacaaaatgagatctctcttcccagaactgtggagacttttcagaaactgcagaaggcaaaggagattctgaccaatgaagagagtcgagcccgctatgaccactggcgaaggagccagatgtcgatgccattccagcagtgggaagctttgaatgactcagtgaagacgtcaatgcactgggttgtcagaggtaaaaaagacctgatgctggaagaatctgacaagactcataccaccaagatggaaaatgaggaatgtaatgagcaaagagaaagaaagaaagaggagctggcttcaaccgcagagaaaacggagcagaaagaacccaagcccctagagaagtcagtctccccgcaaaattcagattcttcaggttttgcagatgtgaatggttggcaccttcgtttccgctggtccaaggatgctccctcagaactcctgaggaagttcagaaactatgaaatatgaaatatctctgcttcaaaaaatgaggaagagcaagacttgtcccctatgctgccaacatgcagtctttntttatgtcttaaaaatgtcatgtttatgtcatgtctgtgaattgctt

SEQ ID NO: 15593 - DNA, 687 bp, Homo Sapiens
taaagagtttcttcctgttaattcgaagctcactgtgcctcttgtttccgagggaagaaggactgattaagtcatctaaatggatgcaatactgaattacaggtcagaagatactgaagattactacacattactgggatgtgatgaactatcttcggttgaacaaatcctggcagaatttaaagtcagagctctggaatgtcacccagacaagcatcctgaaaaccccaaagctgtggagactttttcagaaactgccagaaggcaaaggagattctgaccaatgaagagagtcgagcccgctatgaccactggcgaaggagccagatgtcgatgccattccagcagtgggaagctttgaatgactcagtgaagacggtgggtttctcgctgggtgcgacgtgaatttgtgaagctcaggatgcccatggattagactcatgtagtagcttaaagagtcattaggcgataggagggagaaaaccaagaagttagcagagtctggatataattcagtgtccgtaaatcccatgaagagaagctcatcagaataaaggcaatgaatttgtgccagaagagcctgtgactacatttctttcaatctctttggctgtttgtttcagtatacacactccctgtaaatgcttactattttatgagctctaataaatgtacttctcaagttgc

SEQ ID NO: 15594 - DNA, 850 bp, Homo Sapiens
  misc_feature (781)..(782): n is a, c, g, or t
  misc_feature (784)..(786): n is a, c, g, or t
  misc_feature (788)..(791): n is a, c, g, or t
  misc_feature (794)..(796): n is a, c, g, or t
  misc_feature (798)..(807): n is a, c, g, or t
gggaatctatcagggaacggcggtggccggccgcggcgtgttcggtggcggctctggccgctcaggcgcctgcggctgggtgagcgcacgcgaggcggcgaggcggcagcgtgtttctaggtcgtggcgtcgggcttccggagctttggcggcagctaggggaggatggcggagtcttcggataagctctatcgagtcgagtacgccaagagcgggcgcgcctcttgcaagaaatgcagcgagagcatccccaaggactcgctccggatggccatcatggtgcagtcgcccatgtttgatggaaaagtcccacactggtaccacttctcctgcttctggaaggtgggccactccatccggcaccctgacgttgaggtggatgggttctctgagcttcggtgggatgaccagcagaaagtcaagaagacagcggaagctggaggagtgacaggcaaaggccaggatggaattggtagcaaggcagagaagactctgggtgactttgcagcagagtatgccaagtccaacagaagtacgtgcaaggggtgtatggagaagatagaaaagggccaggtgcgcctgtccaagaagatggtggacccggagaagccacagctaggcatgattgaccgctggtaccatccaggctgctttgtcaagaacagggaggagctgggtttccggcccgagtacagtgcgagtcagctcaagggcttcagcctccttgctacagaggataaagaagcccttgaagagcccctcccacgagttcagagtgaannannncnnnnccnnncnnnnnnnnnncctgtccgcccgcctccggccccccaaaaacttttctagaacc

SEQ ID NO: 15595 - DNA, 570 bp, Homo Sapiens
gtttctaggtcgtgcctccgccctctccagtcttgtctgccgctaggtcagcacggcggagtctccggatagcctctatcgagtcgagcacgccaagagcgcgtgcgcctcttgcaagaaatgcagcgagagcatccccaaggactcgctccggatggccatcatggtgcagtcgcacatgtttgatggaaaagtcccacactggtaccacttctcctgcttttggaaggtgggccactccatccggcaccctgacgttgaggtggatgggttctctgagcttcggtgggatgaccagcagaaagtcaagaagacagcggaagctggaggagtgacaggtgtgtacatactggggcagcatgggcattcagcccccaccctgaagctcccaggagggcctcgtctcagagagcaaagcagacctcccccagcttgccctctcccacatgtgcagatcaagcgtatggtgcccatgttatttcagcaacacctcctggactcagcatcatctgttgcatgatatttggtattttgtttttccagatgcttggaatgtagcctttaaagtta

SEQ ID NO: 15596 - DNA, 831 bp, Homo Sapiens
  misc_feature (730)..(730): n is a, c, g, or t
gggctcacactttcaggctctgatcgcggccgcagtttttccttttttcttctgccgtcgccttctctgccttttctcatcctttctcgctctgctgctctgcagtgtgacgagtccgaatcctcttcccacccagcccgcgcctttcttcttttgcctgcgctgttctatttctccttcggccgccgccgccactgctgcacacagctggtgttggtgccgcgcttttacccccaagtcgttcccgcagcctatggcccaggccgccttgggtatttctgctcaaggtaaccacatccctctttaaaaattccgccgaaaaagagaagacgctttacccgactctttgggccgttatctcacggcgaactttctgaccaagtatacaactacccagagggcctaggagaagtgctgtatagagagcagttcgacttcaacgctgagccaccttgggaacctagctgatgataggggggttccatctcccaacttgtccatggaggtcttcacttcagaaatccaagactcatattcatccagcttggtgtcaagggggctgttgctgccagaattatcttgtgattatttgagagatgtatcagtttcttctgaagtacaatcaactgtagaagcctttgtagcagtttgttgcatattctaaggacccagacatagggcttggtgggcccgtctcttgtctttcctggtttatgactttcggctttgngggatacggctgagatgaaaagatttattgatgatggcaactactcccttggccctgtttggatgaaggaaacaaaccttgggaaatgttattgaataact

SEQ ID NO: 15597 - DNA, 961 bp, Homo Sapiens
tggttcatggaaagaatctgctcccatgttatcaaagataagccaatctcccacattcagctcaggaagaagacagctttccacaatttgatcaagctcatcacaggatggaccccaaaggctgcttgtaaacagaggctcatcttccttgtatttcttgtgaacctctggaatggtatttaagtcctcagacagtttacttgcaaaagaaccataaacaccatcattcatataatacatgaaggctggttcatcacttccggttttttctactccagagggaaatttatcattttcaacaactttctttgctatgatattaactgcgagtgtaaatgcagaagacacatagtagcttccgggttctgaaattatcttaacaccagatccttcaggaaagtagatatccaacagagggctgataacatgattaacctcttccaattgaaattcagttcccgtgaatcctccaccaatgtctaacatgttcatcgtaaagccaatttctccagccatgtcaaacacacatcgagcatcagatagagcatgtacatatacttgagattctttgcaagcactcgaaacatgaaatttaaccccaattatttggacatcaagttccttagcacattccaagagatgcctacagttcttcagggtagtgccaaacttcatgttaccctcttcacctccaatattatcttctgttgcaatatgtagtaagaccttgagcagaaatacccaaggcggcctgggccataggctgcgggaacgacttgggggtaaaagcgcggcaccgacaccagctgtgtgcagcagtggcggcggcggccgaaggagaaatagaacagcgcaggcaaaagaagaaaggcgcgggctgggtgggaagaggattcggactcgtcacactgcagagcagcagagcgagaaaggatgagaagaggcagagaaggcgacggca

SEQ ID NO: 15598 - DNA, 814 bp, Homo Sapiens
gggggctgctgggctaacgggctccgatccagcgagcgctgcgtcctcgagtccctgcgcccgtgcgtccgtctgcgacccgaggcctccgctgcgcgtggattctgctgcgaaccggagaccatggccaaaccagcacagggtgccaagtaccggggctccatccatgacttcccaggctttgaccccaaccaggatgccgaggctctgtacactgccatgaagggctttggcagtgacaaggaggccatactggacataatcacctcacggagcaacaggcagaggcaggaggtctgccagagctacaagtccctctacggcaaggacctcattgctgatttaaagtatgaattgacgggcaagtttgaacggttgattgtgggcctgatgaggccacctgcctattgtgatgccaaagaaattaaagatgccatctcgggcattggcactgatgagaagtgcctcattgagatcttggcttcccggaccaatgagcagatgcaccagctggtggcagcatacaaagatgcctacgagcgggacctggaggctgacatcatcggcgacacctctggccacttccagaagatgcttgtggtcctgctccagggaaccagggaggaggatgacgtaatgagcgaggacctggtacaacagggatgtccaggacctatacgaggcaggggaactgaaatggggaacagatgaaaccccagttcatttacatcttgggaaatcgcagcaagcagcatccttcgggttggtgttccatgagtatctgaagaccacaggaaagttccgttgaagccgt

SEQ ID NO: 15599 - DNA, 553 bp, Homo Sapiens
acgggctccgatccagcgagcgctgcgtcctcgagtccctgcgcccgtgcgtccgtctgcgacccgaggcctccgctgcgcggattttctggggaggcccagtggaatcaccagcctcaccccacccagcctctccgatatacttcctgggtggcgacaaagcacaggatgtggtctctaccgtgattcctgagcatgcatgcaccccttctcctgccaatagaggggaggaagtcggaggggtgtctttatgcctataaacttgccttggaatccagcctcactccctttcctcctggagttgagaagcccccacagagactggctatgggggagtgactgtctataggttccttggatgtcctgcctatctgcaaaatgagaatgagatcgataccttcatgaggctgtaagatggcagatataaaagtgctgtgttatctcaaaagggtgtggtgcttgagaaggcaggcgacctgagcctcaagttcctcttctgaaaaatccatgtcctggtggtccttaaataatagcaataaaatggtaaccacta

SEQ ID NO: 15600 - DNA, 1135 bp, Homo Sapiens
  misc_feature (363)..(403): n is a, c, g, or t
ggggcttctggaaggcgctgctcttccggttctctgtcccggttcctggggttgcacagacagaccctgtaaacatgtcagggttcagtccggaactcatcgactacttggaagggaaaatctcctttgaggagttcgaacggcggagagaagagagaaaaacccgcgagaagaaaagtcttcaggaaaaaggcaagttatcagctgaagaaaatcccgatgactctgaagttccatcatcatcaggaattaactctaccaaatcccaagacaaagatgtcaatgaaggagaaacatcagatggagtgaggaagtcagttcacaaggtctttgcttccatgcttggagagaatgaagatgatnnnnnnnnnnnnnnnnnnnnnnnnnnnnnnnnnnnnnnnnnagaaacacctgagcaacccactgcgggcgatgtatttgtattggagatggttctcaatcgtgaaaccaagaaaatgaggaaagagaaaaggcctcggagtaaactctcccagagctctgagaggtctcatgggtgaagccaacattcgttttgctcgaggagaacgtgaagaggcgatattgatgtgcatggaaatcataagacaagctcctctggcttatgagccattctctactctagccatgatatatgaggaccaaggtgacatggaaaaatcattgcagtttgagttgattgctgcgcatttaaatcccagtgacacagaagaatgggttagactggcagaaatgtctctggaacaagacaatattaagcaggctattttttgctatacaaaagctcttaaatatgaacctactaatgtccgtgatctgtgggagcgatcaagcctttatgaacagatgggtgatcataaaatggccactggatggttataggcgtattttaaaccttttgtctccatctgatggcgaacgttttatgcagctggctagagatatggcaaagagttactatgaagccaatgatgttacttctgctattaacataattgatgaagctttctcaaaacaccagggcctagtctccatggaagatgttaacatagcagctgaactatatatttctaacaaacagtatgaacaaagctttggagataattacagatttttc

SEQ ID NO: 15601 - DNA, 953 bp, Homo Sapiens
  misc_feature (528)..(556): n is a, c, g, or t
acaaataaatcattatttattctaaacctagaaaagctaggaaatgaatctaacaaattattaaacctaaaaataatttatcaacataattggatccagataaaatttgtttaaatcaataattaaagtttatactagcagtgaccaatagaaattgaagtatggctttcaaatgcagccagttttcctccatccaagagcctgaggtttttcaggattcacttgtactgagcacccacaccagactggtggcagtgagttaatatagttaggaaatggtgcacattcccacactctggaggcttagtatggtaggggatgagcaggcaagaaccagaaggtaaaacttgcagtttccaaaaggcaggatggttcttctgcagacatgactggcaatgtccaactcagggcggggaaccagaaatgtccaactcatgtgctcatatagtgtggggctcttccctgaaatctgggggctcccaaaataagacagttaaagaggaaaaagtcctatctgcatatcttttnnnnnnnnnnnnnnnnnnnnnnnnnnnnncaagctgaaaacatttaaaatacatattcacaaatggtaaaattccagccgtgtcatgagctccggtttgttgttttgttgttgttattgagacagagtctcgcagtgcttttaaaaactattaacatcctacatttcttaaaattaggattttaataaaatccagggtattggattcttttgaaagttctgtatttggccacagtgggtgccccattcccacatgacacatcagtccatgcagagaaagtgccctttagaaaggcctagcatcgcctcactttcttctcgcgggtttttctctcttctctccgccgttcgaactcctcaaaggagattttcccttccaagtagtcgatgagttccggactgaaccctgacatgtttacagaaaagg

SEQ ID NO: 15602 - DNA, 906 bp, Homo Sapiens
  misc_feature (727)..(727): n is a, c, g, or t
ttttagcacacatctacccaaccctgtgcatgactgatgtggggaaaagaaaagtaaaaactttcccaactcactttgtgttatgtggaggaaatgtgtattaccaatggggttgttagcttttaaatcaaaatactgattacagatgtacaatttagcttaatcagaaagcctctccagagaagtttggtttctttgctgcaagaggaatgaggctctgtaaccttatctaagaacttggaagccgtcagccaagtcgccacatttctctgcaaaatgtcatagcttatataaatgtacagtattcaattgtaatgcatgccttcggttgtaagtagccagatccctctccagtgacattggaacatgctactttttaattggccctgtacagtttgcttatttataaattcattaaaaacactacaggtgttgaatggttaaaatgtaggcctccagttcattttcagttattttctgagtgtgcagacagctatttcgcactgtattaaatgtaacttatttaatgaaatcagaagcagtagacagatgttggtgcaatacaaatattgtgatgcatttatcttaataaaatgctaaatgtcaatttatcactgcgcatgtttgactttagactgtaaatagagatcagtttgtttctttctgtgctggtaacaatgagcgtcgcacagacatggtttcaggtaaataaatctattctatgtancgcagccccttttccctttttaaaaaaccttgtcggccgcccttcgcccctttaaaaagactttcataaaaccaattccttttgcgccgcgccggggcccccagtttgtgtttaactgtgaacacatgggcccacaaaaatctggttttctcctcaagcgaagaattaccctggcgact

SEQ ID NO: 15603 - DNA, 665 bp, Homo Sapiens
agaaagtcaatgtcggtttactgtacaccaaataaaccaagcaggacatcaatgagcaagatgtttgtgaagggtgctcctgaaggtgtcattgacaggtgcacccacattcgagttggaagtactaaggttcctatgacctctggagtcaaacagaagatcatgtctgtcattcgagagtggggtagtggcagcgacacactgcgatgcctggccctggcactcatgacaacccactgagaagagaagaaatgcaccttgaggactctgccaactttattaaatatgagaccaatctgaccttccgttggctgcgtgggcatgctggatcctccgagaatcgaggtggcctcctccgtgaaagctgtgcccggcaaagcaggcatccgggtcatcatgataactggggacaacaagggcactgctgtggccatctgtcgccgcatcggcatcttcgggcaggatgaggacgtgacgtcaaaagctttcacaggccgggagtttgatgaactcaacccctccgcccagcgagacgcctgcctgaacgcccgctgttttgctcgagttgaaccctcccacaagtctaaaatcgtgtttctttctgtgctggtaacaatgagcgtcgcacagacatggtttcaggtaaataaatctattctatgata

SEQ ID NO: 15604 - DNA, 1272 bp, Homo Sapiens
  misc_feature (458)..(458): n is a, c, g, or t
  misc_feature (509)..(534): n is a, c, g, or t
  misc_feature (536)..(536): n is a, c, g, or t
  misc_feature (837)..(851): n is a, c, g, or t
  misc_feature (1046)..(1087): n is a, c, g, or t
gaatatatttgtattatcccccgcaaaagggcgcgcagcacagagcgtggtcttggattgcccccgccttggcgcggatttgtccggagtttccattccaatggccccggttgtggggaaagggggcttctccaatggttcggggccagaaaatgcctttaaactggatttttccccaccagttatcttgccaatgaaacgggccaggggccggggggggtaaattttgatatcggagcctccctttggacctccctggttgaataggtccccaggtaaatgacctccagaagctcccattttggatttggtccaggaccccttcggtttcccgccggggcgtctttttatttggtgaggaatccacagcccctagttcatgggccaggagtctccctaggagaacaagctatgacccatgtttcacctttacctacctgggccccgcggggccaaanggaatggttctagaaaagctttttcgagggcgcgaggcggccgaccaaggnnnnnnnnnnnnnnnnnnnnnnnnnncntacggctacggtggcaaaatacgactatgaaaagaacatgatatcaaaatcagtataaaaatagccacaggctacttaaatatgacaaacagacttattttttttcttcaaatgcagacttctgcctccctcaaattgtatcaaaatctcaagggaatatctaggtaactggaatatacacaatgactctatacaatcaagaggccagggcttaatcagattccgtgagaacaaggcaaatgatttcttcaaaacacccattttcttactggaagtggtaggaaaagcagcaatgcatggnnnnnnnnnnnnnnngtaattagtagacatggtcttctacccataagctccattacattaaaagaacaaagtgggcttaacatctcacttaagataattcagcattattatcagttttaaaaaaaccaaaaatatcttagaaacaaatcagtctgctttaacaaattgcattcatgctaatgaaattttaatcttctttgtcatgatcannnnnnnnnnnnnnnnnnnnnnnnnnnnnnnnnnnnnnnnnnaaatgttgagttcaatttagatgtcatcaatatcttcatcatcatctccaatgtcatcaaactgaatttcatcatcatctccaggaccaaatgtatcagtttcattgattttagcatgctctggaagctcgccgtatgccttcagacttctagcttcgtctgcattgtattttaaaattacatca

SEQ ID NO: 15605 - DNA, 912 bp, Homo Sapiens
  misc_feature (55)..(112): n is a, c, g, or t
  misc_feature (135)..(135): n is a, c, g, or t
aaacttaagcagttagttggcaagcaggcagggaaccaatgacctgggaattgtnnnnnnnnnnnnnnnnnnnnnnnnnnnnnnnnnnnnnnnnnnnnnnnnnnnnnnnnnngtggaaggggggatgggagctgnggatacactccagtttcattctttctgggggattttcgagaatctccaattcaagagtcaatggcaatacttcctgttttactatttccacaatgctctccgtggctgataatttttcgctaactccatttatttcattaattaggttagtactagaaaccagtggaatatcattaggtgctacactacagggtgtcttgcatatatcatcatcattttcatttgttggtaaagggtctgatgtttctgtgcaagatgtgaggctgggtataggaattgtgtcttctcttggggatgagagttcacatctgtcatctatagcagtggtgaatattggttggctactaagagcagaagaggtgggggctgcaattgtacttcgagcaacagaagaaacagtggtaggtgatggaggcagaggaagctctgctatggatactattgcagtagtttcagatgtctggccttcttgttctttcttctctccactgaggactagcctaaggactggggaaggagactttaacactggatctggttttggcttctcctcttgcttctggtcgctagctgcagtgacaggggtgctggcagcaagatgagcgctctccacagtcccataaaccacagggctgtgctcggggacctggctgggcagcctgaggaggagtaggtgtggacgtgggtcttcctatgggtggagtaggatttctgctgccacctccgacataatctcctctgttatgtctttacctacctatttcacatcggtaccgg

SEQ ID NO: 15606 - DNA, 593 bp, Homo Sapiens
tctccagaagaaagaagagttcagtagaggttagtgaacaaatagtgccatccattacagctcactctgtcttacctgaggaggagtaggtgtggacgtgggtctttcctatgggtggagtaggatttctgctgccacctccagacataatctcctctgttatgtctttacctccctggtttggatcccgaattcttatctataaggttaaataaaatgacatatgtacagatgagtgtctgtgtagcaaatttataggcatataagtgagttaaaggtgctaactgggaaacctgtcaaatatcaaaggtgataatcaccacatttgactttatttcaatcacagatccatcagataaatgtaggccattagctctgacatgaactaattagaataacaagctaaaatgaaacctagttggctggattactaggtcaaaaaggcaaactattaatatttatacttgtgttgcaagaacctgtaagactgattttatttaccatatttaacatacaagtttcataaaatacttttaatatatgaaagttactgcatagatcaaacgttcctttaaagatcttctggagatcag

SEQ ID NO: 15607 - DNA, 890 bp, Homo Sapiens
cctcactgtccacccagctacccaccttcttgccctacttcccgagctcaggatatgcctggccccagtgcagcccctggcttgcctctctccctccttcacccctgcactgggcactgtgtaaacccaactgcttccatcccctgcagcaacccggctaaatggaactgcgaagggggaacggcggcgagaaccagggggttatgatagctcatccacccttatgagcagtgagctggagaccaccagcttctttgactcagatgaggatgactccaccagcaggtggggcttgagtttcatgggtattgtggggcaggtgaccctagatggagccctaaaccctgaggatgcggggcccctgggaggcttatgggctttgtgttggggacccaggccctgcagtgcctcccctcatgggggcagggctgggccagcctggtggggaacgactgtgggccccacaggttcagcagctccacagaacagagcagtgcctcacgcctgatgagaagacacaagcggcggcggcggaagcagaaggtttctcggattgagcggtcctcgtccttcagcagcatcacggactccaccatgtcactcaacatcatcacggtcactctcaacatggaaaaatataacttcttgggcatctccattgtgggccaaagcaacgagcgtggtgacggcggcatctacattggctctatcatgaagggtggggccgtggctgctgatggacgcatcgagccaggagatatgttgttacaggtaaacgagatcaactttgagaacatgagtaatgacgatgcagtccgggtactgcgggagattgtgcacaaaccggggcccatcaccctgactgtagccaagtgctgggacccaagtcc

SEQ ID NO: 15608 - DNA, 2224 bp, Homo Sapiens
gatcttcttgctttgggacggcgggtactggtactgaaagccatgggcaaggggcggccccgggtgcggcaaaggggccagtgtgtcctggtcagaggcgccactggagccatcgtgatcgtggagagacaggttggccatgttgccgcagaggtcaccgaagatgtagtagcactgctcggagaaggtgatcttgttgacggtatggcggatgaagccagctttcagcaggttgctggcatacttgcgggcctccctccggtccgtgaagccttccacattgtggtacagccagtccaccacatctgagccgatgaaagcattagggatggtaatcttgagccacatgcggtcacggacctccaaccctgattcaggggaggccatggcttttacgatggcagccatgtcactgtggatggacaagtggaagtcgtctaggcgctctgtgtcagggatggaactggtgatggaggagctggtggaggtgatggtgctcagggaggggctcatgccgtatgcagggaaggtgccggtcatggctgcagtgtgggagacccaggccgcagggtcaatgggccggatgggctcgctcctgggcaatgtgaagcaaccacgtggacttgggtcccagcacttggctacagtcagggtgatgggccccggtttgtgcacaatctcccgcagtacccggactgcatcgtcattactcatgttctcaaagttgatctcgtttacctgtaacaacatatctcctggctcgatgcgtccatcagcagccacggccccacccttcatgatagagccaatgtagatgccgccgtcaccacgctcgttgcttcctccaggccgtcagcctgatgcatagcgaatttgcccagctgcccgcgctttatgaaatgaatgtcagaaatgcctccacggctgtgtacgcctgttgcaaccccatccaggagacatatttccagcagctggcacctgcagcacggagctccggcttcccaaaccctcaggatggcgccttcagcctctccggcaaagcaaagcagaagctgctgaagcacggggtgaacttgctctgaactgcacccaggaggtgactgggaaggagaaaaccagcaaaggaagctctgccttttataattgaaaaggcccctctattttatttttcttgaaaacattcccttttttaggaaccaaatgatatttgagttttagttattccttttgcagattgggatgtgtataagggggcaggggttagttcttcaggtcggcagacccagagcacttgataaagaactgtatttaatcggtagtgttggggccgggacgggcttggctccctctctgccatactgagcctgaggtatttcatatctcctgctgttccatcccagctttgaattggtgccacaagcttccaagttggcatttatttctagaacctgatcgtccactaagcccagagatgtgtgtgttcaacacccacaccaggtggtggtaggcggtgtgactgcacagcgaggtgccggatctgtgagcaggccgactccactcccacgccgcaggtaggtttctccagtgcgctcttgctgggaggtccggatcgttcctgcagggaagcggcagcacacggagaccacttggttgaattctgttggaactctactcaaatctaggggcgtcttctttggacccacaatgggggcaagccttaataatatggaagggagtttgggctttagagatcccttgtataaaagctctgggggctgagccctgagaattcagtgacaacaggaccaacctgcgctgcctttgactacaagtgggccgtgcagctggttcctctcgagcgagtgtccctaaataggagtttacaagatgtctgggggtaaaagcactgtgcttttcagtggtggctgcgtgaaagggagcgacactcagctgtgtgttcctgggcttgtgtggtacttagaacctcagttctattacgttatagtcagacatttttttgacagtatgagacagactgcaggatgaaaatatttgtcaaaatcttaactgaatgtttactggaagtacttgagattccatttgagagttgtattgttaataatttcatgtcagtgaactgatatctgatgtttatgatatggtgtctttttcttgaaaccaagcttccaaggggctagaaataaaatagccaaaaaatgctgga

SEQ ID NO: 15609 - DNA, 918 bp, Homo Sapiens
aggagactaagtgcatacagatccaacccattagaaagggggaaaaagaacaggcctgttgtcagtgcacccaaatcagagacaaaatagagagcccccctgtaggagaaaaccagaagatggaaatgaggagctggaaactgttttgggggaatctatacttataggttagagaaaggagagcacttcagcttctccagaaggagggtaaggctaggctggggacaaggacacagaggcttcccaaggggattcatcacctgaagaattgcgacgatgaccccaaagaggccaaatggcgctgccaaagatctccacgatgagaatctttacaaagaggctggggttctgagcatcggccagggcagccccactgcccacgatgcccacgcagactccacagaagaggttagacaggcctacggtgaggccagccccaaacatggagtagcctgcatggtagttccgaatgccgatggccttggggtctgtggcactgaaaggctcagccatgttgctaatgacaattgccatgatgatgccgtagatggccacagcctcacagaagatgatgctgaccaggttcttggtcttgatcctgggggccttcactcctccaccaatgatggaggagccggtaatatagatgccccaggctgccccaaccacagacagggagatagctaggccaatgcccaggttggaccacatgaagggcgaagtctccgtcaggaaccatgccacatcaaagcggaagcccaaatcaaaaatggtgtagcagactcccacggccagcgcgcaggcccagaaggccacgaagaccccggagtagagcagtgctagccccgtcatggcggcgacggcggcgggggtcggaacggcggggccggagctacaaacgcgtcccagcgtccaccg

SEQ ID NO: 15610 - DNA, 574 bp, Homo Sapiens
  misc_feature (65)..(127): n is a, c, g, or t
ggggcgctttgagaagacggggactccccaggatacccctctctcccctcgtccagcctccagcnnnnnnnnnnnnnnnnnnnnnnnnnnnnnnnnnnnnnnnnnnnnnnnnnnnnnnnnnnnnnnnggggaaacccaagccctgcagcgcatggaacagaagaactggaaccgacgcttacggagcaagggtatgcgagagcggttcttcctggccctcgggttcatggaacggcataactggaaccaacgcttacggagcaagggtatgcgagagcggttcttcctatacaggaagtagaagatctttggtttggaggcctcgtcgtcctcctccatgtcattggccagatagctgaggacagaaatcaggttgctgctcaggggcaccaccaggagagacctccggctgaggtcagcttcccagagaggaaggtaagggaccgtccctagctcaggactggcacccaccctgcagagagccacgccttcctcaggagggctctgctggacagagacctgatcaagggcatctcccactccttcaggatggagacaaaaacccaactggtgt

SEQ ID NO: 15611 - DNA, 350 bp, Homo Sapiens
agaaaatctcccgttgcaggtacccgggatcacatcctctgctcagtctatgcctggtaatttgtatttgtggagaggggatatctcgccacgttgcccaggcttgaagccggatcaagcaattgggttcctcggatttccaaaatagaccccaatattctgcctttaccccggaagatgcagatgtaccttctctcaggccgatgacctcaggcctccacggtccctggagctctaggaaaggcgagcgcgatctcgcgcccacacccagtgctctgggtcataagcctggatctggaaaaacaaacgccctttgagaagacggggactcgccaggatacccctctctc

SEQ ID NO: 15612 - DNA, 678 bp, Homo Sapiens
  misc_feature (66)..(221): n is a, c, g, or t
gggtctatttcggaaatccgaagaacccaattgcttgatctggcctcaagcctgggcaacgtggcnnnnnnnnnnnnnnnnnnnnnnnnnnnnnnnnnnnnnnnnnnnnnnnnnnnnnnnnnnnnnnnnnnnnnnnnnnnnnnnnnnnnnnnnnnnnnnnnnnnnnnnnnnnnnnnnnnnnnnnnnnnnnnnnnnnnnnnnnnnnnnnnnnnnnnnnnnnnggacagggcaagtctgtctcaaaaaaataaaagaaattgaatacattgatattttgccaggaccctgccttctacaggcatctagtctaatgggactgggagtaatcaaggcagatgacctaatcccagtgtccaggatgtaactagagagctacgggcatgcagaagttggaagatgagggaaggcatcacagaggctgtggggtgaactgatttcaaggaatgggtccttcccttcagagccacatgtgtgcgggacacccagacagaaaacacaaacacaaagtcgagtggagggcatttggaaggagcagtgaagccgagccaggaaataccaagatggcgagccagtgtgcttgtagagattgtagagagggtagaattgacactgtggaccctggcctcgatagagaaaggcatcagctaaggaagttgttcaggtgggcagtgaggttgt

SEQ ID NO: 15613 - DNA, 2266 bp, Homo Sapiens
  misc_feature (652)..(663): n is a, c, g, or t
  misc_feature (1536)..(1600): n is a, c, g, or t
  misc_feature (1707)..(1717): n is a, c, g, or t
gggaatggcaacttgacatttttgcatcaccatctgcctcataggccactctttcctttccctctgcccaccaagtcctcatatctgcagagaacccattgatcaccttgtgccctcttttggggcagcctgttgaaactaaagcacagtctgaccactcacgataaagcagatttttctctgcctctgccacaaggtttcagagtagtgtagtccaagtagagggtggggcacccttttctcgccgcaagaagcccattcctatggaagtctagcaaagcaatacgactcagcccagcactctctgccccaggactcatggctctgctgtgccttccatcctgggctcccttctctccagtgaccttaagaactttgtctggtggctttgctggaacattgtcactgttttcactgtcatgcagggagcccagcactgtggccaggatggcagagacttccttgtcatcatggagaagtgccagcaggggactgggaaaagcactctacccagacctcacctcccttcctccttttgcccatgaacaagatgcagtgggccctaggggttcccactagtgtctgctttcctttattattgcactgtgtgaggtttttttgtaaatccttgaattcctattttttttaaagnnnnnnnnnnnnccttaagctgcatttgttactgaaatgattaatgcactgatgggtcctgaattcaccttgagaaagacccaaaggccagtcagggggtggggggaactcagctaaatagacctagttactgccctgctaggccatgctgtactgtgagcccctcctcactctctaccaaccctaaaccctgaggacaggggaggaacccacagcttccttctcctgccagctgcagatggtttgccttgcctttccaccccctaattgtcaaccacaaaaatgagaaattcctcttctagctcagccttgagtccattgccaaattttcagcacacatgccagcaacttgggggaataagcgaaggtttccctacaagagggaaagaaggcaaaaacggcacagctatctccaaacacatctgagttcatttcaaaagtgaccaagggaatctccgcacaaaagtgcagattgaggaattgtgatgggtcattcccaagaatcccccaaggggcatcccaaatccctgaggagtaacagctgcaaacctggtcagttctcagtgagagccagctcacttatagctttgctgctagaacctgttgtggctgcatttcctggtggccagtgacaactgtgtaaccagaatagctgcatggcgctgaccctttggccggaacttggtctcttggctccctccttggccacccaccacctctcgcacagcccctctgtttttacaccaataacaagaattaagggggaagccctggcagctatacgttttcaaccagactcctttgccgggacccagcccgccaccctgctcgcctccgtcaaacccccggccaatgcagtgagcaccatgtagctcccttgatttnnnnnnnnnnnnnnnnnnnnnnnnnnnnnnnnnnnnnnnnnnnnnnnnnnnnnnnnnnnnnnnnntattctaatgaatgtatctttctaaaggactgacgttcaatcaaatatctgaaaatactaaaggtcaaaaccttgtcagatgttaacttctaagttcggtttgggannnnnnnnnnnaatagaaatcaagttgtttttgtttttaaggaaaagcgggtcattgcaaagggctgggtgtaattttatgtttcatttccttcattttaaagcaatacaaggttatggagcagatggttttgtgccgaatcatgaatactagtcaagtcacacactctggaaacttgcaactttttgtttgttttggttttcaaataaatataaatatgatatatataggaactaatatagtaatgcaccatgtaacaaagcctagttcagtccatggcttttaattctcttaacactatagataaggattgtgttacagttgctagtagcggcaggaagatgtcaggctcactttcctctgattcccgaaatggggggaacctctaaccataaaggaatggtagaacagtccattcctcggatcagagaaaaatgcagacatggtgtcacctggatttttttctgcccatgaatgttgccagtcaggaccgccccccctggttccccatttttggtatgaaagttgggggttaccacctgcatttaggggaaaattgg

SEQ ID NO: 15614 - DNA, 529 bp, Homo Sapiens
accttctgggcaagtggcagcattgcgctcatgaggggctttgcattcttagccaagggcaataaactgggtgggtgatctggcccaaacttgcccctaggctctgctagccctgaatcagcaggcttcagagacgagggtgggtgttataaaagccagtctgtaaagggtaaattccaaatcttgtgccttgttataccaatccttcctgactcccgtttaaaccaactactctatttctgtgctgcctacattttcaatcctcccaagcattagcaaattcctgaaatttcctcatttggtaggccttccataggagtcagctatggacttccataggagttggcagctaaaaccagactgtgagcttctgtctccgttctgatttttgctgcacctcccaggggacagtccccacatgattacaaaagccaggtgccctcatcacccgttacacctgacctgtccacttgttttgaataaaccttcattctccaagcagatccccaaacttccttgtcgtataaca

SEQ ID NO: 15615 - DNA, 757 bp, Homo Sapiens
  misc_feature (45)..(45): n is a, c, g, or t
ccagcactcaagcggcagattgatgagttagaagagagcaaaccnaggtctttacgaaaaagcagaagaggagctgcaagatataaaagaaaaaatcagtaagggagaatatggaaacgctggtatcatggctgaagtggaagagctcaggaaacgtgtgctagatatggaagggaaagatgcagagctcataaaaatggaggaccagtgcagagatctcaataagaggcttgaaagggagacgttacagagtaaaggctttaaactagaggttgaaaaactcagtaaaagaattatggctctggaaaagttagaagacgctttcaacaaaagcaaacaagaatgctactctctgaaatgcaatttagaaaaagaaaggatgaccacaaagcagttgtctcaagaactggagagtttaaaagtaaggatcaaagagctagaagccattgaaagtcggctagaaaagacagaattcactctaaaagaggatttaactaaactgaaaacattaactgtgatgtttgtagatgaactatacaagagtatctgaaactaactgttgcctgcatagtcatatcgagtgtgcacttactgtatatcttttcatttacatacttgtatggaaaatatttagtctgcacttgtataaatacatctttatgtatttcattttccataactcactttaatttgactgcaacttgtcttggtgaaatactttaacattataaaacagtaaataatttgttatttttaa

SEQ ID NO: 15616 - DNA, 715 bp, Homo Sapiens
atcagagcaccgatttcgagtggcccgaacaatgaacatagtgcaagcatgcgatattcagagtctccccagaccggcactcatcattgcagtttcagcgttcacacagcaatagctcaagtgtgataactactgaggataataaaatccacattcacttaggaagtccttacatgcaagctgtagccagccctgtgagacctgccagcccttcagcaccactgcaggataaccgaactcaaggcttaattaacggggcactaaacaaaacaaccaataaagtcaccagcagtattactatcacaccaacagccacacctcttcctcgacaatcacaaattacagtaagtaatatatataactgaccacgctcaccctcatccagtccatactgatatttttgcaaggaactcaatccttttttaatcatccctccatatcccccaagactgactgaactcgtactttgggaaggtttgtgcatgaactatacaagagtatctgaaactaactgttgcctgcatagtcatatcgagtgtgcacttactgtatatcttttcatttacatacttgtatggaaaatatttagtctgcacttgtataaatacatctttatgtatttcattttccataactcactttaatttgactgcaacttgtcttggtgaaatactttaacattataaaacagtaaataatttgttatttttaccaa

SEQ ID NO: 15617 - DNA, 1012 bp, Homo Sapiens
  misc_feature (888)..(888): n is a, c, g, or t
atgtggcattcactgtgggcgaaggagaagaccacgacattccaattggaattgacaaagctctggagaaaatgcagcgggaagaacaatgtattttatatcttggaccaagatatggttttggagaggcagggaagcctaaatttggcattgaacctaatgctgagcttatatatgaagttacacttaagagcttcgaaaaggccaaagaatcctgggagatggataccaaagaaaaattggagcaggctgccattgtcaaagagaagggaaccgtatacttcaagggaggcaaatacatgcaggcggtgattcagtatgggaagatagtgtcctggttagagatggaatatggtttatcagaaaaggaatcgaaagcttctgaatcatttctccttgctgcctttctgaacctggccatgtgctacctgaagcttagagaatacaccaaagctgttgaatgctgtgacaaggcccttggactggacagtgccaatgagaaaggcttgtataggaggggtgaagcccagctgctcatgaacgagtttgagtcagccaagggtgactttgagaaagtgctggaagtaaacccccagaataaggctgcaagactgcagatctccatgtgccagaaaaaggccaaggagcacaacgagcgggaccgcaggatatacgccaacatgttcaagaagtttgcagagcaggatgccaaggaagaggccaataaagcaatgggcaagaagacttcagaaggggtcactaatgaaaaaggaacagacagtcaagcaatggaagaagagaaacctgagggccacgtatgacgccacgccaaggagggaagagtcccagtgaactcggccccctcccctcatgggctttcccccaacntcaggacagaacagtggtttaatggtaaagtttggttaatagtctatgtggattctggaaggcaaatgggcaaaacaagtagcttccccaaaaacagccccccctggctgctgccccggaaggg

SEQ ID NO: 15618 - DNA, 393 bp, Homo Sapiens
catgggacattggggtggctaccatgaagaaaggagagatatgccatttactgtgcaaaccagaatatgcatatggctcggctggcagtctccctaaaattccctcgaatgcactctcttttttgagattgagctccttgatttcaaaggagaggatttatttgaagatggaggcattatccggagaaccaaacggaacaggagagggatattcaaatccaaacgaaggagcaacagtagaaatccacctggaaggccgctgtggtggaaggatgtttgactgcagagatgtggcattcactcctcctatacaagcctttctcattggcactgtccagtccaagggccttgtcacagcattcaacagctttggtgtattctctaagcttcagg

SEQ ID NO: 15619 - DNA, 1165 bp, Homo Sapiens
ggggagaggggttgagtcaagatggcggccaaggtggcgaagcagcagccgcggcggcggcggcggctggagtgagcgtacgactcgccgcgccgaacgaggtcccggtgtagggccgcgcgccgtggccgcgtcccactcctcaggccggggcgcacgtcggctcccacgcttagccagctcccggtggtttcctagaaacatgattgtttattgccattgatctcacagtctggtgaggacttctttactgataatgtcaagttcaggttatcctcccaaccaaggagcattcagcacagaacaaagtcgttatcctcctcactctgtccagtatacatttcccaacacccgccaccagcaggagttcgcagtccctgattatcgttcctctcatcttgaagtgagtcaggcatcacagcttttgcagcaacagcagcagcaacagcttcgaaggcgaccttccttgctttcagaatttcacccaggttctgacaggcctcaagaaaggagaactagttatgaaccgtttcatccaggcccatccccagtggatcatgattcactggaatcgaagcgaccacgtctggaacaggtatctgattctcattttcagcgtgtcagtgctgcggtttagcctttagtgcacccgctgccagaagggctgagggcttctgcagatgctaagaaggatccagcattcggaggcaaaccatgaagctccatcctctccaatttcggggcaaccatgtggagatgatcaaaatgcttcaccttcaaaactctcaaaggaagagttaataccagagtatggatcgtgtagatcgagaaatttgcaaaagtagaacagcagatccttaaactgaaaaagaaacaacaacagcttgaagaagaggcagctaaacctcctgagcctgagaagcccgtgtcccctcctcctgtggagcagaaacaccgcagtattgtccaaattatttatgatgagaatcggaaaaaagcagaagaagctcataaaatttttgaaggtcttggcccaaaagttgaactgccactgtataaccagccatcagataccaaggtgtaccatgagaacatcaagacaaaccaggtgatgagggaaaaactcattttattttttaaaagaagaaatcctgccaggaaaacc

SEQ ID NO: 15620 - DNA, 419 bp, Homo Sapiens
  misc_feature (356)..(365): n is a, c, g, or t
tgtgctgccagagatggtatgagcttacccgattctcatcataaataatttggacaatactccggtgtttctgctccacaggaggaggggacacgggcttctcaggctcaggaggtttagctgcctcttcttcaagctgttgctaagagatccagaaagaaagagtcaagcatgtgctgcacaccacacccagcagtgattaaccactggagataacacaggctactaagctttgcttgcagattctgtagggtaaccaattaatccatgaaggtctcatggaccaagagctcaaagagaattaatcagatttatttcataaccaaacaacacaaattttcattagatagagtttnnnnnnnnnnctaagaggaagcatcctttaagattttaattctgggccgggtgcagtggctcat

SEQ ID NO: 15621 - DNA, 729 bp, Homo Sapiens
tggcaaggtggaaatcaggacacagcacctgactgcacacagtggctgaaatccagcatttttacataggagatgcacttagcctctaagcctcgttttactcatctgtgaaacagagataagtaaccctctctcatgaactctttgatgaggatttgtaaacgaaaacagactcgaactattgtgtaccaccacatagcacatgcacgtctgtcccagactttgacaacctgcacaagacaagcagcctaaagcaggagagacctccctagggttttgtgtgtgtgcacactaccctcactccccaactggccattaccctagttctgcccttgtttgtggagttacagcctcaaggttgtagcatgtgtgctggcaatcagggccgcagtgtgttctgcgcctgcccagagctgactcctgatttaaccgctggcgtaaccgcgggttgcacgcatgcgtgctgaaaagcctttcaccctcacgtggtttcttttttaaccagtcatcaagcgaggctcgcgcgcaggccccgcgttggaaaatggcggggaagctgaaacctctgaatgtggaggcgccagaagctgctgaggaggctgaaggtagtgagggcaagtgggctgcactcctttctctccaaccagggcagaaaggagggaggattcgtcccattacaataatgaaataatgatattctaatttttttaaataaaatgttaagccttt

SEQ ID NO: 15622 - DNA, 848 bp, Homo Sapiens
  misc_feature (15)..(15): n is a, c, g, or t
  misc_feature (158)..(158): n is a, c, g, or t
  misc_feature (406)..(406): n is a, c, g, or t
ttctgtctaccctgnaaatgtgtgtgggggtgtgtctgtggccagtcattgtctccctaagcaatggggcaaggtctgagggcccaccgatgagagagatggtggcagccgccaggcgagcaggctgctttccctgcccagtcatgcacctccccctntggggaaatccttaggcctccctctcccttccctctgtctcatctcctccacttggatgatgctctagcctctgtcagggactgtcccctccaaacttgcttccgtggtctgcctcctagttgaatctcagccctgagtgtccagatctggccaaggtgtctagggtggcccacgggggtgctggaattggcacttcagggccaggctatgcttgggactggcctgagggtattttaaagaaaaaaanctacataaaaggcctaaaagtaagaccccacaaggatattcctttgcccttcttgtacttttttcatctttaccctgccagaaatgacccgccctcaatgctggctgctgctaacattaatgagaaggtggccttcagtgtccacctgtggaacccaggacacagcacctgactgcacacagtggctgaaatccagcatttttacataggagatgcacttagcctcgcgcgcaggccccgcgttggaaaatggcggggaagctgaaacctctgaatgtggaggcgccagaagctgctgaggaggctgaaggtagtgagggcaagtgggctgcactcctttctctccaaccagggcagaaaggagggaggattcgtcccattacaataatgaaataatgatattctaatttttttaaataaaatgttaagccttttgttaaaa

SEQ ID NO: 15623 - DNA, 1017 bp, Homo Sapiens
gagcaggctggtaccggtcggtatcccgggatatcgtcgaccacgcgtcgcctggttcctgggtgagttcctggcacagagtgaggagaagccacatgtggttgctcacttccatgagtggttggcaggcgttggactctgcctgtgtcgtgcccggcgactgcctgtagcaaccatcttcaccacccatgccacgctgctggggcgctacctgtgtgccggtgccgtggacttctacaacaacctggagaacttcaacgtggacaaggaagcaggggagaggcagatctaccaccgatactgcatggaaagggcggcagcccactgcgctcacgtcttcactactgtgtcccagatcaccgccatcgaggcacagcacttgctcaagaggaaaccagatattgtgacccccaatgggctgaatgtgaagaagttttctgccatgcatgagttccagaacctccatgctcagagcaaggctcgaatccaggagtttgtgcggggccatttttatgggcatctggacttcaacttggacaagaccttatacttctttatcgccggccgctatgagttctccaacaagggtgctgacgtcttcctggaggcattggctcggctcaactatctgctcagagtgaacggcagcgagcagacagtggttgccttcttcatcatgccagcgcggaccaacaatttcaacgtggaaaccctcaaaggccaagctgtgcgcaaacagctttgggacacggccaacacggtgaaggaaaagttcgggaggaagctttatgaatccttactggttgggagccttcccgacatgaacaagatgctggataaggaagacttcactatgatgaagagagccatctttgcaacgcagcggcagtctttcccccctgtgtgcacccacaatatgctggatgactcctcagaccccatcctgaacaccatccgccgaatcggcctcttcaatagcagtgcacgacagggtgaaggtgatttccacccggatat

SEQ ID NO: 15624 - DNA, 938 bp, Homo Sapiens
  misc_feature (119)..(119): n is a, c, g, or t
ggctcagtgacgctgcggcctccttctgcctaggtcccaacgcttcggggcaggggtgcggtcttgcaataggaagccgagcgtcttgcaagcttcaccgtcgggcaccagctactcgngccccgcaccctaccatggtgcattcacctagacaccatccggggtccctacctggagatccccggagccccccttcctgcgccagccatgcctttaaaccgcactttgtccatgtcctcactgccaggactggaggactgggaggatgaattcgacctggagaacgcagtgctcttcgaagtggcctgggaggtggctaacaaggtgggtggcatctacacggtgctgcagacgaaggcgaaggtgacaggggacgaatggggcgacaactacttcctggtggggccgtacacggagcagggcgtgaggacccaggtggaactgctggaggcccccaccccggccctgaagaggacactggattccatgaacagcaagggctgcaaggtgtatttcgggcgctggctgatcgagggaggccctctggtggtgctcctggacgtgggtgcctcagcttgggccctggagcgctggaagggagagctctgggatacctgcaacatcggagtgccgtggtacgaccgcgaggccaacgacgctgtcctctttggctttctgaccacctggttcctggggtgagttccctggcacagagtgaggagaagccacatgtggttgctcgcttccatgagtggttggcaggcgttggactctgcctgtgtcgtgcccggcgactgcctgtagcaaccatcttcaccacccatgccacgctgctggggcgctacctgtgtgccggtgccgtggacttctacaacaacctggagaacttcaacgtggacaagaagcaggggagaggcagatactaccacggtgctaaa

SEQ ID NO: 15625 - DNA, 873 bp, Homo Sapiens
ttatgtgggaccagctcgaccatgctgggcatgcgcatgcagcacaacctggagcagcagagtccaggccaggaacacaacaggtgtgacgtgaggaggccctcaaagaattcagcatgatgtttaaacactttgacaaggacaagtctggcaggctgaaccatcaggagttcaaatcttgcctgcgctccctgggctatgacctgcccatggtggaggaaggggaacctgaccctgagttcgaggcaatcctggacacggtggatcgaacagagatggccatgtctccttgcaagaatacatggctttcatgatcagccgcgaaactgagaacgtcaagtccagcgaggagattgagagcgccttccgggccctcagctcagagggaaagccttacgtgaccaaggaggagctctaccagaacctgacccgggaacaagccgactactgcgtctcccacatgaagccctacgtggacggcaagggccgcgagctccccaccgcgttcgactacgtggagttcacccgctcgcttttcgtgaactgagccactccctgggtcacccacccctcgctgcttgccctgcgtcgccttgctgcatgtccgctcctctgtgtgctctcactttccactgtaaccttaagcctgcttagcttggaataagacttaggagaaaatggtgcttcactaacccgcttccggtccagtcacaatcatcatgtcactgtggggacccagatctgtgtcttgaagcagctgccctcattccgacttcagaaaatcgaagcagctggctcctccccttgttctctctcccaccctcccccaaatctgttttcatgtaaaagacaaataaatgatgacttccccca

SEQ ID NO: 15626 - DNA, 1303 bp, Homo Sapiens
  misc_feature (728)..(728): n is a, c, g, or t
ccacgcgtccggctctagcaaggacccaccgaccccagccgcggcggcgcggactttgcccggtgtgtggggcggagcggactgcgtgtccgcggacgggcagcgaagatgttagccttcgctgccaggaccgtggtgaagcctctgggcttcctgaagcccttctccttgatgaaggcttccagccgcttcaaggcacaccaggatgcactgccacggctgcccgtgccccctctccagcagtccctggaccactacctgaaggcgctgcagcccatcctgtctgagtggtggctcaagaccgcctacctccagtaccgccagcctgtggtcatctactcgagcccaggcgtgatgctacccaagcaggacttcgtggacctgcagggtcagctccgatttgctgccaaactcattgagggtgtgttggatttcaaggtcatgattgacaacgagaccctgcccgtggagtacctgggggggaagccactgtgcatgaaccagtactatcagatcttgtcctcctgccgagtgccgggccccaagcaggacacagtcagcaacttcagcaagaccaagaagcctcccacgcacatcaccgtggtacacaactaccagttttttgagctggatgtgtaccacagtgacgggacacccctcactgcggatcagatctttgtgcagctggagaagatctggaactcatccctacagaccaacaaggagcntgtgggcatcctcacctccaaccaccgcaactcctgggccaaggcatacaacaccctcatcaaagacaaggtgaaccgggattccgtgcgctccatccagaagagcatcttcaccgtgtgcctagatgcaaccatgcccagggtctcagaagacgtgtaccgcagccacgtggcaggccagatgctgcatggggcggcagcaggctcaacagcggcaaccgctggttcgacaagacgctgcagttcatcgtggcagaagatggctcctgtgggcttgtgtacgagcatgctgcagcggaggggccccctattgtcacccttctggactatgtcatcgagtacacgaagaaacccgagcttgtgcggtctcccatggtgcccctgcccatgcccaagaagctgcggttcaacatcacccctcgctgcttgccctgcgtcgccttgctgcatgtccgctcctctgtgtgctctcacttaccactgtaaccttaagcctgcttagcttggataagacttaggagaaaatggtgcttcactaacccgcttccggtccagtcacagtcaccactcaccca

SEQ ID NO: 15627 - DNA, 639 bp, Homo Sapiens
  misc_feature (84)..(84): n is a, c, g, or t
  misc_feature (92)..(92): n is a, c, g, or t
  misc_feature (201)..(201): n is a, c, g, or t
  misc_feature (207)..(207): n is a, c, g, or t
gagccgtttgtctttacatctgactgaggtggacggcaggggggccacattgttggctactctccaaggagaaaggagtcccgngatggaancaatgtggcctgcatcctgaccttgcccccctaccaacgccgcggctacgggaagttcctcatcgctttcagttatgagctctccaagctggagagcacagtcggctcnccggangaagccgctgtctgacctgggcaagctcagctaccgcagctactggtcctgggtgctgctggagatcctgcgggacttccggggcacactgtccatcaaggacctcagccagatgaccagtatcacccaaaatgacatcatcagtaccctgcaatcccttcaatatggtcaagtactggaagggccagcacgtgatctgtgtcacacccaagctggtggaggagcacctcaaaagtgcccagtataagaaaccacccatcacagtggactccgtctgcctcaagtgggcaccccccaagcacaagcaagtcaagctctccaagaagtgagcagcctggcccctgctgtcggacctgagcctcctggctcccagcctgtaaatatgtatagacctgttttgtcatttttttaataaagtcagttctggtggca

SEQ ID NO: 15628 - DNA, 617 bp, Homo Sapiens
  misc_feature (507)..(507): n is a, c, g, or t
agccagatgaccagtatcacccaaaatgacatcatcagtaccctgcaatccctcaatatggtcaagtactggaagggccagcacgtgatctgtgtcacacccaagctggtggaggagcacctcaaaagtgcccagtataagaaaccacccatcacaggtgggtggggggctgctgtgtgtcgggggcggtgggggagtgtcagtatatggactggtaggagtcaaggcctccttattgctgtcacatgatcccaaaccagtcagaccagctcccaggatggagcccggggcaggcctctcattcctgggcttccctgcccctccccagcacagcctgcccttttgttctcacctggaggaggtgaaactggcctgagcccagaggagggcagccaggtgtgagctggcctggcccaggcccagccctgcctcccgccccttctccccacagtggactccgtctgcctcaagtgggcaccccccaagcacaagcaagtcaagctctcncaagaagtgagcagcctggcccctgctgtcggacctgagcctcctggctcccagcctgtaaatatgtatagacctgttttgtcatttttttaataaagtcagttctggtg

SEQ ID NO: 15629 - DNA, 855 bp, Homo Sapiens
  misc_feature (732)..(732): n is a, c, g, or t
ggggctatcggaggccgcgcgggtggctgagcagcggcctggtgcgctcgcttagcgggcgacggaatcagacggacgtggacgcccccggagtggaagccgaagcaggagttgttgttgctgaggggctgccgcagccgccgcgagcctccggacagacgccagagcgaggagggcgctacgcgacttggcaagatgacccagttcctgccgcccaaccttctggccctctttgccccccgtgaccctattccatacctgccacccctggagaaactgccacatgaaaaacaccacaatcaaccttattgtggcattgcgccgtacattcgagagtttgaggaccctcgagatgcccctcctccaactcgtgctgaaacccgagaggagcgcatggagaggaaaagacgggaaaagattgagcggcgacagcaagaagtggagacagagcttaaaatgtgggaccctccacaatgatcccaattgctcagggggatgccttcaagactctcttcgtggcgagagtgaattatgacacaacagaatccaagctccggagagagtttgaggggtacggacccatcaaagaaaatacacatggtctacagtaaacggtcaagaaaagcccccggggctaggccttcctcgaagtacgaacccccaggcgagaattgccctcccccttaaaaacacggcaaatggcaaaaaacaagaagcgcgcaagcgttgganaacccgtgtggggcccgccttcggccccctcaaaaaagctttttcaagaaccacttcggtgtggggggccgcggggcccccggaaaggggaaggggagacactggggccacaaacctggttct

SEQ ID NO: 15630 - DNA, 679 bp, Homo Sapiens
  misc_feature (69)..(69): n is a, c, g, or t
  misc_feature (182)..(182): n is a, c, g, or t
ccccaagtggaagccgaagcagaagttgttgttgctgaggggctgccgcagccgccgcgagcctcgaancagacgccagagcgaggagggcgctacgcgacttggcaagatgacccagttcctgccgcccaaccttctggccctctttgccccccgtgaccctattccatacctgccacccntgatgatgggcctccaggggagctcgggcctgacggccctgacggtccagaggaaaagggccgggatcgtgaccgggagcgacggcggagccaccggagcgagcgcgagcggcgccgggaccgggatcgtgaccgtgaccgtgaccgcgagcacaaacggggggagcggggcagtgagcggggcagggatgaggcccgaggtgggggcggtggccaggacaacgggctggagggtctgggcaacgacagccgagacatgtacatggagtctgagggcggcgacggctacctggctccggagaatgggtatttgatggaggctgcgccggagtgaagaggtcgtcctctccatctgctgtgtttggacgcgttcctgcccagccccttgctgtcatcccctcccccaaccttggccacttgagtttgtcctccaagggtaggtgtctcatttgttctggccccttggatttaaaaataaaattaatttcctgttgaaa

SEQ ID NO: 15631 - DNA, 887 bp, Homo Sapiens
ccaagcacatacacccaatgtctgtacctgcggttcctctcgtactgagcaggattaccatggccacgacacaacatcagtagggtaaaactaacctgtctctgatgggagaagactgcgccagtcttgctcccatcagtggttgcactagtccataattagaaggtgttgttatttttaaaactataagcaaaattatgaaggcctttaaaaaatctatcataataatgaaaaagaggttgtctcccaacagtgctgtccctcaaagaaaagactggttatgtggaaacagcacgtttcggagagattattctagtgaataacagtgtatatttgtggtaggcaaatttctaagaatgacccctactgacacccccaccaatgaccttgtataatatcctcccactttgagcatgggtggaacctgtttgatccatgattatatcatgttatgtagcaaaaggaagactgtctgggggtggctaatcaaatcttgtgactcctttaaaagcagagagttttctcgggctggtggcagaagtcaagagacaaagcagaaggacctcaggcaccattgctgttttaaggtagagggggctgcatgagaaggaatgcacatggctttgaggagctgagagaggccttggctaacagcaaaggagctgggaactgcagtcctacagccacgggaactgaattcagcccataagctcattcataggcttggaaaggcattcatctccagtctccagataagacccagcctggccaacactttgaatccagccttgtgagaccctaagccgagaactcacttaagcctgcttggacttctgacctacagaactatgagataataaatcagtggtgttttaagctgctaaaaa

SEQ ID NO: 15632 - DNA, 1095 bp, Homo Sapiens
gtatcgttccgcctgggcgggattctgacttagaggcgttcagtcataatcccacagatggtagcttcgccccattggctcctcagccaagcacatacaccaaatgtctgaacctgcggttcctctcgtactgagcaggattaccatggcaacaacacatcatcagtagggtaaaactaacctgtctcacgacggtctaatcccagctcacgttccctattagtgggtgaacaatccaacgcttggtgaattctgcttcacaatgataggaagagccgacatcgaaggatcaaaaagcgacgtcgctatgaacgcttggccgccacaagccagttatccctgtggtaacttttctgacacctcctgcttaaaacccaaaaggtcagaaggatcgtgaggccccgctttcacggtctgtattcgtactgaaaatcaagatcaagcgagcttttgcccttctgctccacgggaggtttctgtcctccctgagctcgccttaggacacctgcgttaccgtttgacaggtgtaccgccccagtcaaactccccacctggcactgtccccggagcgggtcgcgcccggccggcgcgcggccgggcgcttggcgccagaagcgagagcccctcggggctcgcccccccgcctcaccgggtcagtgaaaaaacgatcagagtagtggtatttcaccggcggcccgcagggccggcggaccccgccccgggcccctcgcggggacaccgggggggcgccgggggcctcccacttattctacacctctcatgtctcttcaccgtgccagactagagtcaagctcaacagggtcttctttccccgctgattccgccaagcccgttcccttggctgtggtttcgctggatagtaggtagggacagtgggaatctcgttcatccattcatgcgcgtcactaattagatgacgaggcatttggctaccttaagagagtcatagttactcccgccgtttacccgcgcttcattgaatttcttcactttgacattcagagcactgggcagaaatcacatcgcgtcaacacccgccgcgggccttcgcgatgctttgtttcggacgcgtgg

SEQ ID NO: 15633 - DNA, 1571 bp, Homo Sapiens
tggggcctttaggtgccccctggtgttgccccggggtgttcgtcccggtagaaggggggttgactcggtggtcctgctgctaggatgagggctggaaagggctggagtcgagtgctgggtgtaccgtgttgctgctggggtgtgggaagtccccgtggaaggctctgtgatgtgggtggtgcccaaggtgcctgaggtggccgaagtccaggctgtgcgcaccgtgtggggactgctgggggacagggatcgcccgtgtgtggtggccgtggtgttcggcactgggggtgtgtgggtggtccctagggcagaggagggagtcactgtgctgctggtggctgcaggtgtggtggcggtggtggtcagcactggggggatgggtgttgtccctggagttgaggaggggttggtggtggagccggtggccgtgatcgtagtggccgtggtggtcagtgatgggggagtaccactggtctgtgtgctagaggagggtgttgccatagaaccagtggccacagttgtggtggtggtggtcagcactgtggcggtgtgggtggtccccgggatggaggagggggtcaccgtggagcctctggttgtgggtgtggtggttgtgctgatccacactggaggcgtgagtgccgtccctgggctggaggagggggtggctgtgaagcccgtggttgtggtagtcggcactttggtagtgtgagctgttcctggggtggaggagggggtggccacagagccggtggccccggttgtggtggccgtggtggtaagcactgtggaggtgtggacagtctctggagtggaggagggtgtggctgtggacatggtggccgtgggtgtggtggtctgtgataggcgggtccaggtggtgcccagggaggaggaggggatggctgtaaagctggtagctgtgggtgtggtggctgtgcttctcagtgctggaagggcagttgcagtccctggactggaggagggagtggctttggagctggtgactgtgggtgtcgtggccgtggtgctcacatgtggggtgccagcagttgcctgggtggaggaggcggtggccgtggatccggtgggcaccgtcacggtggctgtagtgctcggctctgtgaggatccagctggtccctggggtggaggacggggtggccgtggatccagtggacgcagtcgtagtggctgttgtggtcggctttgtgaggatccaggtcgtccccggagttgaggagggcgtggccgtggagctggtggctggggtactggggcagtggctgtagtcgtcacagcaaagcacacgcacgttgtagttgaagcacatgttgaacctgcctgtctggtcttcgttcttgcaggtcagccccgtctccaggctgcaggtcagcacctgcccgacctggtcgatgcttacctcggggtagttctccgcccggcactctatgctctttggtgcccagcacatcttgcccccagcagccctgatgttttcaaaagtttccatgtccccgcctgcaacccctgaggttgggaagtccacgtccataaggggatccgctagtg

SEQ ID NO: 15634 - DNA, 368 bp, Homo Sapiens
ttatgtcaccgaggctagttggtagaatgttacatgtatcgaagaattcatgaagcaattatacagcagtccaccaagtcgattactttgatgtatttatacagaatcaataagagcaaaattgctatgggtcacaggaatccatcattgctttatgtactcacctgcaacaattgataagaactattgaagacctagatgaaaatcagctgaaagatgagttttttaaacttctgcagatttcactgtggggaaataagtgtgatctgtctctctcaggtggagaaagtagttctcagaataccaatgtactaaattcattggaagacctaaaacctttcattttattgaatgatatggaacatctt

SEQ ID NO: 15635 - DNA, 709 bp, Homo Sapiens
tgtagtgctcggctctgtgaggatccaggtggttcctggggtggaggacggggtggccatggatccagtggactcaagtcttagtggcttttttggtcagctctgtgaggattcagggtcgtccccaggattggaggaaggcatggccgttagagctggtgcacagggggtgctggggcagtggccgtagttgcagcagaacacacggatttcatagttgaagcacatcttgaacttccccacctgctcacggttcctgcagaccaggccaaagtccaggctgcattccacgacctggcccaactcccgcagggggacaccaggctgggcctgggcacggcactcgaggcccaggggctgctcacagacggcccctccggccgcacggatgttggagtaggtgtcaaagtccccgccagagggccccggcatggggtagctgtagtccagccactctgaccaggcacactggggctcacagcccatggtcaccaccgtggttatgggggccgatgtggggctgctgggcagcagggtcgaggtgcgggtcttgctgggtgtggctgtggctgtggtcctggaggtgcccctggtgtggcccggggtggtcgtccctggagaagggggtgactcggtgtcctgctgctaggtgagggctgaaaggctgacctgggcacatgcatgcacccataagctcctctagagtcag

SEQ ID NO: 15636 - DNA, 876 bp, Homo Sapiens
taaggccgggtggtaatcggcacgaggactcagagaagctgccctggctgctcgtagcgccgggccttctctcctcgtcatcatccagagcagccagtgtccgggaggcagaagatgccccactccagcctgcatccatccatcccgtgtcccaggggtcacggggcccagaaggcagccttggttctgctgagtgcctgcctggtgaccctttgggggctaggagagccaccagagcacactctccggtacctggtcctccacctagcctccctgcagctgggactgctgttaaacggggtctgcagcctggctgaggagctgcgccacatccactccaggtaccggggcagctactggaggactgtgcgggcctgcctgggctgccccctccgccgtggggccctgttgctgctgtccatctatttctactactccctcccaaatgcggtcggcccgcccttcacttggatgcttgccctcctgggcctctcgcaggcactgaacatcctcctgggcctcaagggcctggccccagctgagatctctgcagtgtgtgaaaaagggaatttcaacgtggcccatgggctggcatggtcatattacatcggatatctgcggctgatcctgccagagctccaggcccggattcgaacttacaatcagcattacaacaagctgctacggggtgcagtgagccagcggctgtatattctcctcccattggactgtggggtgcctgataacctgagtatggctgaccccaacattcgcttcctggataaactgcccagcagaccggtgaccatgctggcatcaggatcgggtttacagccacagcatctatgagcttctggagaacgggcaagcgggcgg

SEQ ID NO: 15637 - DNA, 989 bp, Homo Sapiens
  misc_feature (863)..(911): n is a, c, g, or t
gtgtgtggagtctgctcaggtgttaggtacagtgtgttgatcgtggtggcttgaggggaacccgctgttcagagctgtgactgcggctgcactcagagaagctgcccttgggctgctcgtagcgccgggccttctctcctcgtcatcatccagagcagccagtgtccgggaggcagaagatgccccactccagcctgcatccatccatcccgtgtcccaggggtcacggggcccagaaggcagccttggttctgctgagtgcctgcctggtgaccctttgggggctaggagagccaccagagcacactctccggtacctggtgctccacctagcctccctgcagctgggactgctgttaaacggggtctgcagcctggctgaggagctgcaccacatccactccaggtgactcactgcagtacccagggacggggtatccaacgtgtgtcactcccttgatgcctagccctgcccctccttgaacctctctggctgagctgggctgggggctggggtctggggtctggctgtcactcacaggtaccggggcagctactggaggactgtgcgggcctgcctgggctgccccctccgccgtgtgggccctgttgctgctgtccatctatttctacttactccctcccaaatgcggtcggcccgcccttcacttggatgcttgccctcctgggcctctcgcaggcactgaacatcctcctgggcctcaagggcctggccccagctgagatctctgcagtgtgttgaaaccagggaatttcaacgtggcccatggggcttggccatggtcatattacatcggatatctgcggtgatcctgccagcctggagtacagtggtgacaagnnnnnnnnnnnnnnnnnnnnnnnnnnnnnnnnnnnnnnnnnnnnnnnnntgacctctttgaatagctaggattaccggagctccaggccggattccgaatttacaatcagcattacaacaaacctgg

SEQ ID NO: 15638 - DNA, 1344 bp, Homo Sapiens
  misc_feature (1283)..(1283): n is a, c, g, or t
ggctgcactcagagaagctgccctggctgctcgtagcgccgggccttctctcctcgtcatcatccagagcagccagtgtccgggaggcagaagatgccccactccagcctgcatccatccatcccgtgtcccagggtcacggggcccagaaggcagccttggttctgctgagtgcctgcctggtgaccctttgggggctaggagagccaccagagcacactctccggtacctggtgctccacctagcctccctgcagctgggactgctgttaaacggggtctgcagcctggctgaggagctgcgccacatccactccaggcctggccccagctgagatctctgcagtgtgtgaaaaagggaatttcaacgtggcccatgggctggcatggtcatattacatcggatatctgcggctgatcctgccagagctccaggcccggattcgaacttacaatcagcattacaacaacctgctacggggtgcagtgagccagcggctgtactattctcctcccattggactgtggggtgcctgataacctgagtatggctgaccccaacattcgcttcctggataaactgccccagcagaccggtgaccatgctggcatcaaggatcgggtttacagcaacagcatctatgagcttctggagaacgggcagcgggcgggcacctgtgtcctggagtacgccacccccttgcagactttgtttgccatgtcacaatacagtcaagctggctttagccgggaggataggcttgagcaggccaaactcttctgccggacacttgaggacatcctggcagatgcccctgagtctcagaacaactgccgcctcattgcctaccaggaacctgcagatgacagcagcttctcgctgtcccaggaggttctccggcaccttgcggcaggaggaaaaaggaagaggttactgtgggcagcttgaagacctcagcggtgcccagtacctccacgatgtcccaagagcctgagctcctcatcagtggaatggaaaagcccctccctctccgcacggatttctcttgagacccagggtcaccaggccagagcctccagtggtctccaagcctctggactgggggctctcttcagtggctgaatgtccagcagagctatttccttccacagggggccttgcagggaagggtccaggacttgacatcttaagatgcgtcttgtcccttgggccagtcatttcccctctctgagcctcggtgtcttcaacctgtgaaatgggatcataatcactgccttacctnccgcacggttgttgtgaggactgagtgtgtggaagtttttcataaactttggatgctagtg

SEQ ID NO: 15639 - DNA, 821 bp, Homo Sapiens
aactgactgttaccgttcgcctccagccctaacctgcccagccagctcctgaagaatgcaagtcttgtacgagttagaatgctagagaacccacgggaactgactagtaggtccaggcagagaagctggaggttctggaccacagcaagcggtggtggctggtgaagaatgaggcgggacggagcggctacattccaagcaacatcctggagcccctacagccggggacccctgggacccagggccagtccccctctcgggtactacccagcctggactatccagagccctaagtcttgagttaggaggtcggggtggggaggattcagtggcaagcagaggaaatagtcttggatagattcggaccgtattattgcatgcttagtgtgccaactttatcatggggcccagagcagagaacaagaccagctccctgccagaccagaaagccacagagtaagagaagtgatttgatgggaacctggagaagggacccagattttaggggctgtggttggctgtgagatgagatggactctgatccctggctccccctgattctaggttccaatgcttcgacttagctcgaggcctgaagaggtcacagactggctgcaggcagagaacttctccactgccacggtgaggacacttgggtccctgacggggagccagctacttcgcataagacctggggagctacagatgctatgtccacaggaggccccacgaatcctgtcccggctggaggctgtcagaaggatgtctggggataagcccttaggcaccagcttagacacctccaagacccggtcccgaca

SEQ ID NO: 15640 - DNA, 1045 bp, Homo Sapiens
tgatcaagcttcggcaactggtttggaaaaggaaggagaggtttgattatgggggtctggaactcccacacctccgtgggcaacatcttggggtcattgatcgctggctactgggtgtccacatgctggggcctgtccttcgtcgtgcctggagccatcgtggcagccatggggatagtgtgctttctcttcctcattgaacatccgaacgacgtcaggtgctcctccaccctggtgacgcactcaaaaggctatgagaatggtacaaacagattgagactccagaagcaaatcttgaagagcggaaagaacaagcctcatggacccagagatgcagtgcctgctgctctcagatgggaagggctccatccacccgaaccacgtcgtcattctccccggggacggtgggagtggcacggccgccatcagcttcacaggggccttgaaaattccaggcgtgatagagttctcactgtgtctgctgtttgccaagctggtcagctatactttcctattctggctgcccctgtacatcacgaatgtggatcaccttgatgccaaaaaggcgggggagctctccgccctgtttgacgtgggcggaatctttggtgggatcctggcaggtgtgatctcagaccgactggagaaaagggcctccacctgcggcctgatgctgctgctcgcggcccccacgctccacatcttctccaccatcagcaagatggggcttgaggccaccatcgccatgctgctgctcagcggagccctggtcagtgggccctacacactcatcaccaccgccgtctccgccgacctggggactcataaaagtctgaaaggcaacgcgcacgccctctccaccgtgacggccatcattgacgggacgggctctgtaggagcagccctgggccccctgctggctgggctcctctccccgtccggctggagcaatgtgttttacatgctgatgtttgcagatgcctgtgccttaatgttcctgatccggctcatacacaaggagctgagctgcccaggtcagctaggg

SEQ ID NO: 15641 - DNA, 792 bp, Homo Sapiens
tacctcagcatcggctaacggcactctacgatgtgtccgtgaccctcagagatcctttgccctgggaatccagtggattgtagttagaatactagggggcatcccggggcccatcgccttcggctgggtgatcgacaaggcctgtctgctgtggcaggaccagtgtggccagcagggctcctgcttggtgtaccagaattcggccatgagccgctacatactcatcatggggctcctgtacaaggtgctgggcgtcctcttctttgccatagcctgcttcttatacaagcccctgtcggagtcttcagatggcctggaaacttgtctgcccagccagtcctcagcccctgacagtgccacagatagccagctccagagcagcgtctgaccaccgcccgcgcccacccggccacggcgggcactcagcatttcctgatgacagaacagtgccgttgggtgatgcaatcacacgggaacttctatttgacctgcaaccttctacttaacctgtggtttaaagtcggctgtgacctcctgtccccagagctgtacggccctgcagtgggtgggaggaacttgcataaatatatatttatggacacacagtttgcatcagaacgtgtttatagaatgtgttttatacccgatcgtgtgtggtgtgcgtgaggacaaactccgcaggggctgtgaatcccactgggagggcggcgggcctgcagcccgaggaaggcttgtgtgtcctcagttaaaactgtgcatatcgaaatatattttgttatttaagcctgcaaa

SEQ ID NO: 15642 - DNA, 701 bp, Homo Sapiens
tttcctctggttttggccatgccactgcagggaaatgcacttcaacttgtcagagaaagcccctccttctggttttcatattcgttgtaattttctttacattcctcagcagcattcctgcactaacggcaactctacgatgtgtccgtgaccctcagagatcctttgccctgggaatccagtggattgtagttagaatactagggggcatcccggggcccatcgccttcggctgggtgatcgacaaggcctgtctgctgtggcaggaccagtgtggccagcagggctcctgcttggtgtaccagaaattcggccatgagccgctacatactcatcatggggctcctgtacaaggaagaagagaatgaatttagaaggctgtaaacccccatctgagccttacacatagatctccttgaattggattttcaccaaggccgtgatggatgtggagtctcggctttctgacaacgtcttccagagcaggctttctctagagggtggactgcctgtgttctcctgggagagaatgcatttgcttccgatgcccagggcacgaaagaggtggacgaaacaacggaagtggagggggtggattctctacctgggaaacccagcatggcacactcatatagaattaagatcttataataagtgtgcagatgcgcccgttctaaggaaataaagggttctgccctccc

SEQ ID NO: 15643 - DNA, 502 bp, Homo Sapiens
ttgttctcttttttctggtgtggcagagttatttccacatccagagaccgcatttttacaggggaaaagtactgaattagccactttctccatagccaagttgcgaatggatcccaaagggccccggcaagttggacaacatgtgagctttgggcgacagttgctacaaacaagatggccactctgacattgaagaatgggcggtaacacatagtcaaagcagactggacactcaaaaagactcgccaagtcattgttggatgcagttgtgccagtcagggcaggcaccctctgggatggtggacacttcgaggtaccggtaggtaatgctgtagcagtctgacggctcatttctgaaataaatacataaggaggcaggagaaaaataattataaccatgacttactttataaataatgtttacatgccataagtccttttaaagtttcatacaaaatttactgagcaaaagaggaagaaaaataggattaaaacagatatt

SEQ ID NO: 15644 - DNA, 1182 bp, Homo Sapiens
tctctgtgtataccttcatgtgtctagcttccacctaccgaaagagtttaggttggcagacaggtgggtgcttatttatctgtgaaactgaagttttaaacactggcagaaaatgtttgattgccatttccacacatggaaatagttacattgatgcctaatttgccattttctgcaaaaagctgtgccatgctggtgtcaaagactagacagtcgctattcataatggctatcgcaattccttcatgaatagatcgaggagtcgcttcccaaggtcaatcgtcgcctatgaccatttagctcaagtcggtaagcaaaatattcagcttgcttgcgtgttcctatcaactgtacgattgcgaaagaactgctggtgaccatcgtattttgtccgggtttctctaagactaacatgaagtgaaagccaaacaggactgcatcatcacccagtcaacagcaccaggaagattaatgtctgtagcaagaaaaactatatcctctccctgtagggttgtaatggacttatgctgatgcatcagatggggcattaacagcatccagagagccttgccatttacaaggaagcaccagggcaacggacaggaataaggcctaaactcaacagagcttcttcatggtctgctttttctgtgtgtggcagagttatttcacatccagaagacgcatatttacaggggaaaagtactgaattagccactttcctccataacccaagttgcgaatggatccccaaagggccccggcaagttggacaacatgtgagctttgggcgacagttgctacaaacaagatggccactctgacattgaagaatgggcggtaacacatagtcaaaagcagactggacactcaaaaagactcgccaagtcattgcttggatgcagttgtcgccagtcagggcaggcaccctctgggatggtggacacttcgaggtaccggtaggtaatgctgtagcactctgacggctcatttctgtgggcggagagcgcgcctcaggaccccggtcctggcaccaacgcgctccgtcgccaacccccgccaccgcgggcagcgccaccgcctcttcccggcgccgagaccgacgggacacctgggccgccgccgcctctcgagagcgcgccccgcaacgccgccccggctcccacactggccgccgccgcc

SEQ ID NO: 15645 - DNA, 503 bp, Homo Sapiens
agccattcagaggtggggtctggggcctgggggttttgtgtcgtgacactttgtctcaaggagattccacatagggatttgaattaggctttctgcttgccaaggcctgtggcatctgagcctggctgagggccgggcaagcctcccctgagcctttggaagccgagttcactctctgcctgcccaggggagcaccggcttggttctgggggctcctctaacatctcaggtttttatcttgtcttaaatttctttctaggaaaaaacccttccctgccaaaggtgactgtgttttctgccgccgaaggagggcccggtccctccaggctcagtgtggcttctccctgacccctgccctagaacttttgccagtgccttttctgaaactcctgtgtcccgggccccccaggcggagaaggatatgccggattctgcctggggctgggctctaggagaccccaaatttgacaccacagaaagcaaataaaacacttgaaatacgc

SEQ ID NO: 15646 - DNA, 778 bp, Homo Sapiens
agggctggtacaactgccgcttttgccccggctccagtgctgcgtggaggacgggcctgaaagcattgactccatcatcgacatggatgctgtgtgcaacgcgagtcaccacgtttgggcctggatgtgtcggtgaccatctcgcaggatgccggcagatatctctgcgactttacctactacacctctttgtaccagagtcacggtcgatcagccttcgtccacgtgcccccactggggaagccgtacaacgcggaccagctgggcagggcactgagagccatcattgaggagatgttggacctcccggagcagtcagagggcaaaatcaactattgccacaaacactgagggacgctcaggtctcctaagacctcatcctgctggggaccccacgaggggacatccaccctctggggtgtggccaggaaaagacaagctcttcagcttggggatccgatctggaagagagattctgatctgcccacctcctcttcctccttctctacaaaagctccggttgattcgaggaaaaaacccttccctgccaaaggtgactgtgttttctgccgccgaaggagggcccggtccctccaggctcagtgtggcttctccctgacccccgccctagaacttttgccagtgccttttctgaaactcctgtgtcccgggccccccaggcggagaaggatatgccggattctgcctggggctgggctctaggagaccccaaatttgacaccacagaaagcaaataaaacacttgaaatacgcatac

SEQ ID NO: 15647 - DNA, 1459 bp, Homo Sapiens
  misc_feature (914)..(968): n is a, c, g, or t
ctttcgagttgccacactggtcaatgaggctgacaagctccgggcagccctggcctgcagcaaagagtcgtggatcctgaacaggtacctgagctacaccctgaacccggacttaatccggaagcaggacgccacctctaccatcatcagcattaccaacaacgtcattgggcaaggtctggtctgggactttgtccagagcaactggaagaagctttttaacgattatggtggtggctcgttctccttctccaacctcatccaggcagtgacacgacgattctccaccgagtatgagctgcagcagctggagcagttcaagaaggacaacgaggaaacaggcttcggctcaggcacccgggccctggagcaagccctggagaagacgaaagccaacatcaagtgggtgaaggagaacaaggaggtggtgctccagtggttcacagaaaacagcaaatagtccccagcccttgaagtcacccggcccccatgcaaggtgcccacatgtgtccatcccagcggctggtgcagggcctccattcctggagcccgaggcaccagtgtcctcccctcaaggacaaagtctccagcccacgttctctctgcctgtgagccagtctagttcctgatgacccaggctgcctgagcacctcccagcccctgcccctcatgccaaccccgccctaggcctggcatggcacctgtcgcccagtgccctggggctgatctcagggaagcccagctccagggccagatgagcagaagctctcgatggacaatgaacggccttgctgggggccgccctgtaccctctttcacctttccctaaagaccctaaatctgaggaatcaacagggcagcagatctgtatatttttttctaagagaaaatgtaaataaaggatttctagatgnnnnnnnnnnnnnnnnnnnnnnnnnnnnnnnnnnnnnnnnnnnnnnnnnnnnnnnggggggggcgcgcgcgctaaaagaatacccccccgcgggggcggcgcccacaaggtttcgccgcacgcacacccacggtgttttgtgtggcaaacacgggcggcgccaccaataagggggcgcggcacgaaaattataaacacaaagaagcgacgggcgcgcgcgggttaaacaacaccggttcggcagctgggggaaaaaccggcgcggcagcgcgggggcgcaccactggggaggagagagggcgacaccccttatacgccccgagcgggggcggggcgcacaccctgtggcgggcacaacaaacattccccctacagaggagaagatattaaaagacgcgcttacgagggcggacagcatatatcaaaaattttagaaaggagggtaaataagtggggggtgtagaaaaatgagggggggataaaatatgctctagggagttgtggagaaaaatttggtggctacacaggcgagattatggattgtag

SEQ ID NO: 15648 - DNA, 481 bp, Homo Sapiens
acgtgggtgctgactatgcggagcccacctggaacttgaaagacctcatggtgctgaatgatgtgtaccgcgtgatggcagtggatgcactggcctcctcccacccgctgtccacacccgcctcggagatcaacacgccggcccagatcagtgagctgtttgacgccatctcctacagcaagggcgcctcagtcctcaggatgctctccagcttcctgtccgaggacgtattcaagcagggcctggcgtcctacctccacacctttgcctaccagaacaccatctacctgaacctgtgggaccacctgcaggaggctgtgaacaaccggtccatccaactccccaccaccgtgcgggacatcatgaaccgctggaccctctttcacctttccctaaagaccctaaatctgaggaatcaacagggcagcagatctgtatatttttttctaagagaaaatgtaaataaaggatttctagatga

SEQ ID NO: 15649 - DNA, 849 bp, Homo Sapiens
  misc_feature (524)..(573): n is a, c, g, or t
caagaggtctcagctgatcctagaaggtcctggccctctgagattttgcttttgggcaatccaaaggacatgtagagaagtcaagctggtacatggtattgaaacacttcagggccctcaggttgtcccctggacctgcgggtaggaaaccgggagagtgggttcagcactactgctcactcccctaaagatcaaagaggatgccgctcctttgcataatgaaaatgaagtctttgtactttgatttggaggggccgattttagggcaaagtgtctcatctaaacagcctccctcaacctatgggagtgatcactcagtacccctgggaacatttatttatgttccccaaacccagagaaacagagtccaggacgagaattgagttgaaatattttcatcccaccccaccccagccaaagttgggggtggtgggagaaggtgctcatcacctcaaagagctgagggagagggctttatagcttagaggaaattggaagcctggacaatgtctcagcaccctccnnnnnnnnnnnnnnnnnnnnnnnnnnnnnnnnnnnnnnnnnnnnnnnnnngcaaatatccctcctgaggttacctatcaagaattttactcccgaactgaacacaacttaggaaacattttcctgggagctggaatgtgttagcttgtcccttttgtccaacaaagcattatatttttaagaatggcagtcctgtttgctgaagtgttcataagataacaataggcttgaatctccaattcaaatgaatgtcaaagcacatatctttaatatgctgaatgaatatttatttttgtatccattaaaacagtatattgatacaaaaaa

SEQ ID NO: 15650 - DNA, 427 bp, Homo Sapiens
ggtgttagggtttgggagacagctcatccaatctcccaagtctcatggtggatttgtgactgtgagagtttccggtttaaaatctgaaaagccagatatgcctgtttccttttcccagcaccatgcctgtggaggggacagtcagacccagaggtcctttacgtgtggatggagttcacaggcgaatagaggagaggaccaggggacgtggcttgtcccttttgtccaacaaagcattatatttttaagaatggcagacctgtttgctgaagtgttcataagataacaataggcttgaatctccaattcaaatgaatgtcaaagcacatatctttaatatgctgaatgaatatttatttttgtatccattaaaacagtatattgatctcttttattctttattaaaataaaatgctcttttttaaaa

SEQ ID NO: 15651 - DNA, 818 bp, Homo Sapiens
  misc_feature (738)..(771): n is a, c, g, or t
gggggagcgggccaaggggcggctccggcgggcggactcggagcgggcggcggagtgacccggacagctgtcctctctgacaccaccccggcctgcctctttgttgccatgagagctgcctacctcttcctgctattcctgcctgcaggcttgctggctcagggccagtatgacctggacccgctgccgccgttccctgaccacgtccagtacacccactatagcgaccagatcgacaacccagactactatgattatcaagaggtgactcctcggccctccgaggaacagttccagttccagtcccagcagcaagtccaacaggaagtcatcccagccccaaccccagaaccaggaaatgcagagctggagcccacagagcctgggcctcttgactgccgtgaggaacagtacccgtgcacccgcctctactccatacacaggccttgcaaacagtgtctcaacgaggtctggcttctacagcctccgccgtgtgtacgtcattaacaaggagatctgtgttcgtacagtgtgtgcccatgaggagctcctcccagctgacctctgtcgggacaagttcttccaatgtggggtgatgggcagcagcggccttgggcaaatcctggggggcctcctgtgccagaagttgtggaaactgctagggtgggggctggcatcctgaggcctgggccctcctggaatttgggggccttcgggccctggcctggactggggggnnnnnnnnnnnnnnnnnnnnnnnnnnnnnnnnnnctggtaaaaaagtttagtggaacgggccaccccctgggggggttgca

SEQ ID NO: 15652 - DNA, 588 bp, Homo Sapiens
cgtgtgtacgtcattaccaaggagatctgtgttcgtacagtgtgtgcccataaggagctcttccaagctgacttctgtcgggacaagttctccaaatgtggcgtgatggccagcagcggcctgtgccaatccgtggcggcctcctgtgccaggagctgtgggagctgctagggtggtgctggcatcctgagtcctggccctcctgggatctggggccctcgggccctgcctgacctggtgcttttttccccatccccatgttccttttattctgtaaaaagttagtggactgcagccctgggggttgcaggctgcggtgcctcaggcccctccttcagcctgtggccacctctggggcacaatgggggctccccactgcccagtctgcccctcgggttgggggagtatcccaggcctctctgtgggacctgggcccctgacgggccttctcagcccgttttgaggacagacagtcccccgaggtaggctacatccccccaccccagctggtctgcttggatttcctacagcccccgtgggcatggaccacctttattttatacaaaattaaaaacaagttttaaaaaa

SEQ ID NO: 15653 - DNA, 794 bp, Homo Sapiens
cgtcctggtcttcttgttgatgctcttcaatctcatcgtcctcagggggtgcgaatccttcctctgtggcatagaggatgccaatgatgcctgagataacagggctgttttcactttcatgctcctggcagatgagctcgatgtcacgaagtttgctgaagtagaagtcacgttccttctccagcccatccactgtcagcttcaagtccaccagctgttggttgagttcaagaatttgggcatcagtctcatggccgccatttcgggctgatggaggattcttccggagaatgcaggggggggccacattgctcagccggccagaggtctgcatgttttttgggcctgtgggggacgtcctctgtggaactgggttaggaggtggcgctacgtcctggccctgccgcgccagcagagggttgtaatcctttccatcatagtttgcgtcaaagaatttcttaaaccactgaataaactcaaaattatcttggaattttcctttcactaatttctctacaggaatgattttgtcaacacccatcttcgtgaaagctgcttcgcagcacgcttgaagttgtggatgtattcatgctctagtatggcctcggaactacactttcctaaagtgcacacagccggggaagagcatgtccatgaactggcagtaggcatgccctctgaacgaaagactgttctatcttcggtatagattgaggtgcagggactcgttcgacccatgcaagcatatcatggcgactcagattttcaactggtcacagatgtggagtacacac

SEQ ID NO: 15654 - DNA, 492 bp, Homo Sapiens
  misc_feature (452)..(452): n is a, c, g, or t
cgtcctggtcttcttgttgatgctcttcaatctcatcgtcctcagggggtgcgaatccttcctctgtggcatagaggatgccaatgatgcctgagataacagggctgttttcactttcatgctcctggcagatgagctcgatgtcacgaagtttgctgaagtagaagtcacgttccttctccagcccatccactgtcagcttcaagtccaccagctgttggttgagttcaagaatttgggcatcagtctcatggccgccatttcgggctgatggaggattcttccggagaatgcaggggggggccacattgctcagccggccagaggtctgcatgttttttgggcctgtgggggacgtcctctgtggaactgcccagaggaaaagagtcaggtaagtcaacgtgagcccacagcgcacgtggcaggagacagcctggtgtgaggactgcggnggcaggcccatgcgacaggcaggcactctcacccccctgc

SEQ ID NO: 15655 - DNA, 542 bp, Homo Sapiens
gtcaaatagaagggactacttctggaagagaggtcaccagctcccccccctttgatgaacacaagtgtcgggctgagggaggtaaaattatgaaaattccaggcacctgctgtgacacatgtgaggagcctgagtgcaacgacatcactgccaggctgcagtatgtcaaggtgggaagctgtaagtctgaagtagaggtggatatccactactgccagggcaaatgtgccagcaaagccatgtactccattgacatcaacgatgtgcaggaccagtgctcctgctgctctccgacacggacggagcccatgcaggtggccctgcactgcaccaatggctctgttgtgtaccatgaggttctcaatgccatggagtgcaaatgctcccccaggaagtgcagcaagtgaggctgctgcagctgcatgggtgcctgctgctgcctgccttggcctgatggccaggccagagtgctgccagtcctctgcatgttctgctcttgtgcccttctgagcccacaataaaggctgagctcttatcttgca

SEQ ID NO: 15656 - DNA, 836 bp, Homo Sapiens
ccaccctttgatgaacacaagtgtctggctgagggaggtaaaattatgaaagttccaggcacctgctgtgacacatgtgaggagcctgagtgcaacgacatcactgccaggctgcgatgtgtgcacctgcaccgacatggaggatgccgtgatgggcctccgcgtggcccagtgctcccagaagccctgtgaggacagctgtcggtcgggcttcacttacgttctgcatgaaggcgagtgctgtggaaggtgcctgccatctgcctgtaaggtggtgactggctcaccgcggggggactcccagtcttcctggaagagtgtcggctcccagtgggcctccccggagaacccctgcctcatcaatgagtgtgtccgagtgaaggaggaggtctttatacaacaaaggaacgtctcctgcccccagctggaggtccctgtctgcccctcgggctttcagctgagctgtaagacctcagcgtgctgcccaagctgtcgctgtgagcgcatggaggcctgcatgctcaatggcactgtcattgggcccgggaagactgtgatgatcgatgtgtgcacgacctgccgctgcatggtgcaggtgggggtcatctctggattcaagctggagtgcaggaagaccacctgcaacccctgccccctgggttacaaggaagaaaataacacaggtgaatgttgtgggagatgtttgcctacggcttgcaccattcagctaagaggaggacagatcatgacactgaagcgtgatgagacgctccaggatggctgtgatactcacttctgcaaggtcaatgagagaggagagtacttctgtggacaga

SEQ ID NO: 15657 - DNA, 671 bp, Homo Sapiens
gcctgggttctggacctgccgctacccacaggaatctgggtgttggaactcaaagggtgtaggcagctggctcaagaggctgaggcctggctgaattacccatgcttttagaattgggatgggtccccagtgagctcctggattctgctggctgaaagcaacagtgcagacgatgagaccgacgatcccaggaggtatcagaaatatggttacattggaacacatgagtaccctcatttctctcatagacccagcacactccaggcagcatccaccccacaggcagaagaggactggacctgcaccatcctctgaatgccagtgcatcttgggggaaagggctccagtgttatctggaccagttccttcattttcaggtgggactcttgatccagagaggacaaagctcctcagtgagctggtgtataatccaggacagaacccaggtctcctgactcctggccttctatgccctctatcctatcatagataacattctccacagcctcacttcattccacctattctctgaaaatattccctgagagagaacagagagatttagataagagaatgaaattccagccttgactttcttctgtgcacctgatgggagggtaatgtctaatgtattatcaataacaataaaaataaagcaaataccaaaaaaa

SEQ ID NO: 15658 - DNA, 594 bp, Homo Sapiens
gagctccgacggtctatgctgggagcgagggagcatgaaaacacatttcaacacagcccagggatttcggacggtcttggaattagtcataaactaccagcaactctgcatctactggacaaagtattatgactttaaaaaccccattattgaaaagtacctgagaaggcagctcacgaaacccaggcctgtgatcctggacccggcggaccctacaggaaacttgggtggtggagacccaaagggttggaggcagctggcacaagaggctgaggcctggctgaattacccatgctttaagaattgggatgggtccccagtgagctcctggattctgctggtgagacctcctgcttcctccctgccattcatccctgcccctctccatgaagcttgagacatatagctggagaccattctttccaaagaacttacctcttgccaaaggccatttatattcatatagtgacaggctgtgctccatattttacagtcattttggtcacaatcgagggtttctggaattttcacatcccttgtccagaattcattcccctaagagtaataataaataatctctaacaccaaaaaaaa

SEQ ID NO: 15659 - DNA, 790 bp, Homo Sapiens
ggggccgtaaagcagctcggccgagcagactgctgcggttcctgggtggcggcggcatggaggcgcgcttcacgcgcgggaagtcggcgctgctggagcgcgcgctggcgcggccgcgcaccgaggtgagcctgagcgccttcgcactgctgttctccgagctggtacagcactgccagagccgcgtcttctccgtggccgagctgcagtcgcgcctggccgcgctgggccgccaggtgggcgcgcgcgtgctggatgcgctggtggcgcgcgaaaagggtgcccggcgtgagaccaaggtgctaggcgcgttgctcttcgtcaagggcgccgtgtggaaggcgctcttcggcaaggaggcggacaagctggagcaggccaacgatgacgcgcgcaccttctacatcatcgagcgcgagccgctcatcaacacctacatctccgtgcccaaggagaacagcacgctcaactgcgccagcttcacggcgggcatcgtggaggcggtgctcacacacagcggcttccctgccaaggtcacggcgcactggcacaagggcaccacgctcatgatcaagttcgaggaggcagtcatcgctcgagaccgggccctggagggccgctgaacctgccggagataaaggatacagagagccccccttccaaaaggaaataaacagaaataaaacccttgtcgggccgccctccggcccctccaaaagcttttctaaaaccatttcgctttggcggcccgggggccccgcaaggggaaaggggaaacctgcgtcctaag

SEQ ID NO: 15660 - DNA, 468 bp, Homo Sapiens
  misc_feature (207)..(207): n is a, c, g, or t
  misc_feature (209)..(209): n is a, c, g, or t
  misc_feature (244)..(244): n is a, c, g, or t
ttgctgaaaacacaattctgagtttaatgttttctggaaagagctgggggagcttaagcagcgagtgtggcgctctgcttccgggcacgcccacagcaactcggcttcagagtctgacccgcagaagttctttaaagagagggaaacagagcaggggaaaaggtcttccggaggacggcagtgcagaagaggagggtgggggctttntntcttatgcctctttctccctccaccccgccctctntgactctctcaccttctcatcatcgaacgccagccgctcatcaaacctacatctccgtgcccaaagagaacagcacgctcaactgcgccagcttcacagcgggcatcggggaggcggtgctcacacacagcagattccctgccaaggtcacggaccactggcacaaaggcgccacgctcatgatcaagttcgaagatgcagtcatccatctagaccgtgccctg

SEQ ID NO: 15661 - DNA, 620 bp, Homo Sapiens
cattttcctgtgcagcggcctgcaaaagggccatccaacctctatgccatggtggtggttctctcgaggtgaggaggcaggcagggaatgcctgagccgcaggggcctgggcctggaatcccagccggcccagatttattttcatctcctgctccatgccagggcctcaagatccctgagtgagggccaccccacggcccagcatgagaaaatgctctgtgacacctggtgtatcgaggtgagactcggggctgccaagctcaggtgagggctggaggtgcaggcccaacccctccttccctctccccaggctgcagctcggatccgagaaggcatggccgccctgcagtctgacccctggcagcaagagctctaccgcaacttcaaaagcatctccaaggccttggtggagcggggtggtgtggtcaccagcaacccacttggcttctgaatactccccgccagggcctgtcccagttatgtgccttccctcaagccaaagccgaagcccctttccttaaggccctggtttgtcccgaaggggcctagtgttcccagcactgtgcctgctctcaagagcacttactgcctcgcaaataataaaaatttctagccagtca

SEQ ID NO: 15662 - DNA, 650 bp, Homo Sapiens
atagcttaaccacacacatgatgattacctggtgtttgtctccccacagtcccaaatgcagcacgctggctaatattggaagaaccaacatctataagaataaaaaagattattatgatatgtatgagccagaaggagtgaaaattttcagatgtccatctcctatctactttgcaaaccttggtttctttaggcggaaacttatcgatgctgtaaggtttggggttatttaatttttttccttgtaatcttactgaattctgggaatgtcattgttctgtaaggtcattgttgagactgggttgtgtcacatatgttgaggtggggttgtgtcagtattttttgtcccacgtcccagaacacgatgaaactaccttatggggagtttgttaataggttgggaaataagcctcttcagatgacatctaatatagaagaatccttttctcaaattctgatgtagagtaaaagaaatttaccaagttttgggctgctagcttttagtagatgtcatcctacagattttctttgggcatcaacttcagaaacaatgaaggagcactttaatatttgaccacatcctctaagagattcagtataaccgttgtaaatgaatagttaatactgaataacatacatactgaggctcc

SEQ ID NO: 15663 - DNA, 806 bp, Homo Sapiens
aggagccccacaatgaacatgcagccccctgtctccctcaagcagtatgagtgcaaccccgttggtgctctgcatagtctgaggctcctgcgtggggaccagcgtgggtgtgagaagccttttatcactcagcctcatgcaccctgtgtctcccttacaaggagctggtggtgcagaaaggctgccggttgccggagtacacagtgacccaggagttctgggccagcccaccgcaaagaattcacaatgacctgtcgagtggagcgtttcattgagattgggagtggcacttccaaaaaattggcaaagcggaatgcggcggccaaaatgctgcttcgagggcacacggtgcctctggatgcccgggatggcaatgaggtggagcctgatgatgaccacttctccattggtgtgggctcccgcctggatggtcttcgaaaccggggcccaggttgcacctgggattctctacgaaattcagtaggagagaagatcctgtccctccgcagttgctccctgggctccctgggtgccctgggccctgcctgctgccgtgtcctccctgctctttctgcctctgggctcatgtatctgcgcagctctggtaccctctgtgggtgccatctctacctctgacacagactgcctgccttgaagctgagaaggcacagggcaaggagccaaggaccacagagcctcagccagcccaggatccgtcctcattttattggtgatgatgaatgggaatgaaatcagggggctgtctactagagcctggaataaatatgctgctttgtggattttta

SEQ ID NO: 15664 - DNA, 639 bp, Homo Sapiens
ggctcccgcttggatggtcttggaaaacggggcccaggtggcacctggggatctctacgaatttcagtaggagagaagattcctgtccctccgcagttgctccctgggctccctgggtgccctgggccctgcctgctgccgtgtcctcagtgagctctctgaggagcaggcctttcacgtcagctacctggatattgaggagctgagcctgagtggactctgccagtgcctggtggaactgtccacccagccggccactgtgtgtcatggctctgcaaccaccagggaggcagcccgtggtgaggctgcccgccgtgccctgcagtacctcaagatcatggcaggcagcaagtgaagccccagctggactcatggatgtgcaccctttgctccctgctctttctgcctctgggctcatgtatctgcgcagctctggtaccctctgtgggtgccatctctacctctgacacagactgcctgccttgaagctgagaaggcacagggcaaggagccaaggaccacagagcctcagccagcccaggatccgtcctcattttattggtgatgatgaatgggaatgaaatcagggggctgtctactagagcctggaataaatatgctgctttgtggatttttaaa

SEQ ID NO: 15665 - DNA, 577 bp, Homo Sapiens
  misc_feature (35)..(35): n is a, c, g, or t
  misc_feature (40)..(40): n is a, c, g, or t
  misc_feature (87)..(87): n is a, c, g, or t
  misc_feature (92)..(92): n is a, c, g, or t
  misc_feature (123)..(123): n is a, c, g, or t
  misc_feature (137)..(137): n is a, c, g, or t
cctgaaacccagggtcgaagggcgatttttgaaangcccnagggtctgaatgaaggctcttaatcaacactcaacactcgcaatatnctagnaaaccctatacgggctggttgaggccaaggntaacatggctccantgttcacccaaggaagggggcagtggccatccgccgcggcctcacgtgcgttgtaacaagccctcatcacatgtgtgagtcttacgtgcacaaaaagagaaggctttggtactgaaactggacaccttgtgtactcgataccttcacagcttctattggacatattttctttttaggaatgaaggaaaattctcccatttttgagccattcttttgtcaattctacaaaattgcatgtaactttataaatatttttaaaagatatagttttgtaaatatttaatattccgctaatttgattttgaattgtaaatgtcaagtattctgtttttggggtttttatgttttattatactttgttaaaaaggacaaattgtacatttttagaatgtttttatgagtaaatttaatgtactgaaaataaaaattttaaaaaaggc

SEQ ID NO: 15666 - DNA, 415 bp, Homo Sapiens
acgtcgataccagacacatagaatgagtcaggtggcactgaaagccatgggttctgaagaggcgaatttgttgaaaagtcccaagggtctgaatgaaagcatctttaatcaacactcaacactcgcaatattctagaaaaccatatactgtgctggttgaggccaaaggttaacattgctccactgttcaccaaggaagggggcagtggccatccgccgcggcctcacgtgcgttgtaacaagccctcatcacatgtgtgagtcttacgtgcacaaaaagagaaggctttggtactgaaactggacaccttgtgtactcgataccttcacagcttctattggacatattttctttttaggaatgaaggaaaattctcccatttttgagccattctatgttgtcggaccgactgag

SEQ ID NO: 15667 - DNA, 414 bp, Homo Sapiens
cataaacattctcaattttctttatgctagacatataaattatttttcaaactgtatagatttggggtaaaaagttgtctcagttcctctcccaattgcaatgagaaaaaaaagcttaatttttacattatacttaattttctaaaaccatgtaactccattgaacacatttttcaacttaaggtctgcatagcagacttttaataaccttgggatttatctggtagaacaatatgtgttctacatttttttcataattatatattgtgtatgttaaaactattttccagttgttttgtctgtaaaactgtctttatcaatatgcttaatggttctttgtacaattttgaaagtttctacctgtatataatggatgttaaccagtatcaataaatcacttcgtataatcttaaa

SEQ ID NO: 15668 - DNA, 676 bp, Homo Sapiens
ctcatatttggttataggacacaatagcactgggccccttgctgtctatccattgtgcttctaaaggctatcatgagtcagtccatctgtttccctgcattaagaggagattatctgctcaaatctaccagtctcagaaatgcagtggtgctctcaataccctcttggtttggctaggatgaggtcttctgctgctttaccagggcacagggaggtacaatagtgccccctgctgagcagcacccagatgacaaagtgtcacttctgccacatcttgatcagacttctacaaagcaagttagaaaaattcttaggccatcagggtagagtctattaagagtcagaaccctgatcttccttcctaatttctgggggaaaaatcagtgtgcaggttactctattgaacacatttttcaacttaaggtctgcatagcagacttttaataaccttgggatttatctggtagaacaatatgtgttctacatttttttcataattatatattgtgtatgttaaaactattttccagttgttttgtctgtaaaactgtctttatcaatatgcttaatggttctttgtacaattttgaaagtttctacctgtatataatggatgttaaccagtatcaataaatcacttcacctacccagaaatatcagggggatcctcagagcg

SEQ ID NO: 15669 - DNA, 690 bp, Homo Sapiens
  misc_feature (13)..(13): n is a, c, g, or t
  misc_feature (71)..(71): n is a, c, g, or t
cccagcaaaatgnggccactggtataatacaggtagcaaaggtccacatccaggtggtactgacatcaggnaatttccaaaaccagttgctgctgcctaagagtggttgccactgacgaaagcttgaaataacctgtattcacagaaggggtattggcattgctgcatgtcataattgggacctcttgcaacaactcaacaaggaacaaggcagcccacaaatgcaggatacgtgattcatgaaacatagctagcaggctgttctccatatcgtcgcattatttgatcatgcgtaaacttcacaaacgcatcatattgttctgcaagttttgtgttcaatatttcttcatattcttctcgaactttctcttcacgttctttcaacaaacgttcacagatcatcccaacctgccgtagagtaaataagggctgttctttttttaatggtgaggatgctgcagatgaagtccctggtgaagctggtccactgaggagaaatgcatgtggctgtgcatcagaagtacaacacggatctgtctgttggaaactcgtttctaaatgtcttctcttctgcattcgtttatactcttgttttatgttgtacagaatttgttctgcagtgaggcgggaggagacgtcgccgaagggggatggctccattcggagatacttctgcggcgaggcggccgc

SEQ ID NO: 15670 - DNA, 854 bp, Homo Sapiens
gtactatacggtcctaggtagcgaggctgggtggcgaattcggcacgaggccgcgctcgagcctcgcccgcaccgagccggggacccgggccgtaccggggaggggccgctccgggccgcagcgcgagggcagcgaggggcggcggggacctggcaccgggcggggccggcggagcgaccatgatcgcttgttcaacaagctgctggactggttcaaggccctattctggaaggaggagatggagctcacgctggtcgggcttcagtactcgggcaagaccaccttcgtcaacgtgatcgcgtcaggacagttcaacgaggacatgatccccaccgtgggtttcaacatgcgcaaaatcaccaaagggaatgtgactatcaagctctgggacattgggggacagccgcgtttccgcagcatgtgggagcgctactgccgaggagtgagcgccatcgtgtacatggtggatgctgctgaccaggagaagattgaggcctctaagaacgagctccacaacctactggacaaacctcagctgcagggcatcccggtcttagtcctgggtaacaagcgagaccttccgggagcattggatgagaaggagctgattgagaaaatgaatctgtctgccatccaggaccgagagatctgctgctactccatctcttgcaaagaaaaggacaacattgacatcaccctacagtggcttattcaacactcgaagtcacggagaagctgagactccagcccttctccctcagaccagggaccgtcatcatctaaacctgaagccgagctccccgcccacacctgtcgtcctggcctgagatgggatcctctagatcacctccca

SEQ ID NO: 15671 - DNA, 799 bp, Homo Sapiens
  misc_feature (48)..(48): n is a, c, g, or t
  misc_feature (469)..(524): n is a, c, g, or t
  misc_feature (730)..(730): n is a, c, g, or t
tgcggctccctgaggacggggctgtgtctccctcagactggggctccntgaagaaagggctgcttctccctcagactggagctccctgaagatggggctgtgtccccctcagactggggctgcctgaggatgaggctgcatctcccctcagactggagctccctgagggcagggctgtctccccccttcagactggggcctcccccaaaggacagggactgtgtctcccctgggactaggttctttgtgtcttctgcatcagacagattcccatgaggacagggctgtctccccctccatctggagctccctgaaggcaatggcctctcccctcaaatgggacatttgcaccccaccccaccctctggctccccatggcgcccaggcattcctcccaggacaccatttgtcacgctttgatgaatgaaacttactaagaataactcagtccttgtagactctaaaggannnnnnnnnnnnnnnnnnnnnnnnnnnnnnnnnnnnnnnnnnnnnnnnnnnnnnnncacaatccatttattcaatagcatttcctgagtccccagctgggcactgggggagacacagtgagtgccacagagccccctactgtgccatttctgccactgactgccagggcagactctgagacagaaagttcaggttcctgcttcagagcctccccaccccagcagtcattacctcagggccacccagccccctccatgccagncatgagctccctctgcccctcccttcagtggaggggagactttgaaatcaggtgcttggggtgggggcg

SEQ ID NO: 15672 - DNA, 424 bp, Homo Sapiens
tgatgccactggcagaagcaggcgccctggcccaaggaggaggcccttcagcaacggagtgggcctgcattctgcggaggaagacccccaggcacaagcagcccaccttactgatggtcagagcaattctttcctgaggtccagggtgttgcaaactcatggccttgggccacgttttaccttcagtgaggttttgtttggcttgcaatgagtacatgggttttaggttgaatgtgagagtctgcagacaatgtgggttctccgactgccctcccagtgaaggtggacctctgatttagaccggcccgctgggcccgtgcctacatccttttcctcagcgtcaggatcttagtccccatggcgcccaggcattcctcccaggacaccatttgtcacgctttcatgaatgaaacttactaagaat

SEQ ID NO: 15673 - DNA, 679 bp, Homo Sapiens
gacgacatggacaacaacagcagaaaagcccaggttgcctagcagccgggcgtcccgctgggtatcaaagaagagaaagccccccacgggcacgccgccaaaacaccaaatctggccaatcaaacagggcaacagagacttggaaagtgcccagagcttaaaccgaatggagtacatcgtatagcagaccgcgggcactgccgccgctaggtagagtatgagggcttgtagttctttaaactgtcgtgtcatactcgagtctgaggccggtgctgacttagaatccctgtgttaatttaagttttgacaagctggcttaccctggcaatggtagtttctgtggttggctgggaaatcgagtgccgcatctcccagctatgcaaaaagctagtcaacagtaccctggttgtgtgtccccttccaaccgacacggtttcggatcaggctcccaggagcctgcccagccccctggtctttgagctcccacttctgcctgacaaagggatggaggaaaaactgaaaggcttttcaaccccaaaactcatttggagttttcaaaaacctggggctgctgtgaagctggaactgcgggagccccatctaggggagccttgattcccttgttattcaacagcaagtgtgaattctgcttgaataaacccccctggattaatggccc

SEQ ID NO: 15674 - DNA, 824 bp, Homo Sapiens
gattcccccaccgtcggttgtactgctgcagtagcagatcgggaacaagttgagctatgacttaacatagccaaaatgtgagtgtgttgaatatgattaaaaatatcaaattaattgtgtgaacttggaagcacaccaatctgactttgtaaattctgatttcttttcaccattcgtacataatactgaaccacttgtagatttgatttttttactaatctactgcatttagggagtattctaataagctagttgaatacttgaaccataaaatgtccagtaagatcactgtttagatttgccatagagtacactgcctgccttaagtgaggaaatcaaagtgctattacgaagttcaagatcaaaaaggcttataaaacagagtaatcttgttggttcaccattgagaccgtgaagatactttgtattgtcctattagtgttatatgaacatacaaatgcatctttgatgtgttgttcttggcaataaattttgaaaagtaatatttattaaatttttttgtatgaaaacatggaacagtgtggcctcttctgagcttacgtagttctaccggctttgccgtgtgcttctgccaccctgctgagtctgttctggtaatcggggtataataggctctgcctgacagagggatggaggaagaactgaaaggcttttcaaccacaaaactcatctggagttctcaaagacctggggctgctgtgaagctggaactgcgggagccccatctaggggagccttgattcccttgttattcaacagcaagtgtgaatactgcttgaataaacaccactggattaatggcc

SEQ ID NO: 15675 - DNA, 1234 bp, Homo Sapiens
cgaactgtagaggtcgaccccgacgtgctgcacaacagctatgcattgcatggcatccgctacaagaacgaccatatcaacctggccgtgctggcggatgccgagggcaagccctacctacacgtgtccgtggagtcccgtggccagcctgtcaagatctatgcctgcaaggcaggctgcctggacgagccagtggagctgacctcggcgcccacgggccacaccttctcggtcatggtgacacagcccatcacgccactgctctacatctccaccgacctcacacacctgcaggacctgcggcacacgctgcacctcaaggccatcctggcccatgatgagcacatggcccagcaggaccccgggctgcccttcctcttctggttcagcgtggcctccctaatcaccctcttccacctcttcctcttcaagctcatctacaacgagtactgtgggcctggagccaagcccctcttcaggagtaaggaagatcccagtgtctgagtgaactaacagtcctgctttcagccaccatttgcacaagacacccagcactgaaagtcccgctgccaggagcaagggatcctttggaagcacccgccctttgtgccttgttgggggaaaccggtgacgcagaagtgagtgtggatacaccagagtttgcattggaaggaatgagtgtcacgtggggagggaaggggccagtggaccttttgtaagctttccactcaataaaatgaacctgtatggcaaatacttgaaatggaactcactccttccactttccccctttcttctgtcccaggaaatagatcatcttttgaaaagactcttgtctaggaaaagttgtgtccttttcctaatttaacgtgttctttcttaatgaagttttaatttatttttgttgagattttgctagatggcttttgcatcccctgtagatggtgagtgttggcggtgatgtccatctcggcgttcggaggccccacggtcccgaggctgggccggggccccccagggtggctgtgctgctgcctgtaggagggtgcgggttgtgctgtcatcctcgggtttgcacgcccttttttaggagcctgtggacatctgtggttttgtactttggggcttcaggggaggtgtttaactttctagtgattgatgattgtcaggttttgaaataccaaagcttttttgttctgtttttaaataaatatctttcaaactttaaaaaaaa

SEQ ID NO: 15676 - DNA, 471 bp, Homo Sapiens
gcgaccgctccaacatcagaatggtccagtgaacactcagctccagaagggcccaggcactgagtccgtggtaattctgcaaggctgggtcagagccagggtgtggtgccactagggttgtctccgtagcctatttctatagctggccactggggttggcagtgaacagtaatcacacttgttttgtgaattgaacaggaagatcccagtgtctgagtgaactaacagtcctgctttcagccaccatttgcacaagacacccagcactgaaagtcccgctgccaggagcaagggatcctttggaagcacccgccctttgtgccttgttgggggaaaccggtgacgcagaagtgagtgtggatacaccagagtttgcattggaaggaatgagtgtcacgcgccgagggaaggggccagtggaccttttgtaagctttccactcaataaaatgaacctgtatggcaataaaaa

SEQ ID NO: 15677 - DNA, 420 bp, Homo Sapiens
agtgcctgctgcatagaggggttgctgccagctgcctctccctccttgtctcttacctgcctgctgcctgggtcaggatgaagaggggcccttgtgttgcccccaccctggctgcctgctaagggcccatgtgatctgcctggcagaggagtttcttcaggaagaaccagggcagcttctgcccctagagggccaatgcccttgctgtgagaagtcactgctttggggagacctgatctggctgtgccagatggacactgagaaagaagtagaagactcagaattagaagaggcacactggacagacctgctggagacctgatcctcagtgtccttaccccctcctacctcttttctgtgccacctgctgtgggtccagcaggtttttacttgagtacaataaaaagtctgagtcaaaaa

SEQ ID NO: 15678 - DNA, 475 bp, Homo Sapiens
ctggccttcgggcctccaccgcccaaggccccggccccaaggcgccgcgcaggtccctttgatgacgcgaagcctgagccagaccagggggatccaggggcctgctgctccctgtgcgcccagaccatccaggatgaagaggggcccttgtgttgcccccaccctggctgcctgctaagggcccatgtgatctgcctggcagaggagttttcttcaggaagaaccagggcagcttctgcccctagagggccaatgcccttgctgtgagaagtcactgctttggggagacctgatctggctgtgccagatggacactgagaaagaagtagaagactcagaattagaagaggcacactggacagacctgctggagacctgatcctcagtgtccttaccccctcctacctcttttctgtgccacctgctgtgggtccagcaggtttttacttgagtacaataaaaagtctgagtcaaa

SEQ ID NO: 15679 - DNA, 721 bp, Homo Sapiens
cggctgaagggtgattctgaaagtcaagaagacatcatccggaatattgccaggcacctcgcccaggtcggggacagcatggaccgtagcatcccctccgggcctggtgaacggcctggccctgcagctcaggaacaccagccggtcggaggaggaccggaacagggacctggccactgccctggagcagctgctgcaggcctaccctagagacatggagaaggagaagaccatgctggtgctggccctgctgctggccaagaaggtggccagtcacacgccgtccttgctccgtgatgtctttcacacaacagtgaattttattaaccagaacctacgcacctacgtgaggagcttagccagaaatgggatggactgaacggacagttccagaagtgtgactggctaaagctcgatgtggtcacagctgtatagctgcttccagtgtagacggagccctggcatgtcaacagcgttcctagagaagacaggctggaagatagctgtgacttctattttaaagacaatgttaaacttataacccactttaaaatatctacattaatatacttgaatgaaaatgtccatttacacgtatttgaatggccttcatatcatccacacatgaatctgcacatctgtaaatctacacacggtgcctttatttccactgtgcaggttcccacttaaaaattaaattggaaagcaggtttcaaggaaa

SEQ ID NO: 15680 - DNA, 441 bp, Homo Sapiens
ctgtgctttgggacggcgcccatggcagagcagagaacagaaagtacccccctcacagcagtcaaacagcctgagaaagtggcagctaccaggcaggagatcttccaggagcagttggcagcagtgcacagagttccgcggtcttgggcccctcttcaagtcctcgcctgagcccgtgccactcaccgagtcagagacggagtatgtcatccgctgcaccaaacacaccttcaccaaccacatggtttttcagtttgactgcacaaacacactcaatgaccagaccttggagaatgtcacagtgtagacggagccctggcatgtcaacagcgttcctagagaagacaggctggaagatagctgtgacttctattttaaagacaatgttaaacttataacccactttaaaatatctacattaatatacttgaatgaaaatgt

SEQ ID NO: 15681 - DNA, 534 bp, Homo Sapiens
cttcctctccaccaagagccattcgcagcggcagcccctgctggccaccttgagttctgtgcctggtgcgccggagccctgccctcaggatggcagccctgcctcacacccgctgcaccctcccttgtgcatttcaacaggtgccactgtcccctactttgcagagggctccggggggccagtgcccactaccagcaccttgattcttcctccagagtacagttcttggggctacccctatgaggccccaccgtcttatgagcagagctgcggcggcgtggaacccagcctgacccctgagagctgaccccgtgctgccttctccaggcaggcctggcctctgccctgggactggggcgcccagggcctcgtgccttctctcttggcctagcctggcccactcaggacctgcccagcctctgccagctcctctggcatccgccctcttctccctggggctggggtgggggtggcagggagctgggacctggagagacaactcctgtaaataaaacactttatttgtagaaaaaa

SEQ ID NO: 15682 - DNA, 557 bp, Homo Sapiens
ccccaccctgttctctccttacctttggcatcctttggcctggtggggaaacagaggcccagggtggagacctaagcgggtataagaccaggtggcctgctccttttctgggccctagcacaggtgggtaacccccacccaacccagctcctgctgctgtcccagtcttgggctggggcctggaaagaggaagaggctgcctggggctgggccagcccgctgtgcactttgaccccagttccttgccagcacggctgctaacagactgccacttgagtgcgccttgcaggcactcccagagcagccatggaaggagctggccctcacaccatccacctccacactgcctcctggccagctgcccaccccagtgccaggtgggagagggagcagaacagccagccccttccaggtggcagtcggaagggtttttgtttttgtttctgttgccatttgtgtaaatactagtctttttggaaaaaaaataatgtaaagatgttttgtataaactctgaattattttcttgttgcttttttcttagaaaaaaatgagaact

SEQ ID NO: 15683 - DNA, 458 bp, Homo Sapiens
  misc_feature (222)..(253): n is a, c, g, or t
  misc_feature (316)..(316): n is a, c, g, or t
tccaaggtaaggagagaacacactgtggggtgtgggggtgaaactcccaactctgcagggcgcataggcacctgggcacctcacctccctccaccccccatgaggtcatctgcctgcagcagctctccctgttccccacgcaacagccaattaagacacttaattaccgtgagagtgagggagcacggagatgcccaagaatcccacaaggaagggattttnnnnnnnnnnnnnnnnnnnnnnnnnnnnnnnngaagggtggcagtgactaccccattgccaggataagcctcgtaggagggtcaggaggggaggngtgggacaccttgcccagtggcactttcctcttccctcatgggcgtgaacagccctggcctgccccttaccccaccagaaacaccaaggaatctataaaagaaatggcatcctttgtgcagaccggggtcctctagagcagc

SEQ ID NO: 15684 - DNA, 430 bp, Homo Sapiens
ggtgcacagaggaaaggacgctcagcctgaccttcccggggctgtccgtgccagcggctccgcgtgagggaggggcccgctcctgcttggtgagagagtcagcacgcagtggcctgcagaaaaacgttgacctcttggcgagaatgcaaagaagggaacgcttgcttatacactgttggtgaactgtcacccctacaactcagcttgcaaccagccctggccaccagtttccccacactgagctgaatatcggacatgcccatcttagacattccagcccattctgaaattccacatcgattcacctgacaaagtctgaagttccagggcaatttatctggaaaagcttacctggaatcacgtgtcatttcaaccaacaactgttgaagaggacgtggcattaaaaccaagggtatcaattatttataaa

SEQ ID NO: 15685 - DNA, 686 bp, Homo Sapiens
agggtacagcccctcgtgagaactgagccacagtcatgtttcctacatcagcctcctgctcaggggtttgtacagagaccactgccagccctctaggtggtccctgcaaagagagtcccagcccccaaggctccaaatggacagggcaccatgttgaccccttcgtcggcctccagttcgccgactgtaacatgtttcatccagttcaggacgtttatttatttccaacttgcatacaaaacatactgagaaactaaaaccatcgttaaaagtgaagacacgttgagacaggtatctcgacctgccaagtataaacctaaagctgagttcataaaaagggatgatttggccgacggtcatctgccagattctgatgatgattcagatagtcagtgtggaagaagatcagagggagaagcactgctgcctatgcactccatttacagaaaaacgttgacctcttggcgagaatgcaaagaagggaacgcttgcttatacactgttggtgaactgtcacccctacaactcagcttgcaaccagccctggccaccagtttccccacactgagctgaatatcggacatgcccatcttagacattccagcccattctgaaattccacatcgattcacctgacaaagtctgaagttccagggcaatttatctggaaaagcttacctggaatc

SEQ ID NO: 15686 - DNA, 466 bp, Homo Sapiens
gcgcgacatgggcctgcaggagatggccgggcagctgcaggcggccacgcaccagggctctggagccgcgccagctgggatccaggcccctcctcagtcggcagccaagccaggcctgcactttatagaccagcaccgggctgcgcttatcgcgagggtcacaaacgttgagtggctgctggatgctctgtacgggaaggttctgacggatgagcagtaccaggcagtgcggccgagcccaccaacccaagcaagatgcggaagctcttcagtttcacaccagcctggaactggacctgcaaggacttgctcctccaggccctaagggagtcccagtcctacctggtggaggacctggacccgagctgaggctccttcccagcaacactccggtcaacccctggcaatcccaccaaatcatcctgaatctgatctttttatacacaatatacgaaaagccagcttg

SEQ ID NO: 15687 - DNA, 661 bp, Homo Sapiens
  misc_feature (631)..(632): n is a, c, g, or t
  misc_feature (651)..(651): n is a, c, g, or t
atggggcgcgcgcgcgacgccatctggaatgcgctggagaacctgaccgccgaggagctcaagaagttcaagctgaagctgctgtcggtgccgctgcgcgagggctacgggcgcatcccgcggggcgcgctgctgtccatggacgccttggacctcaccgacaagctggtcagcttctacctggagacctacggcgccgagctcaccgctaacgtgctgcgcgacatgggcctgcaggagatggccgggcagctgcaggcggccacgcaccagggcctgcactttatagaccagcaccgggctgcgcttatcgcgagggtcacaaacgttgagtggctgctggatgctctgtacgggaaggtcctgacggatgagcagtaccaggcagtgcgggccgagcccaccaacccaagcaagatgcggaagctcttcagtttcacaccagcctggaactggacctgcaaggacttgctcctccaggccctaagggagtcccagtcctacctggtggaggacctggagcggagctgaggctccttcccagcaacactccggtcagcccctggcaatcccaccaaatcatcctgaatctgatctttttatacacaatatacgaaaagccagcttaacnnagaaagccgcatggagganaaattcattt

SEQ ID NO: 15688 - DNA, 910 bp, Homo Sapiens
gagttcccagacctgcaccgcaccatcgtctcgaggccggacgtctacttaacctacatgctgcgcaagcccgcggggcgcctcgagtgccctcgggcttctgacgccgagcccaggaagtgcgtcccctccgtggtcgtgggcgtcgtgggcatgggccacgtgcctggcatcgagaagaactggagcaccgacctcaacatccaggagatcatgaccgtgcccccgccgtccgtctccggcagagtgtctcggttggccgtgaaggccgccttcttcggcctgctgggctacagcctgtactggatgggccgccgcaccgcgagcctggtcctgtcgctgcccgccgcgcagtactgcctgcagagggtgaccgaggcccggcacaagtaggagactgctccccgcccgctcgggcccctgaggagccagtgcccccgcggcacttctgggtgccaggtgcatcctagcccgcccgaggcccctgccaacccccatgggggtctgggcccggcctcgcctgccctcctgggccagtcacccctcccccagcccacccaaataaaggattatttaactgtctgagctcaggcctcccggcagcccctcccctcccacactgcaggggccgttccccggcttctggacaagacacccagctccgagggggcaggggcttataggaggggccgaggcgtgcgctgccctctcagccctggtggcaggcgggggacaatggccactgtccctacctcactgtgccttcctgtgctccaggccatctctggttgtgtctgtgccgactcggtgttgaatcaaatcaggtgtgcgtcaggagccggctgtgtccttcctgccacactcggggattcattccttagaaactgaaataaattctaattttggaaaa

SEQ ID NO: 15689 - DNA, 495 bp, Homo Sapiens
gtaattttaatttcagagagaaaaactgaagtaaatgtcaaaaaacaccagccttaaatccaaagggacagaattcgtgttcttgggtctgtcccgagtgggctcgcgtgcagccaaacatcagctctgggtccaggcgtggcctcagctgggagcctgtgtcctgagcccccggagcgaaggggtgcctggggcatcttggccctctctgggcagacaatgtgtgcacctatgtggaaggccaaggacatgggctgtggccaggcctgtcccgctcaggccccctgcccggcggccgtctgtgtgcggggcctccctcctggctgtccaggacacagcccgtgcagccccagcctggacccaggccatctctggttgtgtctgtgccgactcggtgttgaatcaaatcaggtgtgcgtcaggagccggctgtgtccttcctgccacactcggggattcattccttagaaactgaaataaattctaattttggaa

SEQ ID NO: 15690 - DNA, 590 bp, Homo Sapiens
  misc_feature (552)..(552): n is a, c, g, or t
agcggccgccccgcccgtggggtcggggatccgccctgccctatacggggaagggcgccggcggcccctagcggacacgcgcgcggcctccgggacggccgggtcgtccgcagcgcaggcccggggcggcggcggacgccggggacgcgagaagttatgggccacccgggccggcggcctcagctcagcacgcagcgctcccgccggctcaactgccggctcagcttgcggcgccgctgttccaggccgcgctccaggcgctcgtcctcctccagggcgatccgctccttgtggtccaggtcccggactagctcatcgcgctggttcaccagcgacaccagctcctccagtaggagctgctctcggtgctgctgagcggacgttttctgccagtcttcgatggccagcatggcccgcagctcgcggctcagcagctcgaaccttcgctccaagtcctgctcctccatgaacagcttgcagctggtcctgcctccggatgagagcgttcttcttgttgaccagggtgaaccactcctggatcagcaccttctnctgcagcttgttggcacctgactccatgaggcttctca

SEQ ID NO: 15691 - DNA, 541 bp, Homo Sapiens
cgatccttgtctatcatatgtctcctgatgtgaagtcattctgacttttcttcctaccctataggtgtttttattctcaaccttgtgtgccgagacttggggctaaaagactcagtgctggctgggctcaaggcagtgttccccctcctatatgtccggcgaattgagggtgaagtgaatgagatcctgttctgtcagctgcaccctgagcaaaaacttgccacaccagagctcctagaaacagcccaggctttggagcggaccctgaggaagcctgggaggggttgggatgacacgtatgtcttgtcagatatgctcaagacggtgaaaattgtgtgactgcttaggccaagcagccctcctgcctagactgaccttggactcccagcctgccagagaatgaagaaatacaacgcacagtacttttgaagcttcgtatttttcttggtttcacactcagctacatgtgacctccagcttggtgaggttgcctgaagattagggaaaataaaaatgtccttcccattttgtccttttcagt

SEQ ID NO: 15692 - DNA, 909 bp, Homo Sapiens
  misc_feature (414)..(414): n is a, c, g, or t
taaagtactgtgtgtgaacacacaaagccatgatcgctggacttgccctgctgagaaagcccagagctactcctagagatcccactggcattgtacggtaggtaggcctgggcgggggcagcctccccctctttgtccacgatcattttccaaagtcctgcattgatgctgtggagatcgatccctccatgtaggaagtggccacccgggggtttggcttctcccagagtgaccgaatgaaggtccacattgcagatagcctggactatatcgccagcttggcaggaggaggagaagcacggccttgctacgatgtcataatgtatgatgtggacagtaaggacccaacactgggaatgagttgtccgcccccagcatttgtggagcaatcttttctacagaaggttacaagcnatcttgactcctgaaggtgtttttattctcaaccttgtgtgccgagacttggggctaaaagactcagtgctggctgggctcaaggcagtgttccccctcctatatgtccggcgaattgagggtgaagtgaatgagatcctgttctgtcagctgcaccctgagcaaaaacttgccacaccagagctcctagaaacagcccaggctttggagcggaccctgaggaagcctgggaggggttgggatgacacgtatgtcttgtcagatatgctcaagacggtgaaaattgtgtgactgcttaggccaagcagccctcctgcctagactgaccttggactcccagcctgccagagaatgaagaaatacaacgcacagtacttttgaagcttcgtatttttcttggtttcacactcagctacatgtgacctccagcttggtgaggttgcctgaagattagggaaaataaaaatgtccttcccatcttgtcctcttcaggga

SEQ ID NO: 15693 - DNA, 653 bp, Homo Sapiens
  misc_feature (109)..(109): n is a, c, g, or t
cggggcagctcccaggaaagctggtctgcgagcggcccctgcccggctcccaggtccctgcgcgaccccgcccttccccgagcaccacaccagcgctgccgcccgcgtncccggaagctccagcctgaaccatgtttttcacttgtggcccaaatgaggccatggtggtctccgggttctgccgaagccccccagtcatggtggctggagggcgtgtctttgtcctgccctgcatccaacagatccagaggatctctctcaacacactgaccctcaatgtcaagagtgaaaaggtttacactcgccatggggtccccatctcagtcactggcattgcccaggtgaagctttcagagccttttccccacagtccacttccccatcaccctctctcccagacattaagacatcttctggccacagtcttctcaacccttgcctgcagagaagttcctctgctagtctcatcttttccaggcaccccaaggcacttgcctcctcctcctttctttccctgaaatggaagaagcatttcttagagggctctcccttctctctctgctttttctctgacttcatgagacccccaccacacctttcctacccctactctggctacaggtaaaaatccaggggcagaacaaggagatgtt

SEQ ID NO: 15694 - DNA, 545 bp, Homo Sapiens
gcggccgcagaccccgggcggggaggaaaggccggcgggacccaggcccgggaggcccccgcctagagaggggcaccagggagggtgagggaggccaggcgcgtggcccctggagagttcctctgcagacggtttggagtgaggacggggcccagggagatggcatggaccgtgcctttcatttcaggagacgtggttgtaccagttgcaaactgtggggtccaggaatacaactcgaaccccaaagagcacatgactctcagagactacatcacctactggaaagagtacatacaggcgggctactcctctcccaggggctgtctctacctcaaagactggcacttgtgcaggtaatggggcttgggacgcaccgaggcgctgccttccctagcgctgcgtgaacccagaggcctttctgatgaaggtggcccctgggtgcacaacggagctatttttccccgtgagcactttaatcagtttaaaagaactggattgtcttcgcatggctgcagtgttgttctttgggaggtcatatggttttt

SEQ ID NO: 15695 - DNA, 1370 bp, Homo Sapiens
ccatgtaggtgacatatagaaagttgtacaaaaagcaggcgtacggtccggaatcccgggatatcgtcgatccacgcgtcgggacgcgagacgcgcgccctcgccgacagccacttccgaggcctgggggtcgaggtccccggcgtcggccaggctccgggccgggtagccttcgtctcggagccgggcgccttctcctacgccgactttgtgcggggcttcttgctgcccaagcctgccctgcgtgttttccagcgccttcacgcagggctggggcagccggcggcgctgggtgacgcccgcggggaggcccgacttcgaccacctgctacggacctacggagacgtggttgtaccagttgcaaactgtggggtccaggaatacaactcgaaccccaaagagcacatgactctcagagactacatcacctactggaaagagtacatacaggcgggctactcctctcccaggggctgtctctacctcaaagactggcacttgtgcagggactttccggtggaggacgttttcaccctgcctgtgtacttctcgtccgactggctgaatgagttctgggatgcactggatgtggatgactaccgctttgtctacgcggggcctgcgggcagctggtccccgttccatgctgacatcttccgctccttcagctggtctgtcaatgtctggggggaggaagaagtgcctcctccttccccccagggcaggaaagagggccctgcgggaccgccacggggaacctggccctacgacatggaacttccccagcacttctggcaacaccacacctgcaccccacgggaacccagcttggcttggccccaacccttgggagaatcacgccggggaaagcggggcgaaaatggggtgttttggtggccccaggtgggctgggccacccaaccgagggggccccaaaccctgggaatgaacacccagttctcccactccaacccaacaagttgggggcccaaggggcttttccaaccctgggcccaaacaatgtgtgggcggctttctctttggccgccagggaaacctaacgtgccgccccctgtgcaaggaagggaagagtccacaccgcaaagggggaaggggaacctctcaattggccccggaatctgggggcacccacccgacgtgtggccagggcgccattccatgggagaggccccctgggcttcggggggaaatcctaactttttggggaaaagagatgtttgtcgccgcctttttccccgcatggggggcacatgtgcctgtggagaaaaacaaagagccttcccgctgggcgcccctgaaagagggagagggcagacccctcccttgtaaggcgccgcgagtgcgcgtg

SEQ ID NO: 15696 - DNA, 573 bp, Homo Sapiens
ccccatccgctatttaggctctcaacatcatgtagacaaagcgctgaacttgattgggaagaagttcaaagagctgaacctcaccaatatctacgctcccccattgccttcactggcactgccttctctgccgatgacatcctgggtgagcgtgctactgggtgatccggacttcttgccactttcccccaaacctaccccaaacaagaaactccccagacctcaggctaagaaggccaagtgcacatgagtgcctgcgccctctcttctctggcctctgctggtcggttctgctatgggactgtgttctggggacagggcttaggtggtgatagcgctggcaggaaaccagaggcctcttggtccccacatgggaggactacttttcctggctctgccccctgggcaccttttaagttttctaggcgttagcttagaaaggatggtgtagttaggacaggagattgggtgtgtccagagtagacgttcaccacctgagacctgggtgggactagaatcatgggtttggatggcgcttgttctttcttctggttgagtcaggccttaacagtg

SEQ ID NO: 15697 - DNA, 1839 bp, Homo Sapiens
  misc_feature (577)..(589): n is a, c, g, or t
atccacggcccacaccacggccccagcaaccgcccgccgggtgtatctttcaacacccggtaaacttggccggaaaatttcgagcgccccgtctggtcccaccggtgatatccttggcccgaagtgaggcacgtgggggagaaacacagagtgagccagttgtggcacccacgagagaaaagtgggtgaccaaggtaacaaccccggctggcccgggaagcccggtccctctccccccagctgaaccagcgttccaagaagtgagaccaacgtcgaaagtgaccgagtccaatgtgagaaaagtgtcctgggtttagggaccctaatggaaagtttataaaaacggggttaaaaattcagcccacctccagtttatgtaacctgtaccaagtaagggagagccattagtcagtcatgtcttgccccctgaagaaagattttgaagtaaagaacccctctcaagcagcacatacatcctggcctgtctcccattttttggtttttccggggaaggagatagaaggaagaagaggggaatggaacagggggaataggaccatctggtctctccccccannnnnnnnnnnnnaaacagctgagaaccaggataagccagctggcttgttaaacactatcctttggctttgcgaagagaacccatagttccatccttttttctcagagacgaaatgtcttctcaataggactacagtatggagaaagaaaggactttctggagaggacaatgtttgttattccgatgttcatctttgacttgagtgccaagcccaatttcaacagtgcaaaaaaagactctcaggaagcagcatgggggtcaaaggcttgtgtagtagctgtctacccactgggcaaggcctcgctccaccagggaccggtttatcaacaccacttcatctccaaccacactccacagctgaatcagaggaagaccagttggactgtaacttgtcacctgagcaagcagtgctgtattccccgtcatctcgctcatggcggcatctgcttccggtgaaaactggtcatcgtctgacaggggcatcacactgtccagaaggacttctgctccctgaaacggcagggtgacaaagtcagacctgatttgccggagcacgtctactttcaccctcttatatccgccgtagtccacgtatcgaatctccactttcgttggtctcctcgtaggaggcaaccactagggctcgccaccaggccccgtccgcaccaggggcggcacagatgaccgttatttccactggggtgggcaaggtggggattccaggctgagagtaacagaggtacatctgctggtcgaggctgcgcagcgcgtggaaggtagggtgtgtgtgctgctgcacgaacaggtgcccggcattgacctggttgaccacaatgacctccacggtgatgccatcaggcagcatgagccaggatgtcatcggcagagaaggcagtgccagtgaaggcaatgggggagcgtagatattggtgaggttcagctctttgaacttcttcccaatcaagttcagcgctttgtctacatgatgttgagagccttctatgtggcagatctggacgctctgggtgtaaggcagggttgaaatgtagatcttggcaccagatgtttgcttcagaaaactcacatagcgcccctgcttgccaattagccgaccgactaagtgctttggcacctcgatctcccagatgatgaggtcgaccttcttagggttggagcctgcctgggcattttggaagctctcagtcttcttgagactgcaacagctatccacggaatccatgctgttcctgtcagaaccctgt

SEQ ID NO: 15698 - DNA, 1248 bp, Homo Sapiens
gctaggccctgagggccaccgttgttggcccagattcctccaagaccctcttatgtctgtccctcacaggtcctcacaagcttgaggaaggggaagtggccatgggccgagtggcgaaggtgactcccaacgaggggctgaccgtctccttcccctttgggaagataggaacagtcagtatatttcacatgagtgactcctactccgagacgcccctggaagacttcgtcccccagaaggttgtcagatgttacatcctgtccactgcagacaacgtattgactttgtcgctgcgatcatccagaacaaacccggagacgaaaagcaaagtagaagatccagagattaactccatccaggacattaaggaagggcagcttctgaggggctatgtagggtccatccagccacacggtgtgttctttccccttggcccctccgttgtgggtttggctcgggactcccatgtctcccagcacagcccgtccaagaaagccctttataacgaacacctccctgaagggaagctgctcacagccagggtcctacgccttaaccaccagaagaacctggtagagctgtctttcctccccggagacactgggaagccagacgtgctttctgcttccttggaagggcaacttacaaagcaagaggagaggaaaacagagactgaggagagagaccaaaaaggggaaaagaaaaatcagaaaaggaacgagaagaagaaccagaaggggcaggaggaggtggagatgcccagcaaggagaagcaacagccccagaagccacaggcgcagaagcggggcgggcgggagtgccgggagtctgggagtgagcaggaaagagtgagcaagaagccaaagaaagccggcctgtcagtccagctggagggggtcagtaggctccagggagtgggccctcccctccgatcttggagtctttgggtgttccttcagcctcagcctcactggtaccttctgccctttaggggaggctatgagtctgggacaggaggacaaattcagagcccagagggggaaatggagaaacctgggctgctgaggaaagccccgggtgttggcgtgaactgatgatgtctcatcccacgccccctatggccccattacctaacctctccatatttgggctattcaaggtcttggaggccagcccagacccagctagttgttgaagccagttcttttttgtcttggtcatgagggaattaaacgttttttctggcag

SEQ ID NO: 15699 - DNA, 501 bp, Homo Sapiens
cccctggactcccagaaatgctgagggtccctcttccaggggagttccctggggagcaagagtagaggggctattcccgagggtcctgtggtcagggtcctgctttgtccctggcaggctgtcagtccagctggagggggtcagtaggctccagggagtgggccctcccctccgatcttggagtctctgggtgttccttcagcctcagcctcactggtaccttctgccctttaggggaggctatgagtctgggacaggaggacaaattcagagcccagagggggaaatggagaaacctgggctgctgaggaaagccacgggtgttggcgtgaactgatgatgtctcatcccacgcccactatggccacattacctaacctctccatatctgggctattcaaggtcttggaggccagcacagacccagctagttgttgaagccagttcttttttgtcttggtcatgagggaattaaacgttttctctggcagagcaaaaatt

SEQ ID NO: 15700 - DNA, 498 bp, Homo Sapiens
tgacagaccgactttttgtcgatggttagaaaattccttaaaaggtttgccaaaggaaacaaccgtgggagccgtcacagtgacacacaaacaacttacagacttccacaagcaagtcactagtgctgaggaatgtaaacaagtttgctgggccttgcgagacttcaccaggttgtttcgatagctcacactcctgcactgtgcctgtcacccaggaatgtcttttttaattagaagacaggaagaaaacaaaaaccagactgtgtcccacaatcagaaacctccgttgtggcagaggggccttcaccgccaccagggtgtcccgccagacagggagagactccagccttctgaggccatcctgaggagttcctgtttgggggtgtgagggaaaatcagcgcggattttaaaaagatggctgtggcctgcccggcgtggtgggaggggagctggtttcctggtgaactttctaaaaggaaaaataattttaagtaaag

SEQ ID NO: 15701 - DNA, 521 bp, Homo Sapiens
gacttttatttatttgtttattttttctgagttcttattggcagacttcagaatgaggtacctgaggaaatatagaaacctctgccttaaggttgattttactaaatgctctattttctggtgcagttattgactgtcttatctcttctgtcaggaatgtcttttttaattagaagacaggaagaaaacaaaaaccagactgtgtcccacaatcagaaacctccgttgtggcagaggggccttcaccgccaccagggtgtcccgccagacagggagagactccagccttctgaggccatcctgaggagttcctgtttgggggtgtgagggaaaatcagcgcggattttaaaaagatggctgtggcctgcccggcgtggtgggaggggagctggtttcctggtgaactttctaaaaggaaaaataattttaagtaaagaaaaaaggaaaaaaaggaagactaaacagaaaccagaactgaaacattcacctggtagcaaatgacactttgcatccagagggg

SEQ ID NO: 15702 - DNA, 456 bp, Homo Sapiens
agggacgggtcccgcggcgagcgagctcctgagcataagctgtggccatgactactgaagtaggctctgtgtctgaagtgaagaaggactctagccagttaggaacagatgcaaccaaggaaaaacctctttgtctacacatgtaaaacttaccttttgttattgagcaggcctatctctttcagatagttttatgattcacacaggtttgaggatgctggggagagggggagggggctgtggtggtgttctgttggttacaagaaagttataccatttaaagctggcaccagagacccgatagggacttattaactatattgaacattttttcctttgcctttgaccctatgtatagttacgatgccagattagatttatagcagcctcaagttgtattaaatgatattttgcttcctgtaatactattataaaataaagtttgtttattctcta

SEQ ID NO: 15703 - DNA, 966 bp, Homo Sapiens
ttactttgtgtgcaactacctgcttttaatgactcactttgatcaaatgacagtgaacaaagccagcccaagctggtaaggtgctgttcacttgaacaggtgctgttgcgcagaaaggaaactctgtgactaatttagatagtggctttccttcttctggattcttttcattgaattctcacagtaaatatttacggagttttcaaattgcagcaaatatactgtatgagaaaatatcaacacagattaaaagcctttcttacatcttgaaaattttctaatatttgagaatttcacagggatgttttttatattggacccttttgactttccagtcctgtgactttctacttttagtagagagtcagaatctctggactggagaataatgaagaagttcactgactgtgcactgtgcttagagaccctgccgcaccacagtgccaatgcttgtcagacacatgcccttcggcagcattccagaacaggagggaagagaaagagaaaactttcttcccttctactaaaagattcaggcagcttaaaaccttagtgctttctttcttaacatacccaaatttcaattctttccattatttgaacacttgggtagaactcttgctttgtattaaacctctttgtctacacatgtaaaacttaccttttgttattgagcaggcctatctctttcagatagttttatgattcacacaggtttgaggatgctggggagagggggagggggctgtggtggtgttctgttggttacaagaaagttataccatttaaagctggcaccagagacccgatagggacttattaactatattgaacattttttcctttgcctttgaccctatgtatagttacgatgccagattagatttatagcagcctcaagttgtattaaatgatattttgcttcctgtaatactattataaaataaagtttgtttattctctaaa

SEQ ID NO: 15704 - DNA, 634 bp, Homo Sapiens
aggtggcgacctctgcacatggaggatgctgaattctacaacgcggttcaagggccgcaatgacctgatggagtacgcaaagcaacacgggattcccatcccggtcactcccaagaacccgtggagcatggatgagaacctcatgcacatcacggagcgcatcatcgctgtgtccttccctgccggctgctctgaggagtctacctgcacaacctacaggaggtcacgcgcatgctcaagtccaagcacggggacaactacctggtattaaacctttcagaaaagagatatgaccttacgaagcttaacccaaagatcatggatgtgggctggccagagctccacgcaccgcccctggataagatgtgtaccatatgcaaggcgcaggagtcctggctgaacagcaacctccagcatgtggtcgtcattcactgcaggggcgggaaaggacgcataggagtggtcatatcatcctacatgcatttcaccaacgtctcagccagcgccgaccaggcccttgacaggtttgcaatgaagaagttttatgatgacaaagtttcagctttaatgcagccttcccaaaaacggtatgttcagttcctcagtgggctcctgtccggatcgtaaaatgaca

SEQ ID NO: 15705 - DNA, 1076 bp, Homo Sapiens
  misc_feature (153)..(176): n is a, c, g, or t
ccagagacttgttgctgggccggaatcccatcccagcacagcttgtgagatgctgtcgcaatgttcctgtcatctgcattgtgctggtaggtacccatcttcgggttactgcgttcttcaagaaccagagtaaaggactttcccacggacagnnnnnnnnnnnnnnnnnnnnnnnntgccagctccactgtctccactaccgaggacacggagcacctggtctataaccacaccacccggcccctctgagcctgggtctcaccggctctcacctggccctgcttcctgcttgccaaggcagaggcctgggctgggaaaaactttggaaccagactcttgcctgtttcccaggcccactgtgcctcagagaccagggctccagcccctcttggagaagtctcagctaagctcacgtcctgagaaagctcaaaggtttggaaggagcagaaaacccttgggccagaagtaccagactagatggacctgcctgcataggagtttggaggaagttggagttttgtttcctctgttcaaagctgcctgtccctaccccatggtgctaggaagaggagtggggtggtgtcagaccctggaggccccaaccctgtcctcccgagctcctcttccatgctgtgcgcccagggctgggaggaaggacttccctgtgtagtttgtgctgtaaagagttgctttttgtttatttaatgctgtggcatgggtgaagaggaggggaagaggcctgtttggcctctctgtcctctcttcctcttcccccaagattgagctctctgcccttgatcagccccaccctggcctagaccagcagacagagccaggagaggctcagctgcattccgcagcccccacccccaaggttctccaacatcacagcccagcccacccactgggtaataaaagtggttttgtggagtttctggctctgttctgtgggccaggagagggactaggttgctgggggggtgatgggaaccgtcctgttcagctggttcaggcttcagcaaccctgtttgagcagggtttttccaatcgtctctctcgaaaactggccttgcccc

SEQ ID NO: 15706 - DNA, 684 bp, Homo Sapiens
  misc_feature (603)..(603): n is a, c, g, or t
gcaccccttggggccccccagagaaaggtttccccaggaaacattttagagaatgggcgacacatgtcccctgcgcaatatagaggggagaatatttgtgcagagagacaaattttgtggagaattttctgggtgttctcctctgtgtgtgtctcacaaagacattgcacgctgttctccggtagacaccccccatggggtgtcctataggagacagagaggagagtgggcgggtggggtgctcacaggagaccccccttggagagggcgccccacacaccccctgttctcctctcccgaggagcgtcccttctttcacacactgctggtggcggcaccacagggcctgtggagaggaaaggagaacttctcctcgctgttagatttgtgggctcgatataagaagatgtgctcttttgtgttaatattaatagtctcgtggccactagggtgtaagaagagtagagggcaagaagagcctcgtttggcctctctctgtcgctccttcttccttctttcccccacagaattgagactcttctgcccctctgattcagccccaacctggcctagaccagcagacagagccaggagaggctcaantgcattccgcagcccccacccccaaggttttccaacatcacagcccagcccaccccctgggtaaaaaaaatggtttgtggg

SEQ ID NO: 15707 - DNA, 316 bp, Homo Sapiens
cggaccaacttaggctgagctgctaactcagtggcgagctgctaactcaggtgcgagctgctgagcacagagctgctgctcctggaggccttcagctggaacctctgcctgcccacgcctgcccacttcctggactactacctcttggcctccgtcagccagaaggaccaccactgccacacctggcccaccacctgcccccgcaagaccaaagagtgcctcctccctgggcagaaagtggccatgccaccctgttttcagctaaagcccaacctcctgacctgtcaccgtgagcagctcgcccctgagttaggca

SEQ ID NO: 15708 - DNA, 1826 bp, Homo Sapiens
agcagcgactgctactttgggaatgggtcagcctaccgtggcacgcacagcctcaccgagtcgggtgcctcctgcctcccgtgaaattccatgatcctgataggcaaggtttacacagcacagaaccccagtgcccaggcactgggcctgggcaaacataattactgccggaatcctgatggggatgccaagccctagtgccacgtgctgaagaaccgcaggctgacgtgggagtactgtgatgtgccctcctgctccacctgcggcctgagacagtacagccagcctcagtttcgcatcaaaggagggctcttcgccgacatcgcctcccacccctggcaggctgccatctttgccaagcacaggaggtcgcccggagagcggttcctgtgcgggggcatactcatcagctcctgctggattctctctgccgcccactgcttccaggagaggtttccgccccaccacctgacggtgatcttgggcagaacataccgggtggtccctggcgaggaggagcagaaatttgaagtcgaaaaatacattgtccataaggaattcgatgatgacacttacgacaatgacattgcgctgctgcagctgaaatcggattcgtcccgctgtgcccaggagagcagcgtggtccgcactgtgtgccttcccccggcggacctgcagctgccggactggacggagtgtgagctctcccggctacggcaagcatgaggccttgtctcctttctattcggagcggctgaaggaggctcatgtcagactgtacccatccagccgctgcacatcacaacaatttacttaacagaacagtcaccgacaacatgctgtgttgctggagacactcggagcggcgggccccaggcaaacttgcacgacgcctgccagggcgattcgggaggccccctggtgtgtctgaacgatggccgcatgactttggtgggcatcatcagctggggcctgggctgtggacagaaggatgtcccgggtgtgtacaccaaggttaccaactaccttagacttggattcgtgacaacatgcgaccgtggaccaggaacacccgaatcctcaaaagcaaatgagatcccgcctcttcttcttcagaagacactggcaaaggcgcagtgcttctctacagacttcttcaagacccaccacaccgcagaagcgggacgaagaccctacaggagagggaagagtgcattttcccagatacttcccattttggaagttttcaggacttggtctgatttcaggatactctgtcagatgggaagacatgaatgcacactagcctctccaggaatgcctcctccctgggcagaaagtggccatgccaccctgttttcagctaaagcccaacctcctgacctgtcaccgtgagcagctttggaaacaggaccacaaaaatgaaagcatgtctcaatagtaaaagataacaagatctttcaggaaagacggattgcattagaaatagacagtatatttatagtcacaagagcccagcagggcctcaaagttggggcaggctggctggcccgtcatgttcctcaaaagcacccttgacgtcaagtctccttcccctttccccactccctggctctcagaaggtattccttttgtgtacagtgtgtaaagtgtaaatcctttttctttataaactttagagtagcatgagagaattgtatcatttgaacaactaggcttcagcatatttatagcaatccatgttagtttttactttctgttgccacaaccctgttttatactgtacttaataaattcagatatatttttcacagtttttccaaaaa

SEQ ID NO: 15709 - DNA, 468 bp, Homo Sapiens
  misc_feature (107)..(107): n is a, c, g, or t
acccagaaaacatgaacagatacgattgtggatttttatcatctgtgtagtaggtgtgtgtatgtgtttctagagtgagatttgtgtttttctgcccttttcctctnccagccgatgggctggagctgggagaggtgctgagctaacagtgccaacaagtgctccttaagcctgcgaggcccaggcctgtggggctggttctcacctttgacagctgaatgttcctaaagaactgctgccccacagtgagggtgggagcagcggaacagggaatgccagacacaggctcgctgctgctggaaggcggggtgggacttccttcctctgtccggagaggcacaggtgtcaccagttccagccaaaggctcctcacaggcgctgtgaatttttgtacaagtcttgtaattatcgaatcaacaacttgtttcaatttaataaaaatgctcactgtggggaatgggggaccac

SEQ ID NO: 15710 - DNA, 1216 bp, Homo Sapiens
tcccggcaggctaaggctcgccacgagaacaagcagcacaaacagacgctcagcgagcatgcccgggagcggaaggtgcctgtgacgaggattggcaggctggccaacttcggaggtctggccgtgggcataggcttcggggcactggcagaggtcgacaagaagagcctgcgctacgagggcccctcagggaagaaggccgtgctgggttacagtcctttcctgtccgagaccaatgcagagcggatcgtgcgcacgctctgcaaggtgcgtggtgcggcactcaagctggcccagatgctgagcatccaggatgatgcctttatcaacccccacctggctaagatcttcgagcgggtgcggcagagcgcggacttcatgccactgaagcagatgatgaaaactctcaacaacgacctgggccccaactggcgggacaagttggaatacttcgaggagcggcccttcgccgccgcatccattgggcaggtgcacttggcccgaatgaagggcggccgcgaggtggccatgaagatccagtaccctggcgtggcccagagcatcaacagtgatgtcaacaacctcatggccgtgttgaacatgagcaacatgcttccagaaggcctgttccccgagcacctgatcgacgtgctgaggcgggagctggccctggagtgtgactaccagcgagaggccgcctgtgcccgcaagttcagggacctgctgaagggccaccccttcttctatgtgcctgagattgtggatgagctctgcagcccacatgtgctgaccacagagctggtgtctggcttccccctggaccaggccgaagggctcagccaggagattcggaacgagatctgctacaacatcctggttctgtgcctgagggagctgttcgagttccacttcatgcaaacagaccccaactggtccaacttcttctatgacccccagcagcacaaggtggctcttttggattttggggcaacgcgggaatatgacagatccttcaccgacctctacattcagatcatcagggctgctgccgacagggacagggagactgtgcgggcgaaatccttcctctgtccggagaggcacaggtgtcaccagttccagccaaaggctcctcacaggcgctgtgaatttttgtacaagtcttgtaattatcgaatcaacaacttgtttcaatttaataaaaaagctcatggga

SEQ ID NO: 15711 - DNA, 915 bp, Homo Sapiens
gggggcttgcggctcgggtggctgagcgcgcggggaaatggccacggggacagaccaggtggtgggactcggcctcgtcgccgttagcctgatcatcttcacctactacaccgcctgggtgattctcttgccattcatcgacagtcagcatgtcatccacaagtatttcctgccccgagcctatgctgtcgccatcccactggctgcaggcctcctgctactcctgtttgtgggactgttcatctcctacgtgatgctgaagaccaagagagtgaccaagaaggctcagtgaaggtcccgcagggatgaggctgccagccccttctctgcttcccctccagcacagggaccaagtgggggagcctgcagaacctgtccaggcacagtggctcctcaagcctgcctgtcctgcagagtccccatggcatggagcttacacctgactgactggagccccctccccgactcccacttccagaagctaggagggagggatacctggaagactccggtcacctccttcttgctcagggcctaaaagatgctggtcctcccaacctcactctcagactccctgccaccttttcccctgggttctgccgtcttgcctcacttcccctcctgtcacatgctgacgttggacttagcaggttctaaggccacatgtgtgacctctctgacttctcttcctccaccaaggcagctttccttaccctgacacagccccagaccccacaaagccttctggacctggaaagcctggggaaggactgacagaccccaggaccagccctggggctcagggcagccaccccgggccgctgaccgactgacctctcctcacggaggcccagccccaaagccccagggctggcccgtttgggacagctgaccaataaacactgatggtgtgtt

SEQ ID NO: 15712 - DNA, 1086 bp, Homo Sapiens
ggaaatggtgagattggcaccgtgtgccggagataggggcgtctgggggtggggtcccgggtctgctcaggagctggggcatgggcacttggaacggggattgctctcccgcccccactattgtacggacgacaacgcggaggcctagcattctctcccagcctagaaactgatccctagtcagccctctaccatctgttgaatgggaagcttagaccgtgatcgggccgcgacgccccgcttccattagtgcgccgaaatagagggtcacttcgtcagctgagacctcccttttctccaggccacggggacagaccaggtggtgggactcggcctcgtcgccgttagcctgatcatcttcacctactacaccgcctgggtgattctcttggtatgtcattctccccgtccgctgctcaccttccccgagccctggcaccgccagagcaactactatataggctctaggcacggcgctggcttcattgcctgcctcatctcttgaactctccagaacaactctatgaggaagatgccagtggtaccgcattttatagatgagatagctgaggctaggggagaaggatctggcccaagattgcatccttagccgctacacttataactctgtttccggcttgctttgacttttgggggagttctgttccttctgggttagcctgctgactcttaggcatggcaaacgccagtgatatttgtgaaggcctttaggatatttttttcttgtgggaaaacttgttggttattgcttaagaagtgcagtgtgtctggaagtgcagaacttggtatcctttagagaaaaaatattggtgaagaagccctggaggcccaggttgggagtcagtcgaggattcctcaagtaccatttgctaggctgtgaggtgccttagggcaggtctcttgtgccctgttctcttgtccccaccaccaacctatagcaggcaccaaagcaagtgcccggtaaataccaataagaaattaaggaaagaaacaaacacgaaactcaaatgccgtaatcttaaagaaaagcaaatgcagtcccagtcctctgaatgggtcagccct

SEQ ID NO: 15713 - DNA, 474 bp, Homo Sapiens
tgcttcgacggctaccgcctggacatgacccgcatggcctgcgttaacatcaacaagtgtgatgaggccgaggctgcctccccgatgtgcgtcaacgcgcgttgcctcaacacggatggctccttccgctgcatctgccgcccgggattcgcacccacgcaccagccgcaccactgtgcgcccgcacggccccgggcatgagccttggcacccgatggccgcccacccgcgcccgccactcggggcccctgccgcgcatcctgcagcccgcttatgcgtatgtgcacggggccgcccgcctggacctggagaagggacctacggacgcctggaagctgcgacgccctgcactgctcccgcctccaccagcgcctcccactgatgtcgtggtcccgggcctggcccaggggcccctttacatgccctctcccttttataaaattttccattaaaaaccacctattttctaaaaaa

SEQ ID NO: 15714 - DNA, 1012 bp, Homo Sapiens
  misc_feature (58)..(58): n is a, c, g, or t
  misc_feature (114)..(114): n is a, c, g, or t
  misc_feature (728)..(728): n is a, c, g, or t
  misc_feature (733)..(733): n is a, c, g, or t
  misc_feature (849)..(849): n is a, c, g, or t
cagaatgtgaccgagtgtgaaacactaccagggtgtatgtgaagctgccctgtgtganaatgtcgaaggctccttccctctgtgtctgccccaacagccgaaaagagtttgacnccatggactggacgctgtgttcccccacgaacttctgctggcacgttcccaggctcgcagccccaggcacctgctagccccgttctgcccgccaggccacctccgccacccctgccccgccgacccagcacacctaggcagggccctgtggggagtgggcgccgggagtgctactttgacacagcggccccggatgcatgtgacaacatcctggctcggaatgtgacatggcaggagtgctgctgtactgtgggtgagggctggggcagcggctgccgcatccagcagtgcccgggcaccgagacagctgagtaccagtcattgtgccctcacggccggggctacctggcgcccagtggagacctgagcctccggagagacgtggacgaatgtcagctcttccgagaccaggtgtgcaagagtggcgtgtgtgtgaacacggccccgggctactcatgctattgcagcaacggctactactaccacacacagcggctggagtgcatcgacaatgacgagtgcgccgatgaggaaccggcctgtgaggcggccgctgtgtcaacactgtgggctcttatcactgtacctgcgagcccccactggtgctggaatgngcccnagcgccgctgcgtctccaacgagagccagagcctcgatgacaatctgggagtgtgctggcaggaagtgggggctgacctcgtgtgcagccaccctcggctggaccgtcaggccacntacacagagtgctgctgcctgtatggagaggcctggggcatggactgcgccctctgccctgcgcaggactcagatgacttcgaggccctgtgcaatgttacgccccccctttacatgccctctcccttttataaaattttccattaaaaaccacctattttct

SEQ ID NO: 15715 - DNA, 606 bp, Homo Sapiens
tcggtcgcgaatccaggttcaacactgtgggctcttatcactgtacctgcgagcccccactggtgctggatggctcgcagcgccgctgcgtcatccaacgagagccagagcctcgatgacaatctgggagtgtgctggcaggaagtgggggctgacctcgtgtgcagccaccctcggctggaccgtcaggccacctacacagagtgctgctgcctgtatggagaggcctggggcatggactgcgccctctgccctgcgcaggactcagatgacttcgaggccctgtgcaatgtgctacgcccccccgcatatagccccccgcgaccaggtggctttggactcccctacgagtacggcccagacttaggtccaccttaccagggcctcccatatgggcctgagttgtacccaccacctgcgctaccctacgacccctacccaccgccacctgggcccttcgcccgccgggagctccttatggggcacccgcttcgacatgccagactttgaggacgatggtgggccctatggcgaatcctgaggttcttgggcaccttgcccggggaaccgctggccctattggttccgggaaaccggcctcgtgcc

SEQ ID NO: 15716 - DNA, 598 bp, Homo Sapiens
cttgcggccgcggggcagcggagggcgccggcactccggtccccgccgctccccgtccccgctgctcctagcccctgccgcgtccccggcggagcgggcatggcgccacccgcggcgcctggccgggaccgtgtgggccgtgaggatgaggacggctgggagacgcgaggggaccgcaagccccggaagcgtccccggcggacggaagaaggcgccaccgcgcgcatcaaccgagaccctgtgggcagtgagatgaggacggctgggagactcgagggcaccgcaagtgcaggccaagctggagaacgccgaagtgctggagctgacggtgcggcgggtccagggtgtgctgcggggccgggcgcgcgagcgcgagcagctgcaggcggaagcgagcgagcgcttcgctgccggctacatccagtgcatgcacgaggtgcacacgttcgtgtccacgtgccaggccatcgacgctaccgtcgctgccgagctcctgaaccatctgctcgagtccatgccgctgcgtgagggcagcagcttccaggatctgctgggggacgccatggcggggccacctagagcccctggacggagtggc

SEQ ID NO: 15717 - DNA, 833 bp, Homo Sapiens
gagcaactgagaagccaagactgagccagcggccccggcgcagcgaacgagcagtgaccgtgctcctacccagctctgcttcacagcgcccacctgtctccgcccctcggcccctcgcccggctttgcctaaccgccacgatgatgttctcgggcttcaacgcagactacgaggcgtcatcctcccgctgcagcagcgcgtccccggccggggatagcctctcttactaccactcacccgcagactccttctccagcatgggctcgcctgtcaacgcgcaggacttctgcacggacctggccgtctccagtgccaacttcattcccacggtcactgccatctcgaccagtccggacctgcagtggctggtgcagcccgccctcgtctcctctgtggccccatcgcagaccagagcccctcaccctttcggagtccccgccccctccgctggggcttactccagggctggcgttgtgaagaccatgacaggaggccgagcgcagagcattggcaggaggggcaaggtggaacagttatctccagaagaagaagagaaaaggagaatccgaagggaaaggaataagatggctgcagccaaatgccgcaaccggaggagggagctgactgatacactccaagcggagacagaccaactagaagatgagaagtctgctttgcagaccgagattgccaacctgctgaaggagaaggaaaaactagagttcatcctggcagctcaccgacctgcctgcaagatacctgatgacctgggcttcccagaagagatgtctgtggcttccttgatctgactggcaacctctggcaggccccca

SEQ ID NO: 15718 - DNA, 1019 bp, Homo Sapiens
  misc_feature (920)..(948): n is a, c, g, or t
tgcgttagtcgcgtgaatacagagaaatgatatcgccatggcattacaaaatttgatcagatttgattttctcatcgatattgttccaagagatgaactgaaacctccaaagcgtcaggaggaggtgcgccagtctgtaactcctgccgagccagtccagtactatttcacgctggctcagcaacccaccgctgtccaagtccagggccagcagcaaggccagcagaccaccagctccacgaccaccatccagcctgggcagatcatcatcgcacagcctcagcagggccagaccacacctgtgacaatgcaggttggagaaggtcagcaggtgcagattgtccaggctcagccacagggtcaagcccaacaggcccagagtggcactggacagaccatgcaggtgatgcagcagatcatcactaacacaggagagatccagcagatcccggtgcagctgaatgccggccagctgcagtatatccgcttagcccagcctgtatcaggcactcaagttgtgcagggacagatccagacacttgccaccaatgctcaacagataacacagacagaggtccagcaaggacagcagcagttcagacagttcacagatggacagcagctctaccagatccagcaagtcaccatgcctgcgggccaggacctcgcccagcccatgttcatccagtcagccaaccagccctccgacgggcaggccccccaggtgaccggcgactgagggcctgagctggcaaggccaaggacacccaacacaatttttgccatacagccccaggcaatgggcacagccttcctccccagaggacccggccgacctcagcgcctcctgcaggctaggacactggtgcactacaccccatgcctgggggccgagattctccagcagaaagatgcaatannnnnnnnnnnnnnnnnnnnnnnnnnnnnctctaaggaatcaatatttcaatatgttgagtgtgtgtccaatgctatgaaattaaaatattaaataacat

SEQ ID NO: 15719 - DNA, 506 bp, Homo Sapiens
  misc_feature (409)..(438): n is a, c, g, or t
ttgactggtggttgaggtatctgggacccccaacagctcgagaccatagggagctgcatgcccctctcccagggatgacctcactctctcctctccaccccctcgcagcagctctaccagatccagcaagtcaccatgcctgcgggccaggacctcgcccagcccatgttcatccagtcagccaaccagccctccgacgggcaggccccccaggtgaccggcgactgagggcctgagctggcaaggccaaggacacccaacacaatttttgccatacagccccaggcaatgggcacagccttcctccccagaggacccggccgacctcagcgcctcctgcaggctaggacactggtgcactacaccccatgcctgggggccgagattctccagcagaaagatgcaatannnnnnnnnnnnnnnnnnnnnnnnnnnnnntctaaggaatcaatatttcaatatgttgagtgtgtgtccaatgctatgaaattaaaatattaaataac

SEQ ID NO: 15720 - DNA, 1281 bp, Homo Sapiens
  misc_feature (338)..(370): n is a, c, g, or t
  misc_feature (1039)..(1039): n is a, c, g, or t
  misc_feature (1102)..(1102): n is a, c, g, or t
ggcacgagccaatggcccatttggagaagactcaccttcttggccttggagatggaaggaaccttcgtacgaaaaagccttaacagggccatctgtggccctgcccatcaccaactgcttcccaagggtgtcatcctgttcctcatgctggccgcctccatgcctgggcctgcattgcagctggccccttccctgcctgctgtcaccatccactgtttgacattccagctggtggccaagagattggtgtggaggcagaaagaggaaggagacagtgccaggaggaagaaggaaggagtcccttagctctcttcattgtcccctttacttcctgctannnnnnnnnnnnnnnnnnnnnnnnnnnnnnnnnatgcctgtatttctggcaatatgacaggcctgcctacccaagatcagaactccaaaaccactcccacccctgaaggtcgggagggtctgagcagccctggtggctgcctgtgctcaggtcctcagctccatgggaaataaaaatggcaccctgaatctctaggattttgtcacttggagtcacagcaaagttctcttcctcttgtccccccgttgctgctccttggttatagaacatggtaaatatttattactttcagagaaaccagatattttatagaggaaatatgtttgaggtgagttgtttttcacttggagaaggcggagggctcttcctgggacggagacctcctcctccggaggttattgagaatccgggctgctgctttgaggatcttcccaccatacagacagcgagatccaagaagagggctggccgggggcaaagtcacctcccagtgtggctgcactggaactgactaaaggctttaccttggatagttgcgtattcctggtgagagccttacatctcccacagtttctgcagagtgactgactccattctggcagcccaggaagtcctgggtgctaaatgtgatggccacatgtagtggttaggggatgttgtgtgtgtcccccaactgcctgggtacttgttcctgatccctgnggctgtcctggggagcttttcctcctgcttgggcctagctaccatctccctctaatcccaggntctctaccctgccctgggggtttaccagcttggattggctttctggtttgagcaaatcaaagctggggcgtatggattgactttaacccttccaggtattgcttaccttgaaataagtccaggtgccctagccctcaccccaacctatggattctgtccctttttccccagccttcggc

SEQ ID NO: 15721 - DNA, 694 bp, Homo Sapiens
tttcgctggcagcagctgtgcttcagtggagcaggtggttctcagctgcttgttagtatactgcatgtgacactgttcccacatacaaggctgacttctgaggattggagcaggctctggcggggaccagagctctgcgtgctgctgctgccaccaagaagtgttagcagaagcagtagcagccaactggccctcctgactttggcccagagcacatgcgtggcttgctgaacccaggctcaggtttatccccaaggccccagctttgagaagggggaaggcccctggtaagttattgatgcccccatatttcagctactgctctctttccaaggccttgcatggaaaggcctagccattgtctgaggcagcaatctttggcatctacaggtggcagcagcctttcaccagggctccatctgtgaagagtctcagccatgactttgagctgagcttgggagaagtaaagcaactgttaaggccagcccttgcccctcagacctgccatgaaaggaatgagccctagactgactcctgcagcacccccgggacaggctgggaccagctgtttgtctccaggtgtcagagtccctcctcctcctccaacctctccaacctactttgtttggaaataccgagctacacttcaaaatgtattcaagggatttccaataaatttttttctgtactttac

SEQ ID NO: 15722 - DNA, 743 bp, Homo Sapiens
gcggccgcgaccctccagccgctgcagcgcggacggcggcatctcgtcgtagaggcggtaggacaggttccgcaggacgcacaccgcgttctccacgctcttgtcctcgcatttgcccgcgtccagggcgtggttgatagaggtgaccagggcgtccaccagcccgtggcactcccgcatcttctggcgagtggcctgagaggctgagctgaggttcctgaggaagccggtggcgttgtagaagatctccgcctccgaggcgttctgctggatgagggggggacccccagcccccgacagggggctcaacaccaggtctgtgagctgctccagcgtgtctctggccaggcggtccttcaggtggtcgctggatgaaaggttccacaggatccctgtgacatttttgcgaagctcatcatcctgctcccgcagtgtccgcagcagctcgaagatcccgttctcctccaccagggccagcttgttgtcagcgttgtcgtagatgaggttgcgcatggcacctgtggcatggcgctgcacttcctggttggcgtggttgaagagcttcaccagcctaggcacgggctgaatgctgcgggcctgcttcttggcggctgcatcgctgtagcacttgtgctggatgtaggccgctcacagcacctgcatgatgggggtctgagccatgaggtacttgacttgtgagggcaggtcatggcatcaaaaccgctgctgggtctttgcagggt

SEQ ID NO: 15723 - DNA, 743 bp, Homo Sapiens; identical to SEQ ID NO: 15722

SEQ ID NO: 15724 - DNA, 684 bp, Homo Sapiens
acccagtcagctactgctcctcagcaggaagcggatgctgaggtgaacacagaaacactaaataagtcctcccaggggagctcctcgagcacacaatcagcaccttcagaaacggccagcgcctccaaagagaaggagacgtcagctgagaaaagcaaggagagtggctcgacccttgacctttctggctccagagagacgccctcctccattctcttaggctccaaccaaggctctgaccattcccggagtaataaatccagttggagcagcagtgatgagaagaggggatcgacacgttccgatcacaacaccagtaccagcacgaagagcctcctcccgaaagagtctcggctggacaccttctgggactagcagtgaatcgggacacaaaccacccaccccattgggagaaaaacccagacgccaggaaaagaagaaacaacaaaggcaggagaacagccactttcagacttgaaaatgacaaaaccctcagttgagcctgagcccccggcgcgggggctgctacactacaggacacccagcatcggctttgactgcagactgttcacccacacgagccctgtgcttttggtgtaaataatgtacaatttgtggatgtcattgaatctagaggactttcccctttttatatttgtattaactttaacttattaaaaaaaa

SEQ ID NO: 15725 - DNA, 810 bp, Homo Sapiens
  misc_feature (588)..(588): n is a, c, g, or t
  misc_feature (593)..(593): n is a, c, g, or t
  misc_feature (652)..(652): n is a, c, g, or t
  misc_feature (762)..(762): n is a, c, g, or t
tgggtgtcctgtagtgtagcagcccccgcgccgggggctcaggctcaactgagggtttgtcattttcaagtctgaaaatggctgttctcctgcctttgtatgtttcttcttttcctggcgtctgggtttttctcccaatggggtgggtggtttgtgtcccgattcactgctagtcccagaaggtgtccagccgagactctttcgggaggaggctcttcgtgctggtactggtgttgtgatcggaacgtgtcgatcccctcttctcatcactgctgctccaactggatttattactccgggaatggtacttctgggcggggtagttggggtgcggctggtggtctgtggtggttggggcataggcaggttgcttgtcacaccttttgctaacagagccttggttggagcctaagagaatggaggagggcgtctctctggagccagaaaggtcaagggtcgagccactctccttgcttttctcagctgacgtctccttctctttggaggcgctggccgtttctgaaggtgctgattgtgtgctcgaggagctcccctgggaggacttatttagtgtttctgtgttcaccntcaanatccgctttcctgctgaggagcagtagctgactgggtgcaggacttcatgtgctcaggncagtgggcttgctggcaggggtagtcacagtagctggtgttccaacagcagtaaaagatggcctccttcttgcagttggcgcaccactgcttcttcttggtctcatccancgcctgctgcttctccaactccagctgcttcttcacctcggcgatgag

SEQ ID NO: 15726 - DNA, 592 bp, Homo Sapiens
tggtttaatggcagataagctccgtccgcagttccaggccagccagaaactcctgtgtccacatagagctgacgtgagaaatatctttcagcccaggagagaggggtcctgaccttaaccctttcctgggtctcagacaactcagaaggttggggggataccagagaggtggtggaataggaccgccccctccttacttgtgggatcaaatgctgtaatggtggaggtgtgggcagaggagggaggcaagtgtctttgaaagttgtgagagctcagagtttctggggtcctcattaggagcccccatccctgtgttccccaagaattcagagaacagcactggggctggaatgatctttaatgggcccaaggccaacaggcatatgcctcactactgcctggagaagggagagattcaggtcctccagcagcctccctcacccagtatgttttacagattacggggggaccgggtgagccagtgaccccctgcagcccccagcttcaggcctcagtgtctgccagtcaagcttcacaggcattgtgatggggcagccttggggaatataaaattttgtgaagacttggaaaa

SEQ ID NO: 15727 - DNA, 1043 bp, Homo Sapiens
gaacaggacagcatgtaccggctgctggagctggaggcacagactcacggagacatcctgcagtgggacttccacgactccttcttcaacctcacgctcaagcaggtcctgttcttacagtggcaggagacaaggtgcgccaacgccagcttcgtgctcaacggggatgatgacgtctttgcacacacagacaacatggtcttctacctgcaggaccatgaccctggccgccacctcttcgtggggcaactgatccaaaacgtgggccccatccgggctttttggagcaagtactatgtgccagaggtggtgactcagaatgagcggtacccaccctattgtgggggtggtggcttcttgctgtcccgcttcacggccgctgccctgcgccgtgctgcccatgtcttggacatcttccccattgatgatgtcttcctgggtatgtgtctggagcttgagggactgaagcctgcctcccagcagcggcatccgcacgtctggcgtgcgggctccatcgcaacacctgtcctcctttgacccctgcttctaccgagacctgctgctggtgcaccgcttcctaccttatgagatgctgctcatgtgggatgcgctgaaccagcccaacctcacctgcggcaatcagacacagatctactgagtcagcatcagggtccccagcctctgggctcctgtttccataggaaggggcgacaccttcctcccaggaagctgagacctttgtggtctgagcataagggagtgccagggaaggtttgaggtttgatgagtgaatattctggctggcgaactcctacacatccttcaaaacccacctggtactgttccagcatcttccctggatggctggaggaactccagaaaatatccatcttctttttgtggctgctaatggcagaagtgcctgtgctagagttccaactgtggatgcatccgtcccgtttgagtcaaagtcttacttccctgctctcacctactcacagacggggatgctaagccgtgcacctgctgtgggtggccgaatt

SEQ ID NO: 15728 - DNA, 674 bp, Homo Sapiens
gcggccgccgggcagcggtccagacccagtacttattatgaactgttgggggtgcatcctggtgccagcactgaggaagttaaacgagctttcttctccaagtccaaagagggacaggcaaagggagataaggggagtcctgccccaccccagctgcacccagaccgggaccctgggaacccaagcctgcacagcagcaacacaaacaaaacaaacaagtgctggggtactgcctcctcctcatgctggcgggcatgggcctgcactacattgccttcaggaaggtgaagcagatgcaccttaacttcatggatgaaaaggatcggatcatcacagccttctacaacgaagcccgggcacgggccaggtctgtccctgctctattctgctccctgctccctgtccaggaaccacacttcgggatccctatcccaaccacccaggtgccctctcctccagggccaacagaggcatccttcagcaggagcgacaacggctagggcagcggcagccgccaccatccgagccaacccaaggccccgagatcgtgccccggggcgccggcccctgaggggctcacctggatggggcctgcagtgcgttcccgctttgcttccttccctggacggcccgctccccgaaacgcgcgcaataaagtgattcgcagaaaaaaa

SEQ ID NO: 15729 - DNA, 1202 bp, Homo Sapiens
  misc_feature (353)..(416): n is a, c, g, or t
caaagacaacagccacagacaaaaaaaacttaggtctacgtacgaggctcggtggttaatcggcacgaggcagtccctgggtgggaacggggtcttggggtcctggctgggtggccagaccccgaagccagcgctgggaagggctgcggatgcccgggtcagaggaatggggcaggtccaatggacactgcgggtctggtcctgtggcaagaacctgccccctctcctgggcctgcttcagtcttcctttgcagaacaacgtggccaggccccttccctctgcccccgtggatgcttgaagtctagccccatcctggtccaatgcgctcttggtagcctcctttcccagctgnnnnnnnnnnnnnnnnnnnnnnnnnnnnnnnnnnnnnnnnnnnnnnnnnnnnnnnnnnnnnnnnaaccctccctcccggctcctcggagcggccgccgggcagcgtgccagacccagtacttattatgaactgtatgggcggtgcatcctggtgccagcactgaggaagttaaacgagcttatcttctccaatgtccaaagagctgcacccagaccgggaccctgggaacccaagcctgcacagccgctttgtggagctgagcgaggcataccgtgtgctcagccgtgagcagagccgccgcagctatgatgaccagctccgctcaggtagtcccccaaagtctccacgaaccacagtccatgacaagtctgcccaccaaacacacagctcctgaacaccccccaacgcacagtactggtcccagtttcacagcgtgaggccacaggggccccagttgaggcagcagcaacacaaacaaaacaaacaagtgctggggtactgcctcctcctcatgctggcgggcatgggcctgcactacattgccttcaggaaggtgaagcagatgcaccttaacttcatggatgaaaaggatcggatcatcacagccttctacaacgaagcccgggcacgggccagggccaacagaggcatccttcagcaggagcgacaacggctagggcagcggcagccgccaccatccgagccaacccaaggccccgagatcgtgccccggggcgccggcccctgaggggctcacctggatggggcctgcagtgcgttcccgctttgcttccttccctggacggcccgctccccgaaacgcgcgcaataaagtgattcgcagaaaaa

SEQ ID NO: 15730 - DNA, 396 bp, Homo Sapiens
gggcggggcctggttgtggcccctccttctcccgtccccaagttccctgggtgggaacggggtcttggggtccctggctgggtggccagaccccgaagccagcgctgggaagggctgcggatgcccgggtcagaggaaggggcaggtccaaggacacgcgggtctggtcctgggcaagaaccgccccctctccgggcctgcttcagtcttcctttgcagaacaacgggccaggccccttccctctgcccccgggtgcttgaagtctagccccatcctggtccaatgcgctcttggtagcctcctttcccagctgcccgcccgccgccatgccgcccttactgcccctgcgcctgtgccggctgtggccccgcaaccctccctcccggctcctcgga

SEQ ID NO: 15731 - DNA, 581 bp, Homo Sapiens
ctgcccgccgtgaagatcccccagcaggccgagctggtggacgaggatgccatgtcacagatccgcaaaggccacgacaccatgtgtgtggtgctcaccagccgccacaagaacctggacactgtgcgggctgtgtggaccatgggcgacatcaagacgtcggtggactccgctgtggccatcaacgacctgtcggtggtggtggacctcctgaacatcgtcaaccagaaagcgtaagtggctgcagagggggagtgggcggaggggcagggctgggctgatggcagcatgtcctggcctctcctagctccctgtggaagctggacctgtgcaccaccgtcctgccacagattgagaagcttctgcagagcaagtatgagagctacgtccagacgggctgcacctccctgaagctgatcctgcagcggtttctgcccctcatcacagacatgctggcggccccaccctctgtgggtgtggatatcagcagggaggagaggctgcataagtgccggctctgctacaagcagcttaagagcatcagcggcctggtcaagagcaagtcaggcctgagcggccgc

SEQ ID NO: 15732 - DNA, 592 bp, Homo Sapiens
agcggccgctcaggcctgacttgctcttgaccaggccgctgatgctcttaagctgcttgtagcagagccggcacttatgcagcctctcctccctgctgatatccacacccacagagggtggggccgccagcatgtctgtgatgaggggcagaaaccgctgcaggatcagcttcagggaggtgcagcccgtctggacgtagctctcatacttgctctgcagaagcttctcaatctgtggcaggacggtggtgcacaggtccagcttccacagggaggctttctggttgacgatgttcaggaggtccaccaccaccgacaggtcgttgatggccacagcggagtccaccgacgtcttgatgtcgcccatggtccacacagcccgcacagtgtccaggttcttgtggcggctggtgagcaccacacacatggtgtcgtggcctttgcggatctgtgacatggcatcctcgtccaccagctcggcctgctgggggatcttcacggcgggcaggaagtcggaggccttcagcccgatgggctcgttccgggtggcagggatgatggcaggctcagccttgggtgcaggtgtggaagc

SEQ ID NO: 15733 - DNA, 860 bp, Homo Sapiens
ctcaaattggctgagttgagaaagcagccccagtagttccattcttgcccagcactttctgcattccaaacagcatcctacctgggtttttatccacaaaggtagcggccacatggtttttaaagtatgagaaacacagtttgtcctctccttttatccaagcaggaagattctatatcctgatggtagagacagactccaggcagccctggacttgctagcccaaagaaggaggatgtggttaatctgtttcacctggtttgtcctaaggccatagttaaaaagtaccagctctggctggggtccgtgaagcccaggccaggcagccaaatcttgcctgtgctgggcatacaaccctctgctttcacatctctgagctatatcctcattagtgaaggtggcttttgctttatagtttggctggggagcacttaattcttcccatttcaaaaggtaatgttgcctggggcttaacccacctgccctttgggcaaggttgggacaaagccatctgggcagtcaggggcaaggactgttggaggagagttagcccaagtataggctctgcccagatgccatcacatccctgatactgtgtatgctttgaagcaccttccctgagaagggaagaggggatctttggactaggttcttggctccagacctggaatccacaaaagccaaaccagctcatttcaacaaaggagctccgatgtgaggggcaaggctgccccctgccccagggctcttcagaaagcatctgcatgtgaacaccatcatgcctttataaaggatccttattacaggaaaagcatgagtggtggctaacctgaccaataaagttattttatgattgcaaa

SEQ ID NO: 15734 - DNA, 485 bp, Homo Sapiens
aggatcccgaatcttctcccatcagatacataaggatacaagttactgtgtttagtacagtcttgctggaaatagccccaatgctgatgatctgtgttccacataatcatggccaacatttcatggctaatcctatcacggaacagacaattctgatgggagaagactgcgtcttcgtcccatcaggatatagaatcttcctgcttggataaaaggagaggacaaactgtgtttctcatactttaaaaaccatgtggccgctacctttgtggataaaaacccaggtaggatgctgtttggaatgcagaaagtgctgggcaagaatggaactactggggctgctttctcaactcagccaatttgaggtgtgtttggcccattgcagatgctgatggtaagcaaagtctggcctttcctcttctgaagtcgtatccaccttcaaaaagctacccatgtatgaagatgaccctcactggtgttacact

SEQ ID NO: 15735 - DNA, 556 bp, Homo Sapiens
  misc_feature (225)..(261): n is a, c, g, or t
gcggccgcggcgtgacatcggcaccatcctgcagatcctgaacgacctcctgagctgtgaatcccctgggcagggggcgacaactccgtgtagcattaacccccgtggcggggtccgctgctggtctaatttggaccccctgcctctcagtgcccctgccctaggggtgtctgtctccagaggggagggacaaatcccctactggggccatttcaatggggtagnnnnnnnnnnnnnnnnnnnnnnnnnnnnnnnnnnnnnaatgataatggagatgtctggacccttcctcaccccacctgtcggtcttgtcctggctctgcctgtcccccaccgttgttctcgtaggtgaaccccaggtcctcaactccccccctttatgtgttgaaagttaatggtttcagatgtgaacatcacgtgttataactgtagcgctgtaaatttttttgtgggagggtgggcagggaggggtcccagagggtagagctcaaggattttgggttttgttttgttttcatttttggcaaaaaaaccccaaccataaaaggaaaaatgt

SEQ ID NO: 15736 - DNA, 840 bp, Homo Sapiens
gggagctgaacatgctccacacctgcccggagatggactgctcccccacggccagcagcagtgccagtcctggtgccagcaccacgtctaccccaggggccagccctgccccccgctcccgaaaacccggcgccgtcatcgagagctttgtgaatcacgccccgggggtcttctcagggaccttctctggcacgctacaccccaactgccaagacggcagcgggcggccgcggcgtgacatcggcaccatcctgcagatcctgaacgacctcctgagcgccacccggcactaccagggcatgcccccttcgctggcccagctccgctgccacgcccagtgctccccggcctcaccggcccccgacctggcccccagaactacctcctgcgagaagctcacggctgccccctcagcctccctgctgcagggccagagccagatccgcatgtgcaagcccccgggggatcggcttcggcagacagaaaaccgcgccacgcgctgcaaggtggaacggctgcagctgcttctgcagcagaaacggctccgtagaaaggcccggcgggacgcgcggggtccgtaccactggtcacccagccgcaaggccgaccgcagcgacagcagtagcagcggggccggcggcagccccagcgaggcctccggcttgggcctcgacttcgaggactccgtgtggaagccagaagtcaaccctgacatcaagtcaagagttcgtggtggcttaggatcttcggatcggccaccctcgcccctcgcaccccaccccagggcgccggggactccgagagccccggagagaacgtggcctgccctccagggctggg

SEQ ID NO: 15737 - DNA, 751 bp, Homo Sapiens
  misc_feature (606)..(654): n is a, c, g, or t
ccaagtggcataggccacttgctactgggggcgatctgctacctgctgctctacacctacctcatcggcgagaagcagcattacctgctctacgtttggcagggcagccaggccagccaagatgaaattacagcatacagcttatcaagccgtcatcctggaccagaagtacaatggtgaaccagtccagatccgggtcccaatgggcaaggagccacctcatcttatgtccatcttcaagggacgcatggtggtctaccagggaggcacctcccgaactaacaacccttaataatgaggcaaagcaagagcctagtgaaggccaatgctaggtttacaaacttacccagaagcctctgcaaagcttcacaggctcctcagatgaaaataacaggaatcaatggggactacggccagacactggtttgccattctgttccttttaagaagtaacagtgctgcaaggaagtccatgtcagaaagccaacagaaggtgatttccacaactttgaacaggttgttacaagtatcagcaagaatgtgtccttttcagaaataacagtcaaatcaaagaaggttaataaaggctttaatttcatacacacnnnnnnnnnnnnnnnnnnnnnnnnnnnnnnnnnnnnnnnnnnnnnnnnncgtaaaggatacagaggaacagttctgctaaaacacagataaaagtgccgctccatacaaaacataaagaatcagaatcaaaagtcactctgaacat

SEQ ID NO: 15738 - DNA, 1193 bp, Homo Sapiens
  misc_feature (500)..(520): n is a, c, g, or t
  misc_feature (705)..(760): n is a, c, g, or t
gacattacggtaggtagcgaggccgggtgtttgaatcggcacgaggctacaggcttgttcatctagctgctccagggggaagatgggcagaggcccagaactgaggttgctgttagcattgaacacgtccactttggggctccccgagggtgtggaccccagcaggaaggaggaacacctgtccattgaagatttcactcaggccttagggatgactccagctgccttctctgctctgcctcgatggaagcaacaaaacctcaagaaagaaaaaggactattttgagaagagtagctgtggttgtaaagcagtaccctaccctgattgtagggtctcattttctcaccgatattagtcctacaccaattgaagtgaaattttgcagatgtgcctatgagcacaaacttctgtggcaaatgccagtttggtttaataatgtacctattccttcagaaagatgataccccaaaaggagcctatggtcctcatttcaacttcnnnnnnnnnnnnnnnnnnnnncactcgaggcatcctagagacggagagagcggaaaaagaggtaatggaactgggcacaatgggccataagcggtaccctggacccagctatacaggtacaacggggaaaatacggcgggaccccctatagggagccgcattaaactcacgataagccgggtaaccggcatagaaaccggagaaannnnnnnnnnnnnnnnnnnnnnnnnnnnnnnnnnnnnnnnnnnnnnnnnnnnnnnngacaaaacaacaggaaaagaaaacgccgggaagagagacacactaagcacagaaagcaaacagcagaaagaacgccacagacaaacgaacagcagggaggcacacgacaacagagacagagagaagacgcggatacaacgcacaccaccacgacacaaaggaagacagaaagacgccggcgcagcgaagagcggcgaccaggaggggagcacaaagagcggaagagagagagagcgaggcgagcgcccgagacgcgccgcaaccagagggcaagggagaggagacccagaacaggacagagggcagcaggatagagaaaagggaagagggaggcgaaaggcggagccacgcagacgacacaggcaccgacggaaaggcgacaccacttggacacaaggagcagacacacaaccgagcgaaaggacgacggaaa

SEQ ID NO: 15739 - DNA, 815 bp, Homo Sapiens
cccagtacttcctcgacaccaacttcctcttcctcagtgggctgatcatggccagcgccattgaggagtggaacctgcaccggcgaatcgccctcaagatcctgatgcttgttggagtccagccggccaggctcatcctggggatgatggtgaccacctcgttcttgtccatgtggctgagcaacaccgcctccactgccatgatgcttcccattgccaatgccatcctgaaaagtctctttggccagaaggaggttcgaaaggaccccagccaggagagtgaagagaacacaggaatagaacccaatactttcctctctgaggaaaggctgaaacttcaagctccccttgtgataagacttggtcagataactgagtctggtcaatggaatatgagtggaaatgatgtgtgcaacttccgggttctgtccttcctgccgggtggaatgtgaatatgatggcacctgggacccaaagacaggagccacatcttgagagatagatggcagatctgcccctgtggctttggatcatttacctcagtgaacacaacaagcattatccatgaaaccataggttttgtgtgctagttctagtttttaaaatatgaattaaattaaatacgtatctgttaaaacttagactgttagaacacaaaaacgagagtactacagcccacacatgccctgacccagacagaactcaggaactgacagggcggggcgaagcaagagagactgctcacgaagggggccccccagtgtgagcccagcccgaatgtgcacacagaagggcccctgtaataacagcgtcaa

SEQ ID NO: 15740 - DNA, 699 bp, Homo Sapiens
ccgtacgccaggcgatcgcgctgatggcggcgctggcagcagcggccaagaaggtgtggagcgcgcggcggctgctggtgctgctgttcacgccgctcgcgctgctgccggtggtcttcgccctcccgcccaaggaaggccgctgcttgtttgtcatcctgctcatggcggtgtactggtgcacggaggccctgccgctctcagtgacggcgctgctgcccatcgtcctcttcccgcttcatgggcatcttgccctccaacaaggtctgagccccagatacttcctcgacaccaacttcctcttcctcatgtgggctgatcatggccagcgccattgaggagtggaacctgcaccggcgaattcgccctcaagatcctgatgcttgtaggagtccagccggccaggctcatcctggggatgatggtgaccacctcgttcttgtccatgtggctgagcaacaccgcctccactgccatgatgcttcccattgccaatgccatcctgaaaagtctctttggccagaaggaggttcgaaaggaccccagccaggagagtgaagagaacacagctgctgtgcggagaaaccggctacacactgtgcccacggagatgcagtttctcgccagcacagaagccaaagaccaccctggggagacagaggttccactggatctgccggctgactccaggaaggagga

SEQ ID NO: 15741 - DNA, 705 bp, Homo Sapiens
gttgaacaactggggcatgtctgcagaaacttaaaaagtatgctgaggcctggataccaccgtcaggcactggtgttgattcctcagaacgcatccacctactctgctattggatatatccacagtctgatgggcaactttgaaaatgctgtggactacttccacacagcccttggtcttaggcgagatgatacattttctgttacaatgcttggtcattgcatcgaaatgtacattggtgattctgaagcttatatcggagcagacattaaagacaaattaaaatgttatgactttgatgtgcatacaatgaagacactaaaaaacattatttcacctccgtgggatttcagggaatttgaagtagaaaaacagactgcagaagaaacggggcttacgccattggaaacctcaaggaaaactccagattccagaccttccttggaagaaacctttgaaattgaaatgaatgaaagtgacatgatgttagagacatctatgtcagaccacagcacgtgactccagtcagtggtcctggtcccactgtcccagtgtaggaacagagacccgccttaagagactggatcgcacacctttgcaacagatgtgttctgattctctgaacctacaaaatagttatacatagtggaataaagaaggtaaaccatcaaaaaagagaggcgataagaagagaagaagcgtggt

SEQ ID NO: 15742 - DNA, 1484 bp, Homo Sapiens
tggtttacccttcctttaattccccctatggtataacctatttggtagggttcagaggaatccggaacccattctgttgcaaaaggtgtgcgatccagtctcttaaggcgggtctctgttcctaaaagtagagatgcagttgggagtcacgttaggaagtgggacattctaagcccatggagaggatgtgaaggaatactaacctacacctgggacagtgggaccaggaccactgactggagtcacgtgctgtggtctgacatagatgtctctaacatcatgtcactttcattcatttcaatttcaaaggtttcttccaaggaaggtctggaatctggagttttccttgaggtttccaatggcgtaagcccagtttcttctgcagtctgtttttctacttcaaattcccaatataagcttcagaatcaccaatgtacatttcgatgcaatgaccaagcattgtaacagaaaatgtatcatctcgcctaagaccaagggctgtgtggaagtagtccacagcattttcaaagttgcccatcagactgtggatatatccaatagcagagtaggtggatgcgttctgaggaatcaacaccagtgcctgacggtggtaatccaaggcctcagcatactttttaagttttctgcagacatgccccaagttgttcaacaaaggttcccatttgtcaactgttacctcgttcccaattgctttaattttttccaaagcatcaagaaaccatttttcggctgttttccattctccattctgaaatgcaaccacgccgacctcatgcataacaaaagggtcttccggtgcaatgctcagagcttggctgaagaacctttcagctagttttgagttattggtcaaaccatattctaatccaatatacagcataggcaaatgacaccctttcatcagctgtgctgctgtgaagtaagcagccatcgcttggtcgtgctcactctccaccgcaaatgaatgtccataggctatccatgcaggtccataggttttctcaagtgttgtggctttgctgagatatcttctggcatgttcatttttatgaccgaccatgagatagtaacatcccactgcaaaccaagacacaggattactaggatataaatccaccagtttatgagaaagatagaaaagttcattggctttattcagctctacaagcgtccctatatgtacaggtaaacaacttgcatggaaaggatctttctccattactacagaagtaagcttgtagcacattttaaaatcacagttataataatgtctctcagctaaagacactaccacatccagattctcttgcaagccatctacagattcagggatgaccgtttcactaggcttattatattttttcaatttgttctcaaatagaaaacgcagcaattcctgttcttcactaccccttagcaagctgtgtaatgaagaacaggaattgctgcgttttctattcttc

SEQ ID NO: 15743 - DNA, 734 bp, Homo Sapiens
tggtacgccctccggattttcccgggatatcgtcgaccacgcgttcggtctgggggacgtgtgtgtcgtgctttttaccatcggtttgacttacagtggagtagaacgagccagagttcctgacttgagcaggtggatttgggcccaggccctgttcactcttgcttctcggtgcggactaatgtcagcttgtggctgggaaagagggatgtgcagtgacgtggtcaccaaggtcagtgagccccgctgaccccgggccagcacttggcaggcaggaggtgcggtctccagagtggtgggccagggcgggctggcctccgtcttctatcttcttttcttgcctccctgaccagcagactcacctcccaagaacgcctgcccgaccaacccgacttaggactcccgatgcgctcctggaaggccccaggagtggcaccttcctggtgggctgcagacactaatggtgttggggggtcttggaacagcttctctatgtgtggattcgtgtaaatgcgaagagttcacatataaagaagtgactttgattctgtgattatattgatttggtacacagtaaatgggagtttaaaaaatccaaagactctaatgacttgtaaagactctaatgatttgtatcatgtaatgaactaaaccacctgtaattttgtaccatatgtgtctttccatcaaatgaccaacagcttctcaataaaaccagaccatttctcacctgc

SEQ ID NO: 15744 - DNA, 607 bp, Homo Sapiens
  misc_feature (42)..(42): n is a, c, g, or t
tccgcaagagacacagttgaggagggggaagatgtttctggncctaccaaggttcaacaagagaacggagctgggaatgtgactgctggagcctgagaggtggaggagttcttgatcccccgttacttcctagcattttctcctcttgccttaaaagttccctgtatgtgaaacgggaagtcctgagagtgtgtgttggtggctgtgcgcacgcacacaagacgggagtcaccctgtgcttcctgcccaagatactgacccattgaacccccaaagcatctttctctccacaaagtccgtggtgccttcctggtgggctgcagacactaatggtgttggggggtcttggaacagcttctctatgtgtggattcgtgtaaatgcgaagagttcacatataaagaagtgactttgattctgtgattatattgatttggtacacagtaaatgggagtttaaaaaatccaaagactctaatgacttgtaaagactctaatgatttgtatcatgtaatgaactaaaccacctgtaattttgtaccgtatgtgtctttccatcaaatgaccaacagcttctcaataaaaccagaccatttctcacctgcaaaa

SEQ ID NO: 15745 - DNA, 1061 bp, Homo Sapiens
gccatttgaaaaggttgtggtgtagttggtctgtaattaagttgcagatttaaaactgctgttagctttgtaaatcaaaatataggtgttttttgtcctggtatatcgtcattccatctgcagctggagctggaatcccattgatcttctagctaccattcattttcttcactgttcacaaaagaagagtgtgaaattcagtgaatgctgttactaatcctgttacgagatgaatctcatttcaccaaaattaaattatgtttttccgctaaaatgatgatacaagttgaagacacatcactctgaaattggaagacctcaccacttaaggctccacagtggcttactcagctgaactctaggttactactctttactttgttcacccattggggggtgcagtttttttaaaatgttgggagatggccattctaactactgttgaatgtctctgttttgggaaggtataacaagaaataaaaaagaatatatatgaagggagagactggttatctcctcccatatggatgtgcttatcctcttatggcttacaaatgaatatttggaggtttgctttcacaatgatttcccatcaacaaatatttttagtaggatttttcctgcttctgctagtccttgcagtactcataaatgttttaagctgagcatactgtaatagtcataagtttaatttcattataataaaaataatcaaacaaaaggactttagaacccaagacaatgagctagctttccctaaagcttgctgaactattaaggaatatgttcttatagcttttgactacaatgagtcatgcgaattctaaaaagggatggcctagacatttttagctcagttaaaattcagcatttaccgcacgtggagttcctggggtcggttttccacctaatctgggaacagtctggttcctgacctcaaactgggattaaagcattattttagggtttctcctcttttccccactctcccacgcccgttataacaccatgccacaatcaaacatggtggacggacattctaatattggaagctacaagtc

SEQ ID NO: 15746 - DNA, 497 bp, Homo Sapiens
atccccaaactggcaggctgtgtattccttcgctgtccagcttcgaccaggattcagagggctgcgagccttctgagggggatgggctcggagaggagggtcttctatctagactctatgaggagccggctccagacaggccaccaggagaaaatgaaacctatctcatgcaattcatggaggaatgggggttatatgtgcagatggaaaactgatgccaacacttccttttgccttttgtttcctgtgcaaacaagtgagtcacccctttgatcccagccataaagtacctgggatgaaagaagttttttccagtttgtcagtgtctgtgagaattacttatttcttttctctattctcatagcacgtgtgtgattggttcatgcatgtaggtctcttaacaatgatggtgggcctctggagtccaggggctggccggttgttctatgcagagaaagcagtcaataaatgtttgccagactgggtgcagaatttaa

SEQ ID NO: 15747 - DNA, 368 bp, Homo Sapiens
gtctctggtggtttgcctaaacctgcaaacatcaccttcttatccatcaacatgaagaatgtcctacaatggactccaccagagggtcttcaaggagttaaagttacttacactgtgcagtatttcatctccagagaagtggaagagaaatccagaagaccttcctgtttccatgcaacaaatatactccaatctgaagtataacgtgtctgtgttgaatactaaatcaaacagaacgtggtcccagtgtgtgaccaaccacaccgctggtgctcacctgggctggagccgaacactcttctatctagactctatgaggagccggctccagacaggccaccaggagaaaatgaaacctatctcatgca

SEQ ID NO: 15748 - DNA, 448 bp, Homo Sapiens
attatttggggtttcttgtgttttttctttgcgactctccacactaaacttgcaatattgtggggagaagctgtgactaaacttttcgcttgcggtgagatgtagcagtaatcagctcccagcgacgtgtgtagctggggctgccgctcgcaataatcactattgatttaaagctttacttagccttgatctgtaccctcgtagtcaataaggtcttgccacattttattagtgaggtggagaaacgtattatttgtttgttgtttttgcccttcccccaccccccaatattaaactgtgaaatttgtgatttgtttaaactctgggtgaatcatagcttagtttgcatgtccagctaatttgtttctatacattttgtttgattctctttctccttctctcagggcttttacaaaaaaatatatatatatggatcttctgaaaaaaa

SEQ ID NO: 15749 - DNA, 441 bp, Homo Sapiens
  misc_feature (332)..(332): n is a, c, g, or t
  misc_feature (396)..(396): n is a, c, g, or t
  misc_feature (422)..(422): n is a, c, g, or t
ggcactttctagttgccaagcatgactcagccatggagaagacagaggtttacagaggaaaacaatgacctataacattcagagaaaagtatagagggtagggcgatgcccagctggcatgccagtccacctgtccaaatccttcacacatttcctattaggcttcttgtagattatcaagattccttgtgcattctagtatattctgtccctcgatagtcgaataaggtcttgccacattttattagtgaggtggagaaacgtattatttgtttgttgtttttgcccttccccaaccccccaatattaaactgtgaaatttgtgatttgtntaaactctgggtgaatcatagcttagtttgcatgtccagctaatttgtttctatacattttgtntgattctctttctccttctctcaggncttttacaaaaaaatatat

SEQ ID NO: 15750 - DNA, 357 bp, Homo Sapiens
tggtcgcctagagtatcccctggctgtacatgagtattgatcagtcttggatgattcattcatagccgactgtcttcgttgagtggtcttcacaaatctcagcagattgatgatggcggcaggtgttactccgggtatgcgactagcagccccgatcgtctgtggacgactaaaatgtagtttctctcgaacttcatgggacaaagacacatccctgatagtcaaataatctaggtcttttggcagttggagagcttcatcttgctgaactccctttatttcttgtagttgatggaacaacactgattcataagtggctggtcaacaaaatcaatagctcatgtacagccaggggat

SEQ ID NO: 15751 - DNA, 1089 bp, Homo Sapiens
tgatgacctcactactctgggcaccagtgaagcataccgcatgtttaccagccgagtagagttccgtttgtcactgcgccctgataatgctgacagccggctcacactgcgagggtataaagacgctggctgtgtgtcccaacaacgatatgaaagagcttgttggatgaagtcttctttagaagaaggcatttctgtgttgaaatctattgagtttttgagctctaaatggaaaaaattaatcccagaggcttctataagtactagtagaagtctgcctgtcagagctctcgatgttctgaagtatgaggaagttgacatggattcattagccaaggctgttccagagcccttgaagaagtatactaaatgtagagagctggctgaaagactgaaaatagaagccacttatgaatcagtgttgttccatcaactacaagaaataaagggagttcagcaagatgaagctctccaactgccaaaagacctagattatttgactatcagggatgtgtctttgtcccatgaagttcgagagaaactacattttagtcgtccacagacgatcggggctgctagtcgcatacccggagtaacacctgccgccatcatcaatctgctgagatttgtgaagaccactcaacgaagacagtcggctatgaatgaatcatccaagactgatcaatacttatgtgatgcagacagacttcaagagagagagttatagctttcaattcataaaagatttttaaagagcatataaataatttgatcaatacaacagtatagataaaagaattatttagcacatgttaaaatagctttattaggttactatgggtttgccattaatttctgagtgggacagaaattataattgtgctttttcgtgtatatgaaaaaactagtcgtaaacaatttgtactctttctttaaggagctgtaatacaaataactttgtgcagtgttcatcaaagagagagacagtgaacctaaaactgaacctggaataaaactcaacatgcagatttgcctactcatagggactttgcctattaagtctaccaaattaaaagtcttatcattcag

SEQ ID NO: 15752 - DNA, 2729 bp, Homo Sapiens
  misc_feature (493)..(522): n is a, c, g, or t
  misc_feature (914)..(926): n is a, c, g, or t
  misc_feature (2442)..(2442): n is a, c, g, or t
tgtgtgcggcaacgttctttcttctgcgcgccgcggacatatggcctgcgcttggtgtttaccaaccccctgtgtatcccacctctgtcaaagcgtctgttgtgtattgttccgcctcctcggggccgttttggaaatctttggtgttcttggcggcgggtgtgtgccggcgcaacgtggttgtgctgcccccccgccgcgcttgtgggtgtggggtgtctctcttgctccgccacaggatggcgcctgcccggataggtccccgatgtttcccctgtcacgagcccgtctgtgtcaaacctccgccgccgcgcggtggcttcggtcgttgtgttgtatatatctcgacggctctcctctattcagtgggccccccctgttttgcgcaccaagaacacgctggggtgccgcggcaatacttcgcggcgccccccgtcgaggggagcatctcctagtggcgcgcccccgcccccctttgttggttgttctttcnnnnnnnnnnnnnnnnnnnnnnnnnnnnnngcattagacacagtttaatcgccttcaaatagatgaaaagttccggtttacactcccccaccgcataagtcatccagacaggaccctggcttagaaagaggaaaacacaggtgctctaggaaatatagccacatataatacataaatcttcttccctgaaatagagcaggtcctgagcagagctgactgggggccacagcccacccccagggtgaagtggctctgggactctgccggtggaagtgctggaagagcggggcttggaggaagcccccagtgtggttaccatagccagaggtgggccgaggccttagggtgagttacccgagagggcaagcagtgctgggctttccctcactcagccgaggcttaatggaagaactggttagcannnnnnnnnnnnngagggtacatcgggggagaggagaggagaggagagcctctctgtgccttggtttcccatttgtgcattcagggcctctgcaggcctcacacagggagtctgaggggatagtgtttaagtgagcactcaggcttcctctgaggaaaagaaatgaccaaagtgcagacttttattactgccattcctgctcctaatgggagcaggagtcaaaaggaaaaacaaattaaaaggggctaatgagaaaggaggagagatgagacagagagtgtgaagggctatgccgctggcatctcataaattcttattgagaatggcacaggtattaaaaaagtttctgggtagtctacgagaaatgtcaattattatctctactacaactacttacatatatctaatgggaaaagagtggggcttaggtgtcagagtggatgggagacaaaggagaagctacactaataaatacaacaagtggaaggtacctgtcccattcctaaaaggatttgtgggcaatgctggcacttggtggccaggagaatcttctgaccccactctccctcctcttcagtcctgaagaccccaagaacccagttaggatcccctggccagaggtctctgtgactgcctctggactcagcacgtgcagcagcttgggaggatttgagccagtctcaaaaacttttagccccagaatgagaccagtgaccccaagcaggagggctgggatctggagggaagagagggggtccaaggggaccctgtggctgaggccatggagaaccagtgccagggcccaagagacccatttttccagttatcagaggtgactgacatcttctgccactgccttgagttcagaaatttaaaaaagcttgcagcaagaaaatgccagtgtgcaactgggtgactaaagaccaaagaaaaacagttaaaagggacagcttacttgctctctgtctcaggtttaacttctcacctgaaatctctcatagccctaattaaacacaaacaaaagtctcttccatagataggctacttctcagcttcagctgcctcctgtggtggctctgggggctctggaggtggcatctcttcgggagtgctgctgtctccggcatctcatttgagttcaggtgttctgtgggggctgggctctgtggcaagaggctgctactggtctcttgagtactgggaggtcgacttccactttcctccagtggcaaaataccccttccgatccagcacactggggggcaaggggccacacagcacttcacagcagttcttcacaatattgccatggctgtagggattctggacgcgattcttccctgtccatgatcctttgatgtcttcattggttgtctggttgagagccacgaggaaagtatgaaatccagtcagtcccacgacggaccagagtgtaaagaagcaaatgaggacttctagaacagttccaggagtttctttcaatgtctccaagaagccaattttcaaagatttgagggccacatagacgnatgttgaaggcgaagacatagatgtgtgaggagggagagagaaaggatgaagaggtagaagtagcggtagttcctctttccaacacaattccccacccaggggcagtgatggtcgaagcgctccacacagttgtcacagatgctgcaatgggaggcccggggaggccggaagatcttgcatgtgtaacagtatttcagtttcacaatctggttgtttatctggaaattcttgatacgaggcggtggtcgctgccctggggcaccgcaccattggtagcttctatctc

SEQ ID NO: 15753 - DNA, 463 bp, Homo Sapiens
  misc_feature (220)..(270): n is a, c, g, or t
aatgtgaacatgtgtgtgtgttgtgttaattctttctcatgttgggagtgagaatgccgggcccctcagggctgtcggtgtgctgtcagcctcccacaggtggtacaaccgtgcacaccagtgtcgtgtctgctgttgtgggaccgttgttaacacgtgacactgtgggtctgactttctcttctacacgtcctttcctgaagtgtcgagtccagtcctnnnnnnnnnnnnnnnnnnnnnnnnnnnnnnnnnnnnnnnnnnnnnnnnnnntcctgaggctggtagcagaatgcacattggaagctcccaccccatattgttcttcaaagtggaggtctcccctgatccagacaagtgggagagcccgtgggggcaggggacctggagctgccagcaccaagcgtgattcctgctgcctgtattctctattccaataaagcagagtttgacaccgtcaaaaaaa

SEQ ID NO: 15754 - DNA, 456 bp, Homo Sapiens
tcagctatgacctacgacagcaacagcaacagcaacaccaacaaaggactggactcgacacttcaggaaaggacgtctagaagagaaagtcagacccacagtgtcacgtgttaacaacggtcccacaacagcagacacgacactggtgtgcacggctgtaccacctgtgggaggctgacagcacaccgacacccctgaggggcccggcattctcactcccaacatgtagaaagaattaacactacacacacacatgttcacattctctgcgaggacagtcaaaataaggtaccaaagggaggataaaacatttttagagaacacaaaagcctactgccctgccccagtaagcgtcaggcccgacacgacagactacccgtggcatcggctagccgatgagctcgacaggctgctgacgttcacacagggcctcccaccagcgtgccatacagaccg

SEQ ID NO: 15755 - DNA, 1581 bp, Homo Sapiens
  misc_feature (132)..(183): n is a, c, g, or t
taccccctggcgtgagaccccactagaggatttctgtgaccctctctcactctctaatttttggcactggactgttccactctgaagggtcacgaaagaaatctggagggtgcacaaatcagggtcaggcgnnnnnnnnnnnnnnnnnnnnnnnnnnnnnnnnnnnnnnnnnnnnnnnnnnnngatccagcagcatccttggaacatcctgaagtcaagaaaggcacagcactgtctgccccgatagaaggaattccagaaaacagccacgaggttgggccacagaatttccaaagagagcaatctacaaactgggggttgatttcccagttcctggatctcagcagtcaacacacgagaaggatttttttctgaagctgccacctccaattctgaaataatcccatgtttcagactggggccgggacgggtggcaaacctgcagaccctggcagcaagatgagggcaaggaagggaaaggtcagctgggcacagtccagttctcagcagtaatgacagaaatgaaggaaggaagctcagaatgagtgcacgggggaaatgggttttgctgatgcatttccagggccggccgtactctttgttttggcacacttttcctgacaaacagccagtgttctcaacacataaatactagtccacgttaacaacaatagcatatgagaccgctctccgtaaagatgccagattggatgcaaatggactggaaataccttggagggtttcacaaaaataagacaaagggcaaaggaactttgccaaaggagatggagagcaattctttaaagttagtgggagggaggaagcaaagagctcataaatacaagcctcttaaaatgggacgcatttgcctcgcgcctactgggtgtctgcagctcagcttggtgccccacacaggacaccgactttaagtggctgcctttgcaaggctgagaggccatgagggttgatgcctgaagtgtcagcgccatctagtggaaacatggggcatggccgctttggacggcctcagcctaaaatgagaggcagagagacacgctctatttcgcatctcacaatgcaagatgagagaaaggctgttgagttttatttcatcatcgcccgtttaggtcaaaggagatgccactttggctcccagtcatcaatcaactggcaacacccaaggaccaggctgggctacatttgcacattccatttcagcccaggtagagatggagacacttataagaacggcttcggaatgttctccagtttgattctcagatgtcaaagcctgtaggccatgagaggtccctacttaaacagaacagctatcctttggtaccctctccaaagaaaagaaagagtaaaaaaataataacttttaaaaatagcttatttatgtgcagaaggtgtgagacctgaagatgagttaacagccgcagcagtgggaggaggggtgacaggtactgctcaaatgagcagcaaccttctgccacctggcaagaacaggcgttcagtgcagggctggcctgcccctgcaggcttcagagaccactgcgtttcttagaagggaaacaacgg

SEQ ID NO: 15756 - DNA, 1617 bp, Homo Sapiens
  misc_feature (1541)..(1541): n is a, c, g, or t
  misc_feature (1569)..(1569): n is a, c, g, or t
  misc_feature (1579)..(1579): n is a, c, g, or t
gaagcaaggcaagatgactttgtaagcagattccaaagcatcatcagattgttgcatggctttacttcaggatatatttggccctttagaagaagatgtcaagcaggaacatttttctaaaccaggaggttaccgtctctttactcagaagctgcaggagctgaagaataagtactaccaggtgccaaggaaggggatacaggccaaagaggtgctgaaaaaatatttggagtccaaggaggatgtggctgatgcacttctacagactgatcagtcactctcagaaaaggaaaaagcgattgaagtggaacgtataaaggctgaatctgcagaagctgcaaagaaaatgttggaggaaatacaaaagaagaatgaggagatgatggaacagaaagagaagagttatcaggaacatgtgaaacaattgactgagaagatggagagggacagggcccagttaatggcagagcaagagaagaccctcgctcttaaacttcaggaacaggaacgccttctcaaggagggattcgagaatgagagcaagagacttcaaaaagacatatgggatatccagatgagaagcaaatcattggagccaatatgtaacatactctaaaagtccaaggagcaaaatttgcctgtccagctccctctccccaagaaacaacatgaatgagcaacttcagagtgtcaaacaactgccattaaacttaactcaaaatcttataatcgatcgaaaaagataagaaaaagcatgtcgggccgccttcggccctcgaataagtttttctagacccttccgctgggcgccgcgggccacggaaggtcaaagggaatatgggccataggcgggttctcctaggccaattccggggcctgggacgagcgggctgggtatccttccccacataaacaaacggcccgggggtaaacctaatacgggctcctgagctgaacttctaagatgggcctaggcgcaggtgcagtgaacgcgggaccgcgtggaacggggacacccatagaagagggcgtcggagaaggcgaaaagtctaagagccactgcgggtgagaagctgcccaggccgagaccggtggtaggaaggaatcatctcaaaacaattatcgcaagaagaattggggcgagctgtagagatagatgcgcggtccaggagattagcattctaggagccggagaagtgaagtgccgcaatcatccgccctcataggtgtgcatgactccgtagcatgtgacgcccagcagctatgcgcaccggcttaaacgtgacgacccgcattatctaatcgtattgtacgcatcatacgttgacgaagcggatttcgacgtagaacgggagttttggagtatcaagatcctatggtaccgcagtctatgagagggcaaccgccgggaagagcacacttagagcgcaccgcattagaggtgtaaggtgagaatccacgagtgcacatcacgaatgacgtgagcgagacactagagatacaccacagacaggacggagaatatatacacatcactacancgtgcgcggctgagacgcccgtattgcncgcggtgtcnagtgtatattacgcgtcgactcacatgaagcacgagat

SEQ ID NO: 15757 - DNA, 793 bp, Homo Sapiens
aggtagcggcccagctagaggaaaagcgggatgacttttgtaaacagaatcaggaagcatcatcagatcgttggtcaggtttagttcaggtcattgtcagtcctctagaagaagaagtgaaggcgggaatttattcgaaagccagggggctatcgtctctttattcagaagtctacaagaccggaagaaaaagtactatgaggaaccaaggaaggggatacaggctgaagagattctgcagacatacttgaaatccaaggagtctgtgaccgatgcaattctacagacagaccagattctcacagaaaaggaaaaggagattgaagtggaatgtgtaaaagctgaatctgcacaggcttcagcaaaaatggtggaggaaatgcaaataaagtatcagcagatgatggaagagaaagagaagagttatcaagaacatgtgaaacaattgactgagaagatggagagggagagggcccagttgctggaagagcaagagaagaccctcgctcttaaacttcaggaacaggagcaactactaaaagagggatttcaaaaagaaagcagaataatgaaaaatgagatacaggatctccagacgaaaatgagacgacgaaaggcatgtaccataagctaaagaccagagccttcctgtcacccctaaccaaggcataattgaaacaattttagaatttggaacaagcgtcactacatttgataataattagatcttgcatcataacaccaaaagtttataaaggcatgtggtacaatgatcaaaatcatgttttttctt

SEQ ID NO: 15758 - DNA, 413 bp, Homo Sapiens
  misc_feature (276)..(294): n is a, c, g, or t
aggttacgggcaggacttgagtggcttcggacagggcttctcagaccccagccagcagcctccttcctacgggggtccctccgtgccagggtcggggggcccccccgccggcggcagcggctttggacgagggcagaaccacaacgtgcaagggttccacccctaccgacgctagcccgcggcgccgcgaagtcttgcacggcccagacccaggattccaaacttgtgaactcgtgacaatcacaaacttggcggcaaagtggcgactcaaccttnnnnnnnnnnnnnnnnnnnagggcgcgaggcttttggagcggctgtgggtgtcgtctggactgaggtttttaaatatttctttctctaacccatcagcacaataaaaaaaagtcactggttcaacaacagggtttaaa

SEQ ID NO: 15759 - DNA, 612 bp, Homo Sapiens
cagaggatcgccagtatctgtgtcccatcagcataataaataaaagtcataggttcaacaacagggtttaaagaaaaatgtcttcagctttaatgcaagaacttcaggtttctttttcttccttttgttgggaaattattttcctgagcctttggtttaacggtatattgtaaactttgatgttaaagaaaaaatatacatttacaaattgtgagatttttaagagaaattttctacgatgtatactggcttatttttaaaattaaaacggggtttccgtcggcactggtggagggggtgcgctgttagtcccctcgctcctggctttgggggttgggacttggtggtccagaaactctgggagcttctagaagaaatctactgagtgtatttctgttttttgtttaattccttgcttttgtcgactgacctgcttggtagtgtctgaggtgaactgtgggggttgcgcacagccagccgcgtggatcccacgcagcgctgaaccgaaccgagtaggaagcctttctccccaggcacgtggcttcagggcgtttcccattgaccagtttgaccctggtttgaataaagagaagtgcgtttggattagaaacc

SEQ ID NO: 15760 - DNA, 1672 bp, Homo Sapiens
  misc_feature (1513)..(1554): n is a, c, g, or t
cggtccggaattcccgggatggcggcggctgaggagcccggctgaggcgccagtacccggcccggtccgcatttcgccttccggcttcggtttccctcggcccagcacgccccggccccgccccagccctcctgatccctcgcagcccggctccggccgcccgcctctgccgccgcaatgatgatgatggcgctgagcaagaccttcgggcagaagcccgtgaagttccagctggaggacgacggcgagttctacatgatcggctccgaggtgcgaaactacctccgtatgttccgaggttctctgtacaagagatacccctcactctggaggcgactagccactgtggaagagaggaagaaaatagttgcatcgtcacatggtaaaaaaacaaaacctaacactaaggatcacggatacacgactctagccaccagtgtgaccctgttaaaagcctcggaagtggaagagattctggatggcaacgatgagaagtacaaggctgtgtccatcagcacagagccccccacctacctcagggaacagaaggccaagaggaacagccagtgggtacccaccctgcccaacagctcccaccacttagatgccgtgccatgctccacaaccatcaacaggaaccgcatgggccgagacaagaagagaaccttccccctttgctttgatgaccatgacccagctgtgatccatgagaacgcatctcagcccgaggtgctggtccccatccggctggacatggagatcgatgggcagaagctgcgagacgccttcacctggaacatgaatgagaagttgatgacgcctgagatgttttcagaaatcctctgtgacgatctggatttgaacccgctgacgtttgtgccagccatcgcctctgccatcagacagcagatcgagtcctaccccacggacaggcatcctgggaaggaccagtcagaccagcgcgtcatcatcaagctgaacatccatgtgggaaacatttccctggtggaccagtttgagtgggacatgtcagagaaggagaactcaccagagaagtttgccctgaagctgtgctcggagctggggttgggcgaggagtttgtcaccaccatcgcatacagcatccggggacagctgagctggcatcagaagacctacgccttcagcgagaaccctctgcccacagtggagattgccatccggaacacgggcgatgcggaccagtggtgcccactgctggagactctgacagacgctgagatggagaagaagatccgcgaccaggacaggaacacgaggcggatgaggcgtcttgccaacacggccccggcctggtaaccagcccatcagcacacggctcccacggagcatctcagaagattgggccgcctctcctccatcttctggcaaggacagaggcgaggggacagcccagcgccatcctgaggatcgggtgggggtggagtgggggcttccaggtggcccttcccggcacacattccatttgttgagnnnnnnnnnnnnnnnnnnnnnnnnnnnnnnnnnnnnnnnnnngtctctggggtcaggaagaaaccttattttaggttgtgttttgtttttgtataggagccccaggcagggctagtaacagtttttaaataaaaggcaacaggtcatgttcaatttcttc

SEQ ID NO: 15761 - DNA, 942 bp, Homo Sapiens
  misc_feature (584)..(584): n is a, c, g, or t
  misc_feature (778)..(819): n is a, c, g, or t
gggcatgacccagctgtgatccatgagaacgcatctcagcccgaggtgctggtccccatccggctggacatggagatcgatgggcagaagctgcgagacgccttcacctggaacatgaatgagaagttgatgacgcctgagatgttttcagaaatcctctgtgacgatctggatttgaacccgctgacgtttgtgccagccatcgcctctgccatcagacagcagatcgagtcctaccccacggacagcatcctggaggaccagtcagaccagcgcgtcatcatcaagctgaacatccatgtgggaaacatttccctggtggaccagtttgagtgggacatgtcagagaaggagaactcaccagagaagtttgccctgaagctgtgctcggagctggggttgggcggggagtttgtcaccaccatcgcatacagcatccggggacagctgagctggcatcagaagaccgacgccttcagcgagaaccctctgcccactgctggagactctgacagacgctgagatggagaagaagatccgcgaccaggacaggaacacgaggcggatgaggcgtcttgccaacnacggccccggcctggtaaccagcccatcagcacacggctcccacggagcatctcagaagattgggccgcctctcctccatcttctggcaaggacagaggcgaggggacagctccagcgccatcctgaggatcgggtgggggtggagtgggggcttccaggtggcccttcccggcacacattccatttgttgagnnnnnnnnnnnnnnnnnnnnnnnnnnnnnnnnnnnnnnnnnngtctctggggtcaggaagaaaccttattttaggttgtgttttgtttttgtataggagccccaggcagggctagtaacagtttttaaataaaaggcaacaggtcatgttcaatttcaaaaaaaa

SEQ ID NO: 15762 - DNA, 490 bp, Homo Sapiens
gtcggcggacgaggtgcccccgggagttgctggactgagacatgagcctccaactgtgtggttgggctcggtagcacatcgtgggacttgggtgttgccgcacagggccaggctctcagtcacccctggaaaatggtgcctggttcacagctcccgtgcatctgcctcatctctcctgatcaacgtctgtctcttgggagtagctagagttcctcatgagcttgtcctcaagcgaggcatgcatgaggcctccagccggtggtcagtgagggagttaagtggcttctccgtggaaacacagccttctgctgcagcagaggctcacccagcgtgaactgcccccagggaacactgggcgatgcctggggacattgtggttgtcacgatggggggtgctcctggcctggagtgggtggaggccagagacactgctcagcagcaccctgcagtgcccaggacggccccgtcccagagaacaatccagccccga

SEQ ID NO: 15763 - DNA, 2319 bp, Homo Sapiens
ggaatttccgggatgtcgagactgcgcggccgttgggcgtgcagcggcgccagtcggcggacgaggggcccccgggagttgctggactgagacatgagcctccaactgtgtggttgggctcggtagcacatcgtgggacttgggtgtgcgcccacagatggtttggccctgcagtgaccagagcagcccaagccgccaccatggtgaaattgctagtggccagaaatcctgtgcatggtgggcgtgtgcttcttcgatgcgtgctcggctcgcctgctccccgtgaagatcatctgatgacagattttgagaaggcccatcgctcgaagaaagatcctctctcgtcgtgcaacaccgtttggaggaggggtgtctctggccacgtgcttcaacgctctgctgcgccgctgtgagggaacaagctccagaaggtcctgagcctcggccacatcagcaccgactacccgctggccgaaaccatcctcctgctgggcttcttcatgaccagtcattcctggagcagctggatcctgaccttccgcaaggagaagccgtccttcatcgacctggagaccttcaaacgccggagtcggacgtgggcagcagactctggagtatgagagccccgttcatggggggcgctgcggggccacgcgctgtacgtggagccccacgggcacggcccaagcctgagcgtgcagggcctctcgcgcgccagccccgtgcgcctgctcagcctggccttcgcgctgtcggcccactcggtctttgagggcctggcctagggcctgcaggagaagggggagaaagtggtgagcctgttcgtgggggtggccgtccacgagacactggtggccgtggccctgggcatcagcatggcccggagtgccatgcccctgcgggacgcggccaagctggcggtcaccgtgagcgccatgatccccctgggcatcggcctgggcctgggcattgagagcgcccagggcgtgccgggcagcgtggcgtccgtgctgctgcagggcctggcgggcggcaccttcctcttcatcaccttcctggagatcctggccaaggagctggaggagaagagtgaccgtctgctcaaggtcctcttcctggtgctgggctacaccgtcctggccgggatggtcttcctcaagtggtgagcggcctcgccattgtccctgccgccggagcccgccgggagccccgggccggacacaggccgcgtcccccggccgcgcgtcccccaagagcgagcactgtggccctgggccaccacctgtgcacaaggggcctcccgggaccaggctgtgcccccgatcctacaccctgagcctcagagcactgctactttttaaaatacttctttctcttaaacagtctttaccaggaagagaaggaagaggacagaaaggacccgcggagagacagaaagatcgcacaacatggcatcagagacaacagcacgagcggaaaaccagataacggcggaggcccagcgaagcattgacccaccccgtgtgcaggcacccagcctgctgcactcccaagccatctgatacccaagcacagggaggtcttgccaacagacgtgtggagcagttcattaactaaaacacctttatgaggacgccggggagtccaccaacaccagctcgtactgacgcgcgtaccaagcacacgcactgaaccgcgagtaggcacatcatccaaccgcagtcgaaggcatccccttcctctttgtcacgttggcccgctggcggaagacacacagtcgtgcgaggaccacccaatctccgcacacgccctgacgggtatatctttaatggagccatctccattgagcacggcaacactactaagagacccctttccagtactcgcgccatgtccacagtactcagcgaggcgttgcacaaccttgcgcctcgcaccacgtcaacaatcctcaggtgaacgggcaggcacttccaaaatcccacgtagatactgcggtactatatacgtcacaccgatttacatgtcaaccccaacttaacaacgggcaaacgaccagctaatatatccccccacccaagcaccaatggccaatttacatccacccaattaaaatcataaaagctcaacacaacaaccatacacaccaccaagaacccacaggcaaacaccaccataatatgcaccaccacccccactcatccttaccccccataactacttctcttcgcgtacacacagtcattcaaacactccacactcatcatttatcatatcacccaatcgcacccactcccttcccccacttgcaccaaattc

SEQ ID NO: 15764 - DNA, 664 bp, Homo Sapiens
ccacgcgtccggctcttttggagctgaagaattgtttgatggtgatgtcatatatctgatagattagtttcagtggttctcatttcacttttatacgtaatttcttaactatattaagatagttgcaggcagtgtacctcaggttgactctgtacatctgaatagtgagtcactagtattttgcttcaagccttctgaaaatataaccatagttacctaagcacacagtgaatagtcacatggtagtacttgtgattagagcatgtaaaacaatgtaattgaaaagtcagcttccatattttgtaggggaaatagaacaccctactttttatctagtgtgaaatatttaatcgaatttttgttgatttatattatgttacctgtgctgaattaggtttggtacttgtgttttgtttgacatattagtaagttgcttttgcttctttctgtcaacttattttttaaataaaattgatctggaaaaattgttaatgggatgttttaaataatgaatttttcatccagcatcagttgaaaaggaaaagaaagcttcattatggaaatgacaatattgaatatgacagataagtttatttgcttctgttttaactgcagttaatagtactagacaactttaagtggaaagcatttagtttatttcttc

SEQ ID NO: 15765 - DNA, 727 bp, Homo Sapiens
  misc_feature (79)..(79): n is a, c, g, or t
gccaaggggaaacagcagccctagaaccatctggggcgcagggcagtgagagacccaagtgactggcccttccctctgnccagtggggttgcaaaccaaaagctgccttgaggtatagaaggggatttgcccaaagatatttgtgactgtagaattcgtaaccacaaaatgctggtgccggcccacatggcccaggtggcagtgacaacctctcaccctggaatgccccagaggaccccaaccacaacaggtggattatttcagcccaagtaattgtgtccccacatagtaactaccaatcacaacagtgtaaaataaacacatgtacatgggcagaaagcagaaaagatataaaaatcattccaaattcagcagttgaaaataaccctcatagatatttaagtccagtgcaaacaagaagacagcggagtgtgtgtgcacatgtgtgcacacctttaggtctgcactgtcaacaccagacacagtgaagcccaagcagcaagcagtccacagacgggggcgttagtgtcgggaataccaatgggtcaccctgcatcaaaacacatggagcagactgctgagccagctcaggggaagcggagagaccccaggagtgacggtgagaatgcaactcacttgtcattacacaggatatggcagatcggatttgaccaacaaaatggggaggaactgatccagatgtggaatgtgaccgccagcgctttcc

SEQ ID NO: 15766 - DNA, 854 bp, Homo Sapiens
gggcgcgaactagtcagcgagaagcctgtttctgcggctgtggatgccaatgcttctgagtcaccttaactttgaaccattctttggaattggcgtggtatatttaaccacgggagcgtgtctggaaacgcaaactatcattaatttcatactagtttgtaccgtatctgtaggcatcctgtaaataattccaaggggaaaactaaacgaggacgtgggttgtatcctgccaggttgagtggggctcacacgctagggtgagatgtcagaaagcgcttgtattttaaacaaccaaaaagaattgtaagggtggcttgctgccaggcttgcactgccgttcctgggggtgtgcatcttcgggaaaggtggtggcggggcgtccactaggtttcctgtcccctgctgctccttccgtaagaaaatgaaatattctatgcctaatactcacacgcaacatttcttgtactttgtaagtcgtttgcgagaatgcagaccacctcactaaactgtaaacggtaaagagatttttacttttggtctccgtgagtcgcatctctactaaggtttacacaggaattccacctgaagacttgtgttaaagttctacagcgcgcactgttaactgaacgtctttttcttcagcctatacgcggatccttgttttgagctctcagaatcactcagacaacattttgtaactgctgctgttgctttctacatacaccttataaagtgacatttcaaaagaaataaggtgccacagttttaaaccagaaggtggcactctgtggctccttgtagtattatagctatactgggaaagcatagatacagcaataaagtacagtaatttt

SEQ ID NO: 15767 - DNA, 1374 bp, Homo Sapiens
ccatggaatatagaacagtggttacaacaagcaggctggtacggctcggaatccgggatatcgtcgacccacgcgtccggaaagcaaacgttgaaaagcgctgtaaagatgcttatctatagcagcaaaacattggaactgcgagagacctcagtcacaccaagtaacctgtggggcggccagggcttattgggagtgagcattcgtttctgcagctttgatggggcaaatgaaaatgtttggcatgtgctggaggtggaatcaaattctcctgcagcactggcaggtcttagaccacacagtgattatataattggagcagatacagtcatgaatgagtctgaagatctattcagccttatcgaaacacatgaagcaaaaccattgaaactgtatgtgtacaacacagacactgataactgtcgagaagtgattattacaccaaattctgcatggggtggagaaggcagcctaggatgtggcattggatatggttatttgcatcgaatacctacacgcccatttgaggaaggaaagaaaatttctcttccaggacaaatggctggtacacctattacacctcttaaagatgggtttacagaggtccagctgtcctcagttaatcccccgtctttgtcaccaccaggaactacaggaattgaacagagtctgactggactttctattagctcaactccaccagctgtcagtagtgttctcagtacaggtgtaccaacagtaccgttattgccaccacaagtaaaccagtccctcacttctgtgccaccaatgaatccagctactacattaccaggtctgatgcctttaccagcaggactgcccaacctccccaacctcaacctcaacctcccagcaccacacatcatgccaggggttggcttaccagaacttgtaaacccaggtctgccacctcttccttccatgcctccccgaaacttacctggcattgcacctctccccctgccatccgagttcctcccgtcattccccttggttccagagagctcttctgcagcaagctcaggagagctgctgtcttccctcccgcccaccagcaacgcaccctctgaccctgccacaactactgcaaaggcagacgctgcctcctcactcactgtggatgtgacgccccccactgccaaggcccccaccaccgttgaggacagagtcggcgactccaccccagtcagcgagaagcctgtttctgcggctgtggatgccaatgcttctgagtcaccttaactttgaaccattctttggaattggcgtggtatatttaaccacgggagcgtgtctggaaacgcaaactatcattaatttcatactagcgtgacgcgtatctgctcagcgagt

SEQ ID NO: 15768 - DNA, 368 bp, Homo Sapiens
gagagggaggtgcaataggaagagatgatgcctggcccagaacctagctctagaagggcttatgggacatctactgagtgacaaaggcaatggggagatgacagtggtgggagcagctgaagtgacgcagtctattcgtccagaggaagagctgctccctgcacaggatatcaaagctctgtttgtgtctgaggaggagaaaaagctgactcggaaggaggtctacatcaagaatggggataaggtgagaaacgggcatcctaaggaggcactctaggccccaatccttcctaagccacttctgttcattacttctccatgcttcccacctcccctacagaaaggcagctgtgagagagatgctcaat

SEQ ID NO: 15769 - DNA, 777 bp, Homo Sapiens
  misc_feature (572)..(573): n is a, c, g, or t
  misc_feature (640)..(655): n is a, c, g, or t
ggggcgatagccagccgcggctgcccttgcgcttcccgagctggcggggtccgtggtgcgggatcgagattgcgggctatggcgccgaaggtttttcgtcagtactgggatatccccgatggcaccgattgccaccgcaaagcctacagcaccaccagtattgccagcgtcgctggcctgaccgccgctgcctacagagtcacactcaatcctccgggcaccttccttgaaggagtggctaaggttggacaatacacgttcactgcagctgctgtcggggccgtgtttggcctcaccacctgcatcagcgcccatgtccgcgagaagcccgacgaccccctgaactacttcctcggtggctgcgccggaggcctgactctgggagcacgcacgcacaactacgggattggcgccgccgcctgcgtgtactttggcatagcggcctccctggtcaagatgggccggctggagggctgggaggtgtttgcaaaacccaaggtgtgagccctgtgcctgccgggacctccagcctgcagaatgcgtccagaaataaattctgtgtctgtgaaacnnaccccaccaacaccaacacccaacgttcccgcaaagacatacgcattaacacaattccttggtcggnnnnnnnnnnnnnnnnaagagcttttctaaaccattcgttttgggcgcccgcgccccaataggcaaagtgaacctgggtcataactggtttcccaagggaaatccggggccatgaataagggcttgggattccccacc

SEQ ID NO: 15770 - DNA, 1067 bp, Homo Sapiens
gccctcccatgggcccgggctcagcgtcagtgcccgcctgtgcccctggcctacccccaggccgccaaggctcgggccctcaggtccagcgggaggagtgaacgagccctcttgcagctcagccgctctggcctggcatgttgggagtgatgaatggcaggttccaggcaggcagagagggagggtgcgagggcagggcgtacgccgtcactgctgtctctgcgtcaagaccttggggaggccttgtccctccccagctcccactggaactggtcagaggttgcaggtgggttgaggtcttgactgtagcccagctcaggctggaactgctccctgtccccaagccagcctccctgtctctcttcaaagagtgtgagtccctttaggtcctggtgtgtggggacacacctccttcctcctctggcccggaggcttcggagcaggagagcctggagaagtgggggcactgtcggggctcctcggtacacagaccacgggacagatgcgtggcctggccctggcatccatgggcaaaggagagactgagacacaccgatgtgtcaccatggcccggtgcccagccttgccccagccccagctgggggcagcacggtgtcctcgcaggggggaagtcagtgtggggcgggatgaggacccacagcctgggttcctgctgggaagcaacctggactccggcctccctctgtgcatcagtttccacatctccagagtctagggccctcttcctgagtgacttaatccctgaagagagtgtcctgtcaggggtctcagtctggctcccagggtgggcaccggccagggcgtggagcgtcttggtccggccgagccccacccgggcctgacatcacctccccactcccacagcgcacaactacgggaattgcgccgccgcctgcgtgtactttggcatagcggcctccctggtcaagatgggccggctggagggctgggaggtgtttgcaaaacccaaggtgtgagccctgtgcctgccgggacctccagcctgcagaatgcgtccagaaataaattctgtgtctgtgtgtgaa

SEQ ID NO: 15771 - DNA, 960 bp, Homo Sapiens
ttgctaattgacttcccttgattctcctgggtccgtctgtgtcgaaacctagtggctccagaaggtaatagtgcaaaagctcgcgtgtgacctctagcccaacagacagagcatggcacatgacaatctcgcgtactaaactcacatgagatatgaaaaaacagctacagatatgagaatgtcatcctacaagagtgtggtgaattatgaaacgcactaaccctgatctttacttcaaaggcagcttgctaaatcttgctagaagagagcaataaagggaaagttgtggcaataggagaatgcggacttgattttgaccgactgcagttttggtcccaagagatactcaaggtcaatatattttgagagaaaccagtttgaagcgtgtcgagaacaaacaagagagttaccaatgtttcttcattgtcgaaactcacatgctgaatttttggacataatgaaaagaagagtagagatcggtgtgtagggggagtggtgcattcatttgatggtaccaaggaagcagcagctgctttgattgacttggatctttatataggatttaatggttgctcactgaaaactgaagctaatttggaagttttgaagtcaattcctagtgaaaaattaatgattgagacagatgcaccttggtgtggagtcaaaagtacacatgctggatcaaaatatataagaactgcatttcctaccaaaaagaagtgggaaagtgggcactgcttaaaagacagaaatgaaccctgccatataattcaaatattggagataatgtcagcagtgagagatgaggatccactggaattagccaatacactatataacaatactattaaagtattttttcctggaatataattggtatatgtcttccactttccatcatgtatgtaaaatttcatagtaaaacttcctgatagtttcaataaagaaattatctgcaaa

SEQ ID NO: 15772 - DNA, 700 bp, Homo Sapiens
tccatgcgcagtcatgagtcgcttcaagtttatcgatattggtatcaacttgactgaccctatgttcagaggaatttataggggggttcaaaagcatcaagatgacttacaggatgtaatagggagagctgtcgagattggtgttaaaaagtttatgattacaggtggaaatctacaagacagtaaagatgcactgcatttggcacaaacaaatggtatgtttttcagtacagttggatgtcatcctacaagatgtggtgaatttgaaaagaataaccctgatctttacttaaaggagttgctaaatcttgctgaaaacaataaagggaaagttgtggcaataggagaatgcggacttgattttgaccgactgcaggtttgtcccaaagaatactcaactcaaatattttgaaaaacagtttgaacctggcagaacaaacaaaattaccagtgtgttcttccttgtcgaaacctcacatgctgaaatttttgggaacataatgaaaagaaatacacaatcggggggtaagggggaagtgggtgcatttctttgatggttacccaaggaaacccccaccttgctttgattgacctgggaactttatatagggatttaatgggtggctcacctgaaaaactgaaccctaattttggaaagttttgaaagccaatcccccaagggaaaaattaactggatggc

SEQ ID NO: 15773 - DNA, 684 bp, Homo Sapiens
tgtgagaaacctccttcaccctcctccaggcagaagctgcctgtgcgcctggccaacatcatgaaagagatcacttgcttcccgaccgagtgctgagcacaccccccgtgcagctggtgcagagctggtatgtccagagcctcctggacatcatggagttccgggacaaggatcccgaggaccatcgcaccctgagccagttcactgacgccctggtcaccatccggaaccggcacaacgacgtggtgcccaccatggcacaaggcgtgcttgagtacaaggacacctacggcgatgaccccgtctccaaccagaacatccagtacttcctggaccgcttctacctcagccgcatctccatccgcatgctcatcaaccagcacagtgggtgccggccacagcggcggggagcgggcggtggagggggcggtgctggggcccagggccgggctgctgaggggacctagaccactcttcagaaccccacaaagggagtctttgaatagttactccagtaactatggagttaatggctccaacatggaaaaataaaatttttctttctcattgattttccatttcaaaacgttttgttttcagtgtttgcaaaatgtaaaattatgtcacatctttaaaagaatgtttaatttagtatttataaaaactctcattatgttcaaaaac

SEQ ID NO: 15774 - DNA, 1138 bp, Homo Sapiens
gctgaagaatgcgtccctggcaggggcgcccaagtacatagagcacttcagcaagttctccccgtccccgctgtccatgaagcagtttctggacttcggatccagcaatgcctgtgagaaaacctccttcaccttcctcaggcaggagctgcctgtgcgcctggccaacatcatgaaagagatcaacctgcttcccgaccgagtgctgagcacaccctctgtgcagctggtgcagagctggtatgtccagagcctcctggacatcatggagttcctggacaaggatcccgaggaccatcgcaccctgagccagttcactgacgccctggtcaccatccggaaccggcacaacgacgtggtgcccaccatggcacaaggcgtgcttgagtacaaggacacctacggcgatgaccccgtctccaaccagaacatccagtacttcctggaccgcttctacctcagccgcatctccatccgcatgctcatcaaccagcacaccctcatctttgatggcagcaccaacccagcccatcccaaacacatcggcagcatcgaccccaactgcaacgtctctgaggtggtcaaagatgcctacgacatggctaagctcctgtgtgacaagtattacatggcctcacctgacctggagatccaggagatcaatgcagccaactccaaacagccgattcacatggtctacgtcccctcccacctctaccacatgctctttgagctcttcaagaatgccatgagggcgactgtggaaagccatgagtccagcctcattctcccacccatcaaggtcatggtggccttgggtgaggaagatctgtccatcaagatgagtgaccgagctgggggtgttcccttgaggaagattgagcgactcttcagctacatgtactccacagcacccaccccccagcctggcaccgggggaacgccgctggctggctttggttatgggctccccatttcccgcctctacgccaagtacttccagggagacctgcagctcttctccatggaaggctttgggaccgatgctgtcatctatctcaaggccctgtccacggactcggtagagcgcctgcctgtcataccacaagtaagcctgccgccactaccagatcacatt

SEQ ID NO: 15775 - DNA, 432 bp, Homo Sapiens
caagtctctggcggacattgaggaggagtataactacggcttcgtggtggagaagaccgcggctgcccgcctgccccccagcgtctcatagtccctcacccttccgcggaaagagcccccttactccacctccccgccagcctggggccaccccccctcactgcatcctggggccacccccactcactgcatcctgggaaccttcgccctgcaaggcgtttgctatcttcagccactgggcggagctgcagccctggaggagggggcgggtcgaggctgcgtggtgatggggtctccgcccccacgccctgccgggcagggctggagctggacaaaagccagtgcctttaagtcatttgtgtcaaaaccctctggggtccggaggctgtgcgggtgtcctcctggcaataaacactacccggttctcgccaa

SEQ ID NO: 15776 - DNA, 411 bp, Homo Sapiens
catcaagtctctggcggacattgaggaggagtataactcggctttcgtggtggagaagaccgcggctgaccgcctgcaccccagcgtctcatagtccctcacccttccgcggaaagagcccccttactccacctccccgccagcctggggccaccccccctcactgcatcctgggaaccttcgccctgcaaggcgtttgctatcttcagccactgggcggagctgcagccctggaggagggggcgggtcgaggctgcgtggtgatggggtctccgcccccacaacctgccgggcagggctggagctggacagaagccagtgcctttaagtcatttgtgtcaaaaccctctggggtccggaggctgtgcgggtgtcctcctggcaataaacactacccggttctcgcaaaaa

SEQ ID NO: 15777 - DNA, 1006 bp, Homo Sapiens
  misc_feature (811)..(846): n is a, c, g, or t
caggcctgtgctcaagggctgacgtttaccctacgtcctggtgaggtgacggcgctggtgggacccaatgggtctgggaagagcacagtggctgccctgctgcagaatctgtaccagcccacagggggacaggtgctgctggatgaaaagcccatctcacagtatgaacactgctacctgcacagccaggtggtttcagttgggcaggagcctgtgctgttctccgcgttctgtgaggaacaacattgcttatgggctgcagagctgcgaagatgataaggtgatggcggctgcccaggctgcccacgcagatgacttcatccaggaaatggagcatggaatatacacagatgtaggggagaaggggagccagctggctgcgggacagaaacaacgtctggccattgcccgggcccttgtacgagacccgcgggtcctcatcctggatgaggctactagtgccctagatgtgcagtgcgagcaggccctgcaggactggaattcccgtggggatcgcacagtgctggtgattgctcacaggctgcaggcagttcagcgcgcccaccagatcctggtgctccaggagggcaagctgcagaagcttgcccagctctaggagggacaggacctctattcccgcatggtgcagcagcggctgatggactgaggccccagggatactgggccctcttctcaggggcgtctccaggacccagagctgttcctgctttgagtttccctagagctgtgcggccagatagctgttcctgagttgcaggcacgatggagatttggacactgtgtgcttttnnnnnnnnnnnnnnnnnnnnnnnnnnnnnnnnnnnnctgtctgtgtccaggaaacttaattccctggtgactagagctttgcctggtgatgaggagtattttgtggcataatacatatattttaaaatattttccttcttacatgaactgtatacattcatatagaaaatttagacaatataaaaaagtacaaaga

SEQ ID NO: 15778 - DNA, 1463 bp, Homo Sapiens
cagaagtttagggaaaagctgcaagaaataaagacactcaaccagaaggaggctgtggctgatgcagtcaactcctggaccactagtatttcaggtatgctgctgaaagtgggaatcctctacattggtgggcagctggtgaccagtggggctgtaagcagtgggaaccttgtcacatttgttctctaccagatgcagttcacccaggctgtggaggtactgctctccatctaccccagagtacagaaggctgtgggctcctcagagaaaatatttgagtacctggaccgcacccctcgctgcccacccagtggtctgttgactcccttacacttggagggccttgtccagttccaagatgtctcctttgcctacccaaaccgcccagatgtcttagtgctacaggggctgacattcaccctacgccctggcaaggtgacggcgctggtgggacccaatgggtctgggaagagcacagtggctgccctgctgcagaatctgtaccagcccaccgggggacagctgctgttggatgggaagccccttccccaatatgagcaccgctacctgcacaggcaggtggctgcagtgggacaagagccacaggtatttggaagaagtcttcaagaaaatattgcctatggcctgacccagaagccaactatggaggaaatcacagctgctgcagtaaagtctggggcccatagtttcatctctggactccctcagggctatgacacagaggtagacgaggctgggagccagctgtcagggggtcagcgacaggcagtggcgttggcccgagcattgatccggaaaccgtgtgtacttatcctggatgatgccaccagtgccctggatgcaaacagccagttacaggtggagcagctcctgtacgaaagccctgagcggtactcccgctcagtgcttctcatcacccagcacctcagcctggtggagcaggctgaccacatcctctttctggaaggaggcgctatccgggaggggggaacccaccagcagctcatggagaaaaaggggtgctactgggccatggtgcaggctcctgcagatgctccagaatgaaagccttctcagacctgcgcactccatctccctcccttttcttctctctgtggtggagaaccacagctgcagagtaggcagctgcctccaggatgagttacttgaaatttgccttgagtgtgttacctcctttccaagctcctcgtgataatgcagacttcctggagtacaaacacaggatttgtaattccttactgtaacggagtttagagccagggctgatgctttggtgtggccagcactctgaaactgagaaatgttcagaatgtacggaaagatgatcagctattttcaacataactgaaggcatatgctggcccataaacaccctgtaggttcttgatatttataataaaattggtgttttgtaaaaaaaa

SEQ ID NO: 15779 - DNA, 400 bp, Homo Sapiens
tctagcctcgccagtgtcctagcctcgccagtgtcctagcctcgccagtgtcctagcctcgccagtagctgggggccttgcccaagatctccaagtactggggaaccccagggaggccctggggggtggcagtgttcctatttcagccccactctgcttccccctcccaggatatccaggaggtgcagggctacgtgctcatcgctcacaaccaagtgaggcaggtcccactgcagaggctgcggattgtgcgaggcacccagctctttgaggacaactatgcctggccgtgctagacaatggagaccaggaaagaccagaaggaagaggaggaagagagaggcaggagcaggcgtagggaagaaagaggacagaaataacaggtttcagagatgcccgc

SEQ ID NO: 15780 - DNA, 311 bp, Homo Sapiens
gtgccctagcctcgccaggggtcctagcctcgccagtggtcctagcctcgccagtgtcctagcctcgccagtgtcctagcctcgccagtgtcctagcctcgccagtgtcctagcctcgccagtgtcctagcctcgccagtgtcctagcctcgccagtgtcctagcctcgccagtggaataggggtcctgtgggtatgctcccctggatcctggggacccacccctttatgagacttcagtcactctgcctggaagccgtgactgacaaagatcacctgcttcttgctgccttaaaggagacactggcgagg

SEQ ID NO: 15781 - DNA, 530 bp, Homo Sapiens
cggaggctgtccctagcacaggccagggtgtcttgggactcgaatccctgggtttgggctggccgggagtggggctttcgaaggaagcgggtgattttccacgtcgtccatatctccccggtgtgggaatggcggtcgtgcactctgggggtggcgttgttctcgttccctacttgggggtggcctttttcagcggagaaagaggatgccgcgggcattggtagccggcgggactacacttgggctaggatcagtgttcagcgggttcagaaatcaaagatgtccttggcatcacctccctccccaccgtcctctcgcatcgcacagcaggagacagtgactggagggttttcaaggaggactgcattgcccctattgaaacaaaccgtccgacaaaccctttctccgacgtgtgacagagggacggtcgtaatgtgaaatacgactagacatgcgtttaatggcggtgtgattgctgcattcgtgcgcaatgaatgggccagcaatttgtgtccagtaccgcgcagcac

SEQ ID NO: 15782 - DNA, 879 bp, Homo Sapiens
ctgtgtctcgatgtagcgaattgtgccgagactgcgttggcatccagcagttcgctgggtgactttctgggcattgggttcctgcgagtatcttctcgttattcctcttccaaaaatgctacgcctgttgggctgaaccatatgggtccttcattttcctggactgcctctcccatccggctccacgacacccttctctcctgcaggtccccggctgggagcttgaactttgcctggcttggcttccactataccgatggtctcttccaggtcctcgaggtcccactcgatgctgcacaggccattccgcagctcattggtcgtccagtccagctcctcgcgtccgaccgccgcgctttcctgcaggagctcgcaccagcgctggtacagcccgcgggccgtgttcaccgccttctgcacctcggctgcgggcaggggcacggcgggcgcaggctgggggcagccggtcctcccgcctgcctctgcccccgactgcaaacccaaacgcatgggggactccggagacccctatatacccctgcgtgcgcctcccactctgcaccccgacggccttgcccagcccgccgggcacgctggggccggcacccgggcactggctggcttgggtacagagcaccctccgccctcccccgtcgttgtcactcaccctcggactaccaaaaaaggggtcttcgagagacatgtcagtcccttcccccccaggccgaacccccctcccggcctgggttcgcgggctggttccctcccaaccgaggagaacgcgccgccacccccgcccccgtcacgccaccatcgagagccggaccgccaggggagaaagagaagcctcggaggcccgacgtgcgacacttccgccct

SEQ ID NO: 15783 - DNA, 943 bp, Homo Sapiens
tagctggtcctttctttcgccaggctgggagcgtcggcgcagcagtttctaggtccccactgtccccggccgtcccgccccttcgcgtccgggaaccggcgggcttccgagccgcactcgccgatcctccaggcatgccccgctacgagctggctttaatcctgaaagccatgcagcggccagagactgctgctactttgaaacgtacgatagaggccctgatggacagaggagcaatagtgagggacttggaaaacctgggtgaacgagcgcttccttataggatctctgcccacagtcagcagcacaacagaggcgggtatttcttggtggatttttatgcacccaccgcagctgttgaaagcatggtggagcacttgtctcgagatatagatgtgattagagggaatattgtcaaacaccctctgacccaggaactaaaagaatgtgaagggattgtcccagtcccactcgcagaaaaattatattccacaaagaagaggaagaagtgagaagattcgccagattttagccttatatgtaattccttcacatttgggcagcatggacgagaaggaagaatttgcaagtttggcctttatataagcatgtgttgcaggtgctgtttgatttttctaaggtatttttagcccttgatcccctttgcttgcgagaggtggggaactgctcactgacagcttctctgtaacctgcagtaccagtggatcattcttgattttgttttcattagtgtcatttctttgtcattgaggacttttccccttacaacagtaacaccattttttgaagagcaaaacttataatacctcctgggattgtgagctagtcattcagcctgtgtaaccatgtggaaataaaaattgacgaccaatgtattatatggacaacttttgctttgagtaataaacttgattgtaggaaa

SEQ ID NO: 15784 - DNA, 330 bp, Homo Sapiens
cactatgttgataggaccgaatatgtcaaacaccctctgacccaggaactaaaagaatgtgaagggatagtcccaatcccacttaaaggaaaattatattacacaaagaagaggacgaagtgagaagattcaccaggaattagccttatatttaatcccttcatatttgagcagcatggatgagaagaaatagtttacaagcttggccttttatatataagagtgtactgcaggtgctgtttgatttttctgagatatttttagcccttgatcccctttgctgcaagaggtgaggaactgctcactgacagcttctctgtaatctgtgat

SEQ ID NO: 15785 - DNA, 479 bp, Homo Sapiens
cccccggtgcttgagtctttgccacagcccccgcaggagggcctgcttatgccacccatgccccccacagggcttgcgccatcagggcccccgggaccaccccagctactcccgccagctccaggggtccacccaccagccacagggatgcaccctcaggcaccgggggtccacccccaacctcccggggtccatccgtcggctcctggggtccaccctcagcctccgggagttcacccctcaaatcctggggtgcaccccccaactcccatgcccccaatgctgaggcccccacttccctccgaaggcccagggaacatacctccccctcccccaaccaactgagaagctgctccctcccccagcaagcccagcgccaggtgctcttgccttttcccactgagagaaggctgctcttttgtactgccccccgctcattaaacagcctcccccagccctgagtgcactgatgtccgcaa

SEQ ID NO: 15786 - DNA, 1083 bp, Homo Sapiens
cagatagcccaccaggggtggggagggtgagcagggacagggcgcccccactgacttgggaccctcctcctccaggcccacacctcagcacccaggacatctgggccccccgcccccagcgctgtctagtttggttgcctggccgtcactcccagcctggttcccactcctgtgtcttctggggatggccctcaaggacagcatgttgacacatcaggcccagctctatcactggggagggagataggctgccagggacagaaagggctctttgagaaggccactctgcctggagtgggggcgccgggcactgtcccccaaggtcgcggcagaggagataggggtctgtcctgcacaaacaccccaccttccactcggctcacttaaggcaggcagcccagcccctggcagcacccacgatgcgggacctgcctctcaccagcctgcccctagtgctgtctgccctgggggctctgctggagactgaggccctcagagcagaggagccagctgtgggcaccagtggcctcatcttccgagaagacttggactggcctccaggcatcccacaagagcctctgtgcctggtggcactgggcggggacagcaatggcagcagctcccccaaccaactgagaagctgctccctcccccagaaagcccagccccaggtgctcttgccttttcccactgagagaaggctgctcttttgtactgccccccgctcattaaacagcctccccaagccctgagtgcactgatgtccgcagcgctgccctactgtgtcagtgtgtgtgggagtgccaggcacagcaccatccccaagtttgggccgaactggggagagcctggggcccgccaggagacacctgtgggaggcctgagagatggctgtaccttggagatggcctggtggaggacagaccccaccagccagctaggaggggatctggggtcctgttctggggagggaagagcagactcctgccccgagggtccggacgcgccccagctcgcgccccttcccatatttaatcggaccccaagcatcgccccaataaagaccagcaagcaaccggcaaa

SEQ ID NO: 15787 - DNA, 586 bp, Homo Sapiens
caggcgtcattccaggtcattgacagcacccggtgcaatgcagacgatgcgtaccagggggaagtcaccgagaagataatgtgtgcaggcatcccggaagggggtgtggacacctgccagggtgacagtggtgggcccctgatgtaacaatctgaccagtggcatgtggtgggcatcgttagctggggctatggctgcgggggaccgagcaccccaggagtatacaccaaggtctcagcctatctcaactggatctacaatgtctggaaggatagaactattcagagaagctgtaactccccagggacaggtcttgtgattcagcaaccagctgtaccgctgatggagctacggtcagctcggcacacacatcgcctgaccacctgtgtttgctttctctcattccctgccttacagcccctgtcccccttatgcccatttccctgggattgaacccccaaataaagtgttaagatatgaatttaatgtagaaaacttaagttttctgagaaacctgggctaagactatcaaacagatgtagctctttgattataatgttattaagttctaaggcaatagcaaaaa

SEQ ID NO: 15788 - DNA, 695 bp, Homo Sapiens
gtagggcatgcagcctctgggttttcccatctctctaggacctaaactctattcttagaactccccatgattcctggaggccccacctggcaggtgtccacacccccttccgggatgcctgcacacatcatcttctcggtgacttccccctggtacgcatcgtctgcattgcaccgtgtgctgtcaatgacctggactgacgcctgcagcagtatgtcagacatcttccttgggagggtaaaaacactcacattcccatccttgccttctatcccccagccctggattgccaaaccactttgctttctgcctggcgccttggtgcttggtcctccaggatgggtttctctgaagggtggtcctccttcccattacttctggaagctgctccctcatacaagggcatctcctgccctgtggtcctgcacccaggacttacctccattctgcttcgtaaagccccatccaatgatccagagtggggtggctggagtgagctcctcatcaaagggcagacagatgggcctgactgtgcctgagaaagtgagtgggaactgcagcttcatgagggcgatgtcattgtctttggggtacatggggttgaattcaatgatgatgatcttggccacagccagggatgggaagctgcccagtttgtctgagcctgcccgcaccttccagttgaacacatcggt

SEQ ID NO: 15789 - DNA, 1169 bp, Homo Sapiens
accgtgtatagacgtggcttcaggaaacataccgatgtagtacactggaaggtgcgggcaggctcagacaactgggcagcttcccatccctggctgtggccaagatcatcatcattgaattcaatccccatgtaccccaaagacaatgacatcgccctcatgaagctgcagttcccactcactttctcaggcacagtcaggcccatctgtctgcccttctttgatgaggagctcactccagccaccccactctggatcattggatggggctttacgaagcagaatggagggaagatgtctgacatactgctgcaagcgtcagtccaggtcattgacagcacacggtgaatgcagacgatgcgtaccagggggaagtcaccgagaagatgatgtgtgcaggcatcccggaagggggtgtggacacctgccagggtgacagtggtgggcccctgatgtaccaatctgaccagtggcatgtggtgggcatcgttagctggggctatggctgcgggggcccgagcaccccaggagtatacaccaaggtctcagcctatctcaactggatctacaatgtctggaaggctgagctgtaatgctgctgcccctttgcagtgctgggagccgcttccttcctgccctgcccacctggggatcccccaaagtcagacacagagcaagagtccccttgggtacacccctctgcccacagcctcagcatttcttggagcagcaaagggcctcaattcctgtaagagaccctcgcagcccagaggcgcccagaggaagtcagcagccctagctcggccacacttggtgctcccagcatcccagggagagacacagcccactgaacaaggtctcaggggtattgctaagccaagaaggaactttcccacactactgaatggaagcaggctgtcttgtaaaagcccagatcactgtgggctggagaggagaaggaaagggtctgcgccagccctgtccgtcttcacccatccccaagcctactagagcaagaaaccagttgtaatataaaatgcactgccctactgttggtatgactaccgttacctactgttgtcattgttattacagctatggccactattattaaagagctgtgtaacatctctggcataggctagctggaatgcttgataagaactgaa

SEQ ID NO: 15790 - DNA, 1940 bp, Homo Sapiens
cagcctggaaggtgcgtgtggggctgggtctcggagtgcgaaacgtggagtgcaggtaatgcatgtccatggtacacaaattcacaagttgggagaccctgacacacccaccttctcacctgggctctgcgtatcccccagccttgagggaagatgaagcctaaactgatgtaccaggagctgaaggtgcctgcagaggagcccgccaatgagctgcccatgaatgagattgaggcgtggaaggctgcggaaaagaaagcccgctgggtcctgctggtcctcattctggcggttgtgggcttcggagccctgatgactcagctgtttctatgggaatacggcgacttgcatctctttgggcccaaccagcgcccagccccctgctatgacccttgcgaagcagtgctggtggaaagcattcctgagggcctggacttccccaatgcctccacgggaacccttccaccagccaggcctggctgggcctgctcgccggtgcgcacagcagcctggacatcgcctccttctactggaccctcaccaacaatgacacccacacgcaggagccctctgcccagcagggtgaggaggtcctccggcagctgcagaccctggcaccaaagggcgtgaacgtccgcatcgctgtgagcaagcccagcgggccccagccacaggcggacctgcaggctctgctgcagagcggtgcccaggtccgcatggtggacatgcagaagctgacccatggcgtcctgcataccaagttctgggtggtggaccagacccacttctacctgggcagtgccaacatggactggcgttcactgacccaggtcaaggagctgggcgtggtcatgtacaactgcagctgcctggctcgagacctgaccaagatctttgaggcctactggttcctgggccaggcaggcagctccatcccatcaacttggccccggttctatgacacccgctacaaccaagagacaccaatggagatctgcctcaatggaacccctgctctggcctacctggcgagtgcgcccccacccctgtgtccaagtggccgcactccagacctgaaggctctactcaacgtggtggacaatgcccggagtttcatctacgtcgctgtcatgaactacctgcccactctggagttctcccaccctcacaggttctggcctgccattgacgatgggctgcggcgggccacctacgagcgtggcgtcaaggtgcgcctgctcatcagctgctggggacactcggagccatccatgcgggccttcctgctctctctggctgccctgcgtgacaaccatacccactctgacatccaggtgaaactctttgtggtccccgcggatgaggcccaggctcgaatcccatatgcccgtgtcaaccacaacaagtacatggtgactgaacgcgccacctacatcggaacctccaactggtctggcaactacttcacggagacggcgggcacctcgctgctggtgacgcagaatgggaggggcggcctgcggagccagctggaggccattttcctgagggactgggactccccttacagccatgaccttgacacctcagctgacagcgtgggcaacgcctgccgcctgctctgaggcccgatccagtgggcaggccaaggcctgctgggcccccgcggacccaggtgctctgggtcacggtccctgtccccgcacccccgcttctgtctgccccattgtggctcctcaggctctctcccctgctctcccacctctacctccacccccaccggcctgacgctgtggccccgggacccagcagagctgggggagggatcagcccccaaagaaatgggggtgcatgctgggcctggccccctggcccacccccactttccagggcaaaaagggcccagggttataataagtaaataacttgtctgtacaaaa

SEQ ID NO: 15791 - DNA, 1521 bp, Homo Sapiens
  misc_feature (54)..(54): n is a, c, g, or t
  misc_feature (61)..(61): n is a, c, g, or t
tacagttctgcgcgctccacataggtgcgcgccacgccccgcccttcgagcggnccggaancttcaaaacaggctggaaggtgcgtgtgtggctgaatctcggagtgggagacgtggagtgcaggtaatgcatgtccatggtacactaatttacaaggtttgtaaatgagaaaagacgtgaggttccttttgttctttacctgtggcctccctgccctacacggggactctagggtggaatgtagcaaagcccatccaccagccatgtactaccccccaacccggccaggctggagcgaccgtgtctggggagccgagccccgcttctcgctgcggtgagcccggactggggcacgcactgcgcagactccccgctgcagtgggcggagctcccacaggccccgccccctcctcccaccctcgttcagcctgtccagacagaagctggggcccagcggaggtagcagcagacgcctgagagcgaggccgaggcccctcagggtttggagaccctgacacacccaccttctcacctgggctctgcgtatcccccagccttgagggaagatgaagcctaaactgatgtaccaggagctgaaggtgcctgcagaggagcccgccaatgagctgcccatgaatgagattgaggcgtggaaggctgcggaaaagaaagcccgctgggtcctgctggtcctcattctggcggttgtgggcttcggagccctgatgactcagctgtttctatgggaatacggcgacttgcatctctttgggcccaaccagcgcccagccccctgctatgacccttgcgaagcagtgctggtggaaagcattcctgagggcctggacttccccaatgcctccacggggaacccttccaccagccaggcctggctgggcctgctcgccggtgcgcacagcagcctggacatcgcctccttctactggaccctcaccaacaatgacacccacacgcaggagccctctgcccagcagggtgaggaggtcctccggcagctgcagaccctggcaccaaagggcgtgaacgtccgcatcgctgtgagcaagcccagcgggccccagccacaggcggacctgcaggctctgctgcagagcggtgcccaggtccgcatggtggacatgcagaagctgacccatggcgtcctgcataccaagttctgggtgggtgggaccagacccacttctacctgggccagtgccaacatgggactggcgttcactgaacccaggtccagggaactgggcgtgggtcatgtacaaatggccacctggcctggcttcgaaaaccttaaccaaaaaccttttgagggcctcctgggcccctggggccagggaagggaaactcccatccccatcaaaatttggccccccggtgtcttatagaaacaccgctttacaacccgatgaaaaacccacttgggagaaatctgtcgctctaatggaaaccccctcgagcttggggccgtaccttagcgtgaactaccgccgctcacggcgccg

SEQ ID NO: 15792 - DNA, 1030 bp, Homo Sapiens
tgtcctcttggggggaaacacaggggccaaggccttactttccttcggggcccggggttcctctgccaaggtgtctccaccccgggaggtttgtggcccggccggtatttcttctgggcatcttccaaaagggttgagccacccccaggaccccaggtcagaccacggacatgccatcccaggggaacgtcactggggggcaagctcagcaaagtagctctttccgtctggggctttctggggcaagaagtgggagagggaggttctcaaaatagcagggcagccgcacactggtcatgggaacgccaatgtcccggaaatattcctccacctcccctttgccgtcaaagtgcgcggcggccaatctccctgccgtcagcttcttgatgttctccaggccgctgtagaccacatagtggaggcccaggcgcctggccaccatcaggacgagaatgggacgaatccggtccagagatcggctggagtgacctcctgctcctggctgcagctctcccagtaattggtcacgatgaaggtggcgtaagcccaattcagggccagctccatgatgacctggtcatcttggtctccctgcactacttctgcaccttgcagcctcagctcctttgctgccttcttcctagggtttcgggtcaccactcgaaccttgaatgtcccatcttccaggagtgtgcgggccacggagccaccctgggcacctgtgcctccgaaaaccaccaccagtttcttgtccaccatgaggacgagaatgggacgaatccggtccagagatctggcagagcgccgctcacggaagcccagcgtcggaggacccctggctgcagccgccaatcccgacgtgtcggccgaaacccctcctccggcgcagttggctcctcctggatcccgcgggactcggcgtcgtttccgggtttgcccgccccaggcacgtgcacagtgagtttgtgtaaatccagttagaccaaaatgagcgaggtggagagcctcttaaccggatgctacgggtgat

SEQ ID NO: 15793 - DNA, 527 bp, Homo Sapiens
tttgagaacctcctctcccacttcttgccccagaaagccccagacggaaagagctacttgctgagcttgcccacaggtgacgttcccatggatggcatgtccgtgtctgacctgggtcctgtggtgctcagccttttgaagatgccagaaaaatacgtcggccagaacatcgggctgagcacttgcaggcacacggccgaggagtacgctgccctgctcaccaagcacacccgcaaggtcgtgcacgatgccaagatgactcctgaggactacgaaaagcttggctttcccggtgcccgggacctggccaacatgttccgtttctatgccctgagacccgaccgtgacatcgagctgaccctgagactcaaccccaaggccctgacgctggaccagtggctggaacagcacaaaggggacttcaacctgctgtgacctgcccgcctcgcggccccttgtggggatcgggggcaccagaggggcagaggcaccaacatctgaataaagccattgttctcccaaaaaaa

SEQ ID NO: 15794 - DNA, 416 bp, Homo Sapiens
ccggagcgccccccggaggttaaccccgcatcagcgccgggcctaccgttcccgctgctggaacccttcacgacccccgcccctgcccccaccggaccgttcctgccctacttgaaccctgcgccctttggcctaagccccccgcgcctgcgccccttcctggccgctgcacccgggccgccggcttccagcgccgccgtctggaaaaagagccaaggtgctggcagcagcccccgaagaccccagggcggctccgacgcgccctcaggtgcgtgcaggtgaccaccagggaggggtggaggggctttctttcctgcgccctgcggggtccggtggataccaggaggcagcagtgctcatccccttcccagggggcacaaatgccaccgtcccgaaatacaggatttttgccttgg

SEQ ID NO: 15795 - DNA, 525 bp, Homo Sapiens
ctgagctgcaccgagaccttccccagcatgcaggagctggtggctcacagcaaactgcactacaaacccaatcgctacttcaagtgtgagaactgcctcctgcgcttccgcacgcaccgctcgctcttcaagcacctgcatgtttgcgcggagcatgcgcagagcccagccccgccgccacccccggccctggaccgagagccgcccgcgccggagcgccccccggaggttgaccccgcatcagcgccgggcctgccattcccgctgctggaacccttcacgacccccgcccctgcccccaccggaccgttcctgccctacttgaaccctgcgccctttggcctaagccccccgcgcctgcgccccttcctggccgctgcacccgggccgccggcttccagcgccgccgtctggaaaaagagccaaggtgctggcagcagcccccgaagaccccagggcggctccgacgcgccctcagggcacgagacccagagccgcatcgtgtgggagcacacacgcggccgc

SEQ ID NO: 15796 - DNA, 593 bp, Homo Sapiens
  misc_feature (31)..(31): n is a, c, g, or t
  misc_feature (169)..(169): n is a, c, g, or t
  misc_feature (188)..(188): n is a, c, g, or t
  misc_feature (192)..(192): n is a, c, g, or t
  misc_feature (511)..(511): n is a, c, g, or t
ggccccactccgagaaggcgttaaacgcgcnaggtagtgagtgccaaacttaagttatttgctttcggaggtaccagtgtcagtcatgacaagctccccaaagttcagtgttacgatcagtgtgaaaacaggtggactgtaccggccacctgtccccagccctggcgtntacacagcagcagctgtcntggnggaaccagatttttaattaaggggggtgatacagaattctctgcctgctctgcttataaattcaacagtgagacttaccagtggaccaaggtgggagatgtgacagcaaagcgcatgagctgccatgctgttggcctctggaaacaaactctacgtggttggaggatactttgggcattcagcgatgcaagactttggactgctacgatccaacattagacgtgtggaacagcatcaccactgtcccgtactcgctgattcctactgcatttgtcagcacctggaaacatctgccttcttaaatgcagtacattctaanagaagatgagcatgagctcactccatcactcgatgagataatatgagatttctacttcggagaggccaagtctaatgaagag

SEQ ID NO: 15797 - DNA, 1589 bp, Homo Sapiens
cgcgatagtactatagaccagtgttaaaaaagaggtggtacggtccggatatcccgggatatcgtcgaccacgcgtcgagccatcgttcggggcgcagtcctctccccggctggcctcctttctccggggcattcgccaccgcttccctgggctgagacgaccggttcgtcgcctccttgcccgtgaccgtcgctagaactcagttgtgcgttgcggccagtcgccactgctgtgcatcatttctggcatggcttcaggaagcattgtgctattttacaacgactttaaccggtggcatcatgaataccaaacccgctactgatggtgacagctgtacatcaactctgcccctaggatgagcagaagtacctggagcatcattctcttctaccacatctgaatgtaacttaaatttgctcaaagaagcaaaatattttttaaagttattaataatgctattttgtagtctttgcttgactttttgggggggattagcaaagcagaaaactggctgctgggttctgtagttttaaaaaatctatatttttagtcataatgagaagtctattttcaccaattatggaaacatacagtggagcaagtaaaccacttattccagctataatattatgaagaacatttcccatgcatctacaagcttgagaaataggattttcacagtggggaagtgggttacaatattggaataggaaaatttgatgctgtaatttgggtcctgtatttttccaaacaactgtgcttcttcagcactaatatttctgggatttaaatagtaatgtttaaattatggtaaatgtaatttaaaacatctcaattaagtctgtctatcaatattgttcttcaagcatgttttagacctagaaaagtatggtttgggggaggctattttattgtgtggttagcacaaggaatctaatttatagcaagtgtgaaatagttaccattttttcctgatctgtcatcttcatagcacaacaaaacgaaatgatggaaatgctcttgagctcacaacatttgtttttcttttaaagtaaatgcaagtaccaaagctcactactgcggtttgcctgtgcctggacaatgaggcggagccactgttgttgggcacccccttccctccccgggtttgcaaatagaggctaccgggtgctgtattcagcaacacctgttttactatttgttattaaactatcatctccaccttccttttgattagcaatttgtactaagaaacgaaacaatgttatttggtggtgtataattctacttttctagtagattactgtgtggaattctgtgaaaaatatttgagaaaaggcctgtattgcataaataaattctttgtatgttgtgaactttgatctctatttctcttgcaacagacttcaagtggtccctctttttttcctacacactcagctcttctctaaaagcaaggatttggaatgaacaattcagtttgacagaaaaagctgaataaaatggcatctgtaattgaattgttggaaatgcctgttttgctcctaaattttaaacatcatcattaataaaataatgattcacaaag

SEQ ID NO: 15798 - DNA, 373 bp, Homo Sapiens
  misc_feature (99)..(99): n is a, c, g, or t
gctccctcccccgagcgcacagcccgcctccttccgcggcgcctgcagtggcacgtatgactctgccctaccgtgacgcgctccggagacgctctgcgngtcctggacaccgggtccgcggcgtggggacgacagacggaggcgaaccaatcggtaaccggtccgcgagccatcgatcggggcgcagtcctctacccggctggccctcctttctccggggcattcgccaccgcttccctgggctgagacgaccggttcgtcgcctccttgcccgtgaccgtcgctagaactcagttgtgcgttgcggccagtcgccactgctctcactccatcactcgatgagataatatgagatttctacttcggagaggcc

SEQ ID NO: 15799 - DNA, 625 bp, Homo Sapiens
agcgtgtcaagggtgggcctgtaattggcgatctcttacgccacgtccttgtgtttcttgaccagagactgtgtggaatactcatcgtggcccacgtcgctgctggagacaatcttgaggatgtccagcatccaggcatcaatgtcatcagcatctgcctggaactggtgaaattgtgaatgttgacattggggtacccagctgtcttcatctggcaccacaacagcaatgcatccttggcagatttcttctctttgttgtcttcagtttccacactgatatcctggatctggaagcgcaggatgatggtccagatgaggccaagggtcagccggtggtttccatccacgatgtcatgggaccccatgttctcaagatggactctctgctccttcaggaactgaagggccttgtccacattctctaagcagtggatgcgcattcgtcccttggtgggtttaggcagcctctctccagagaggacctccagcagcttgatgagcatccgtccatctcgaaggtcagtgtacaggtctgtgatccggcaggacacacgggcaaggtgggaattgacccacttggtgaaggtcttcttctgcacggcttcacgctcatcttgcagctg

SEQ ID NO: 15800 - DNA, 473 bp, Homo Sapiens
tacgggagaaggagaagatcctgtcctcggacgattacgggaaagacctgaccagcgtcatgcgcctgctcagcaagcaccaggcgttcgaggacgagatgagcggccgcagtggccactttgagcagaccatcaaggaaggcgaatgacatgatcgcggaggagcacttcgggtcggagaagatccgtgagaggatcatttacatccgggagcagtgggccaacctagagcagctctcggccattcggaagaagcgcctggaggaggcctccctgctgcaccagttccaggcagatgctgatgacattgatgcctggatgctggacatcctcaagattgtctccagcagcgacgtgggccacgatgagtattccacacagtctctggtcaagaaacacaaggacgtggcggaagagatcgccaattacaggcccacccttgacacgctgcacgaacaagccagcgccctccc

SEQ ID NO: 15801 - DNA, 941 bp, Homo Sapiens
ttcaccaaaattcctttatgtaagtaaccctctcaacagtgctaagaagtaagtattgacattttcattttgcagatgagaagcatggattctgggacgtcaggtctatgggccatccaggtcagaactctcttgacctcgccctgcaacgggtcctccaaggaccatgagccttgggggaggcgggtcacaggatacaagaaagatgaggaagtataaaaggaaatgttcacgtcaaaattgccatactggacttcctcgacctggatggtgttattagcaacgtggatggtgtcattagcaatgtacatggtgctcgacccaggtgttctgaagcattctgcagctgacgtgaatacggaggtctgtcctcctcttgatgatgccacctgagacagctgctgtgaggaagttggaatagtcgatggtgtcattgtctgcctgcttgaaggtgccgcagcctgagtagggaattgtgaatatcaccaggttcggcgttatctggggccgacactcgtagtatccattccaggtggaaatgacaaggtcactggcagaaaagcccaaggattggagatagctcctgctcacactggcttgcatgtgatttggcagacagagcaggttggtgctgtcattggagggactggagtagtactcagcccggaaccctctccttgtgatgctgtggtcactgatgaagcgaatggacatgaagttggaggaagaagtgaaggagcctctggccccatcacaaactcgagcaatgagaggggaactgcggtaggggccatcgaaaacttcaatataatcatagttgcagccaccttcaagctggacatctctgaagatcacagtcacacggtagttgttttgcacctcaatgtcccacacacacttggcattgtttggatagttccgggatagaatgggctggaaaa

SEQ ID NO: 15802 - DNA, 1260 bp, Homo Sapiens
  misc_feature (710)..(860): n is a, c, g, or t
  misc_feature (869)..(882): n is a, c, g, or t
  misc_feature (896)..(1019): n is a, c, g, or t
  misc_feature (1024)..(1086): n is a, c, g, or t
  misc_feature (1103)..(1111): n is a, c, g, or t
ggagggctgatgggcagcacaggaggcccgtcctcggggggctgcgcacatcacgctccttgccgggcgtccggcacagctgcggtcaccaaagcaggtgctggccctcggacctgagagcccagccagggcccatgtggtctgcaaatgggagcggctgtttttgaacacggggtcattctgcagtcaggacgaaccggtccccgtcgcagacggagtgcacgtgccctgcgccacatcctcacgctcggtggagggacgcgtgcggcgggacggtgcctacgggtacttgcagctgtgtcccatgtggcatcccagagctgcgccctgctggtctctgtgagcgccacgctgctgtgctggaaatgccgctttaaaaagggataccgtgggactctgcccgtctctttcataacgcaatatttatttgtattgggtgacgattgattctttcgacctaacagtttgggctttaaccaaataaccggtccaggagtgagcagctccgttctgtcagatgctactccaaatgttaccagaacgatgacaaaaggggagacgctctattttttcacagttaaatgacagttgtagattgatacgcagttgtgcatgggaaggggaaacgcacagctttatttactgtaaagtggaatttcaggaaggcttgtgtgaaccgttgcgcataaataaaccctttctaccgggcnnnnnnnnnnnnnnnnnnnnnnnnnnnnnnnnnnnnnnnnnnnnnnnnnnnnnnnnnnnnnnnnnnnnnnnnnnnnnnnnnnnnnnnnnnnnnnnnnnnnnnnnnnnnnnnnnnnnnnnnnnnnnnnnnnnnnnnnnnnnnnnnnnnnnnnttttggggnnnnnnnnnnnnnnaaaaaatttttaannnnnnnnnnnnnnnnnnnnnnnnnnnnnnnnnnnnnnnnnnnnnnnnnnnnnnnnnnnnnnnnnnnnnnnnnnnnnnnnnnnnnnnnnnnnnnnnnnnnnnnnnnnnnnnnnnnnnnnnnnnnggttnnnnnnnnnnnnnnnnnnnnnnnnnnnnnnnnnnnnnnnnnnnnnnnnnnnnnnnnnnnnnnnttttaaataaaatttannnnnnnnngggccttttttgaagaaagggggaaaatcaataaaaattccccccaaatggaaacccttccaaaggggggttgataaccttaatcccccagggaattcacaccttgggccccttgggaaaaaaatttccccccggggaaaaaagggggg

SEQ ID NO: 15803 - DNA, 1267 bp, Homo Sapiens
cggtagaaagggtttatttatgcgcaacggttcacacaagccttcctgaaattccactttacagtaaataaagctgtgcgtttccccttcccatgcacaactgcgtatcaatctacaactgtcatttaactgtgaaaaaatagagcgtctcagcagcacagtgagcagcagccgcgccaccctgagccgccgcacagaaacagacacgcgccggcatgcggccaccgccagcctcagggccaggagcccccaaggcgaggagccacccaggactcgcctctgaaacgtccctccagccgtcgtcgaccgtggtgtctccacgtggcctggccagttcagtccagctcgatggggctgccgtcgctggggctctcctccccatcctcctgctctgaggagcccatgaggctggtcagaaggttcccgagcaggcccccgtaggaagacgtctgcttgggcgggacgccgaagaacagctgtcctatgcggtcgaggtactcgttgtacatggggtcccgccggagggatggctggtactgctcacacagcacagtgaacaccgtcagcttcccaccgtccacagccagcagcaggaaccagatgaagttaagcagcggctccacaaacggaggcccgtcctcgatggacgggtgcttctgggtgtacgtcgtgaagaccaccgatgcgctacttttgttttttaaacagagaaactgtagcacggcctgggccacgaacatgtccacctcgctgcggaagccgcgggacgtggaatactccaccagcatgttggcacagccctccccgtccgctgagtgcagaaaatgatacctcgactcacaatagttttgttctttccacagggtgagggccagcagctggtgcagccgggggtggcccagcttcccggagcccccactggaccacttcagggctctggacacaaaggtcacgcgctcaggagagttggggtccatcaggctgaacactttagccagattttccagcagctcgtcagccacctccacttccgccttctccagggactccaggaccagcatggacaagtctgctgcactgttttgctggccatggctgaagaagagcagggctcccgagtacatgagctcccgggcctccgtgtgcttgctctgggacatgtacctgaagaacagggtccggtacatctggtgcgcctcgtagtagtcgcccttctcgagctggcgcgcagcttgccctccacacgctggaacgcccggtgcggccc

SEQ ID NO: 15804 - DNA, 1004 bp, Homo Sapiens
acacagctagcacagaagacgactttaatcagtgattcgaaattgaaagagcaagagttcagagaacagattcacaatttagaagaccgtttgaggaaatatgaaaagaatgtatatgcaacaactgtggggacaccttacaaaggtggcaatttgtaccatacggatgtctcactctttggagaacctaccgaatttgagtatttgcgaaaagtgctttttgagtatatgatgggtcgtgagactaagaccatggcaaaagttataaccaccgtactgaagttccctgatgatcagactcagaaaattttggaaagagaagatgctcggctgatgtcatggctccgatcttcatcttgaagaagagtgacattgggtgactgctgcttggaaaactgtccacacttgctactctttgagaatgaagttgtcattcagggcccctcatgtagccaaaagaccaagaaaaatctggcccacagataagttgcagactgcctttaaaatagattttatcagtggagaaatggtgatagttttttcttcagttttctcttgggaagagttttatgttgtttaaaagatattttgataacttaacctgctttatgggcttacataatattcctttcatccattctttttaaagaacggcttacctttcctatttatttttagggtgattttttaaaaagacttgtgcaatacattttgaggtgaaacttagtggattttttctgataaattagagcatttaattgactattttattcaggttgatctgttgaatatttgctaaagaccagttctttaagctaagacatgtaaaaaatcccaaatggcagtacctcattgtttacttagcttttgtacttatatttttcagaggaaaaaacactactgtaaattgtgaatagccaatacataactgtattgtatgcaaatctgtgattgttggcagtgtcatctctgagaaacagataaataaagtttatttactataa

SEQ ID NO: 15805 - DNA, 661 bp, Homo Sapiens
tgatctaaaacgaacagccaaaagatatgaagaaatccttgatgctcgtgaagaagaaatgactgcaaaagtaagggacctgcagactcaacttggggagctgcagaagaaataccagcaaaagctagagcaggaggagaaccctggcaatgataatgcacagctagcacagaagacgactttaatcagtgattcgaaattgaaagagcaagagttcagagaacagattcacaatttagaagaccgtttgaagaaatatgaaaagaatgtatatgcaacaactgtggggacaccttacaaaggtggcaatttgtaccatacggatgtctcactctttggagaacctaccgaatttgagtatttgcgaaaagtgctttttgagtatatgatgggtcgtgagactaagaccatggcaaaagttataaccaccgtactgaagttccctgatgatcagactcagaaaattttggaaagagaagatgctcggctgatgtttacttcacctcgcagtggtatcttctgagtaaaccatcagtctgtgcttagttaacatgtgtcatggctccgatcttcatcttgaagaagagtgacattgggtgactgctgcttggaaaactgtccacacttgctactctttgagaatgaagttgtcattcaggac

SEQ ID NO: 15806 - DNA, 664 bp, Homo Sapiens
  misc_feature (73)..(73): n is a, c, g, or t
  misc_feature (380)..(412): n is a, c, g, or t
gtaattaagattccagagagtggctcctccgggtgcccaagaatagatgctgactgtactcctcccaggcgcncctcaccctccaatcccaccaaccctcagagccacccctaaagagatcctttgatattttcaacgcagccctgctttgggctgccctggtgctgccacacttcaggctcttctcctttcacaaccttctgtggctcacagaacccttggagccaatggagactgtctcaagagggcactggtggcccgacagcctggcacagggcagtgggacagggcatggccaggtggccactccagacccctggcttttcactgctggctgccttagaacctttcttacattagcagtttgctttgtatgcacnnnnnnnnnnnnnnnnnnnnnnnnnnnnnnnnnccacttagaaattgcatttcctgacagaaggactcaggttgtctgaagtcactgcacagtgcatctcagcccacatagtgatggttcccctgttcactctacttagcatgtccctaccgagtctcttctccactggatggaggaaaaccaagccgtggcttcccgctcagccctccctgcccctcccttcaaccattccccatgggaaatgtcaacaagtatgaataaagacacctactgagtggcaaaaaa

SEQ ID NO: 15807 - DNA, 893 bp, Homo Sapiens
  misc_feature (859)..(859): n is a, c, g, or t
cattgttgaggcagtgctcagatccgtggtgagatcttcttcttcaaggaccggttcatttggcggactgtgacgccacgtgacaagcccatggggcccctgctggtggccacattctggcctgggctcccggaaaagattgatgcggtatacgaggccccacaggaggagaaggctgtgttctttgcagggaatgaatactggatctactcagccagcaccctggagcgagggtaccccaagccactgaccagcctgggactgccccctgatgtccagcgagtggatgccgcctttaactggagcaaaaacaagaagacatacatctttgctggagacaaattctggagatacaatgaggtgaagaagaaaatggatcctggcttccccaagctcatcgcagatgcctggaatgccatccccgataacctggatgccgtcgtggacctgcagggcggcggtcacagctacttcttcaagggtgcctattacctgaagctggagaaccaaagtctgaagagcgtgaagtttggaagcatcaaatccgactggctaggctgctgagctggccctgctcccacaggcccttcctctccactgccttcgatacaccgggcctggagaactagagaaggacccggaggggcctggcagccgtgccttcagctctacagctaatcagcattctcactcctacctggtaatttaagattccagagagtggctcctcccggtgcccaagaatagatgctgactgtactcctcccaggcgccccttccccctccaatcccaccaaccctcagagccacccctaaagagatactttgatagttttcaaccacacctgctttgggctgncctgtgcagcatacctacggatcctctagatcaa

SEQ ID NO: 15808 - DNA, 925 bp, Homo Sapiens
gggggtgcctgcgaagagccacacggcgcgacaagatggcggataaggagaagaagaaaaaggagagcatcttggacttgtccaagtacatcgacaagacgatccgggtaaagttccagggaggccgcgaagccagtggaatcctgaagggcttcgacccactcctcaaccttgtgctggacggcaccattgagtacatgcgagaccctgacgaccagtacaagctcacggaggacacccggcagctgggcctcgtggtgtgccggggcacgtccgtggtgctaatctgcccgcaggacggcatggaggccatccccaaccccttcatccagcagcaggacgcctaacctggccgggggcgcggggggtgcagggcaggcccgagcagctcgggttcccgcggacttgggctgctgctcccaccgcagtaccgcctcctggaacggaagcaatttccctttttggaatagggtggaattttttggtttccttaagaaaaattgccaaacctcctaaaacgaacggtgctacgccgcggctcaaataaggaaagccattgttccggggccggcccttcgggctccctctcgaaaaaagcttttttccaaggacactatttccctttttgggccgcccccgcggcccccactgtagggcacaagttggaaactttgggcccaataacggtgggtttccccaaggggaaaatccctcggggcccattggcaccaaaggggcttttggggtattcttgccccccaaaatagaaaaaacgcccccggggcggggaaaacccgtaagggggtttctttgagaccaaaactccccagaatggggagcgtgttcgaacgggggctgttcaaacgggggaatccttttccgacaccgcgggagttgcccccgcgagagacctttgccaatattt

SEQ ID NO: 15809 - DNA, 1188 bp, Homo Sapiens
  misc_feature (103)..(113): n is a, c, g, or t
  misc_feature (168)..(220): n is a, c, g, or t
  misc_feature (319)..(337): n is a, c, g, or t
  misc_feature (544)..(558): n is a, c, g, or t
  misc_feature (734)..(776): n is a, c, g, or t
  misc_feature (801)..(917): n is a, c, g, or t
ccacacccccactggggggggcccaaaaaaattatttttttatatagccgcggccaaaaggggggcggggccccaaacagggggttggaccttcaaatatttnnnnnnnnnnntggggcggggaattttttccagggggtgtttctcacttcccaattgcccccccgnnnnnnnnnnnnnnnnnnnnnnnnnnnnnnnnnnnnnnnnnnnnnnnnnnnnnaagaaaaaataggcctctttttaaaattagagaaaattatttcaccgacagcccagggtttttcttctgtcccggaaaatggagagtttggggccacannnnnnnnnnnnnnnnnnnccgcgtataaaatatttttgtgaaattatttttgggaaggccctttccgcgcctttgtggggagatctcccccccctgggttggggaataagggaattccccccagggtaaaattggacccccttccaaggaaaacttcccccattcttgggatatttggttttccaggagaaccgccttccgggttttccccgccccggggggcgnnnnnnnnnnnnnnngggtgtaggaaatcccaaaggcccctatggttcattgggcccagggaattctcccttaagggaaaacaaggctattgggcccatggtttcacttttccctacttggggccccgcggcgccaaaaacgaattggtcttagaaagcttcctcgaggggccgaggcgggccgacaaggnnnnnnnnnnnnnnnnnnnnnnnnnnnnnnnnnnnnnnnnnnnatcccccaccacgctgcccaaaaannnnnnnnnnnnnnnnnnnnnnnnnnnnnnnnnnnnnnnnnnnnnnnnnnnnnnnnnnnnnnnnnnnnnnnnnnnnnnnnnnnnnnnnnnnnnnnnnnnnnnnnnnnnnnnnnnnnnctaggttaacttcttaaaacaatgaaggaatcacagtgttaacattgtttgtaaagtgtagtatttgtcaggcaactgaaacaatcagacttccaaatgaagtcatttgcaggctgtgaccaacttttccctgaattcaaattgacaaaactactttgtagagatgcaagagtcttgcctcacttccaggaatgatgtagtggattcatgcaccggaaaggaaaaacaataagtctcagactaaaatgagagggagaaacagcccggattt

SEQ ID NO: 15810 - DNA, 1032 bp, Homo Sapiens
  misc_feature (890)..(915): n is a, c, g, or t
caccaccccatcagtctacgcagtcccagcccctcgcctccggcagctttctgcaccagttggaccaggtcacgagtcaagtactggccggattgatggaagcgcagaagagcgctgtccccggggacttgctcacgcttcctggtaccacagagcacttgcggtttacccggcccttgaccatggcagaactgagtcgccttcgtcgccagtttatttcgtacactaaaatgcatcccaacaatgagaacttgccgcaactggccaacatgtttcttcagtatttgagccagagcctgcactgaccagaggaggtaggggggaagccatggcttctgatctccactccactttatttctctgggaaaaataggctgcaggtctccagagcatatcgatgcagtactgtactagagctgttgtgactgattcactcaaactttcctgcatacccctgtgccaggccttgggtttacagcataagttcagactaaagagaatggagaactattgtggtgcaacctggcaaatccctcagaggacagagctaaggtggacagggattacctagattggatcctacttgggctatcacagagcattgaccattggcttccctcatctgaggcgtgggagagcagactggatagatgagaattgttttaaaacaattgtgaacagaaactgaagatggtacagttctacatctgcacctgcccttttttcataccacaaaagtattttttgagtactgtactgactttttgctagtttctattctgggaccgagttcacagataaatccattggtttgtatccttgagaaactttgtttttgtggaagtaagaaagttatctactagattatttcctctaataaaatcttttannnnnnnnnnnnnnnnnnnnnnnnnnaacatggtcggcccgcctcggcccctcgaggaagctttctaagaccaattcgttttgggcgcgcggggccccagaagggtaattggaacatgggtccataagctgtttttcctaagg

SEQ ID NO: 15811 - DNA, 995 bp, Homo Sapiens
  misc_feature (249)..(420): n is a, c, g, or t
ggggtagctgtcctctttatcctggtgtttgccacttcgaacagtcactttcccacttggaacttacttgtggctttgctgacaaaacaaaaaccaaatatggcatcttccatgaggagcttgttttctgaccacgggaaatatgttgaatctttccggaggtttctcaaccattccacggaacaccagtgcatgcaggaattcatggacaagaagctgccaggcataataggaagataccagaattgnnnnnnnnnnnnnnnnnnnnnnnnnnnnnnnnnnnnnnnnnnnnnnnnnnnnnnnnnnnnnnnnnnnnnnnnnnnnnnnnnnnnnnnnnnnnnnnnnnnnnnnnnnnnnnnnnnnnnnnnnnnnnnnnnnnnnnnnnnnnnnnnnnnnnnnnnnnnnnnnnnnnnnnnnnnnatgcacatgctactccagacgctgaagtgggaagatcacttaagtccgagagatcgaggcttcagtgagatatggctgagacactgctctcagcctggatgacagagattggagacacaaatcagaaattaagattctaagcataggcggaggggcaaattgtctcattcggggaagctccagggttctcaagcggaattccgggtttcattttgggtagcacccgtcagaaagacaagccaggcatgaaggatccatgatgagccgctcttctgaattgccatttggaactgcccggtttagaaagcaaatctgcatttccctcattcctagtttccttcatcctcttaaagtgttcatcttttccatgaagcctactagatcacacagttgaaaattgcaaagtcttcacaccgcagcttcccctttctttgttgctttggttttctccgtgggacttcccaccatccgtaaaattaggtgtttttgcctgttttattcactgctacgtctccaatggttagaacctgacatttagtgggtgctcaataatatttgttgaagtaatgtataaa

SEQ ID NO: 15812 - DNA, 634 bp, Homo Sapiens
  misc_feature (66)..(103): n is a, c, g, or t
  misc_feature (185)..(256): n is a, c, g, or t
  misc_feature (285)..(285): n is a, c, g, or t
  misc_feature (289)..(289): n is a, c, g, or t
  misc_feature (291)..(295): n is a, c, g, or t
  misc_feature (403)..(468): n is a, c, g, or t
aggagaggatctagacaggtgggcctaattccaaggggcccttcctggcctggagaaggccttttnnnnnnnnnnnnnnnnnnnnnnnnnnnnnnnnnnnnnntatcacagttttcacacagcccctgctgcattctctgtccatctgtctgtttctattaataaagatttgttgatctgttccnnnnnnnnnnnnnnnnnnnnnnnnnnnnnnnnnnnnnnnnnnnnnnnnnnnnnnnnnnnnnnnnnnnnnnnntatctttaactaaaaaaagaaatacaaanaaanannnnntcttggccgcccgcccccggcccccaaaaaatttttcaaaaccccttcctttggggggcccgggccccccaggggaaaggggaaatggggccctaagtgttgttcccnnnnnnnnnnnnnnnnnnnnnnnnnnnnnnnnnnnnnnnnnnnnnnnnnnnnnnnnnnnnnnnnnnccccgccgcgggggggaaaacccaaagagggggttttttgaaacacaaaaaccccccaaaggggggggagttttttcggagggggccttttataccgggggggacctcccttacaacacacgcggggggcgccctcccagagcgggggagagccctccatacatat

SEQ ID NO: 15813 - DNA, 1089 bp, Homo Sapiens
  misc_feature (972)..(1027): n is a, c, g, or t
agctcaaacacatggatagatggggacggccggtgcgacatcccatacaccctgggcttcgcgctggacgacactggcttcagcacccaggacttgctcaccctattgtatactataggctgctatgctgggggcctccagcttgagctcaccacatacctctatggccaggacccttgaccagacaggcctgaaggaagacctgcggatggacaggagcgggcaggcccgcacatatccacttgctggagcccatgtttacagacagggacatacaccatgcagatcctgagttcctgctgtatgagcagggatatccatgcttatgtatccaaacacagagacccatgggaacaaatgagacacatatagatactgagacctgtgtgtacagtaggaccatgcactcacacccatctggagagggagcccccggtataccaagggagccagttgtgttcagacacacacatcacagcttgactcactaactgaggcctttccatagctccacagcttcccacctcctccccaccaaaccggggttctagagttaaggatgggggagggtattatactgcctcagtctgactcctcaacccagcagcaatttgaggggatgagggggaagaggagctgccttttggaggcccccttcacctgcagctatgatgcccttccccttctcccctgtcctcaccatatgccttatccccattctactcccctgctatgcaagtgcccctgtggcttgtccccaaccccctcagcaacaaagctcagctggggaaccaagagtaatttgaagaatgcttggaagtcagcgtcttccattccagaaagacccccattcttcctttgggggtatgatgtggcaagctggtttcagcccaggacccaccactgaggagaggatctagacaggtgggcctaattccaaggggcccttcctggcctggagaaggccttttnnnnnnnnnnnnnnnnnnnnnnnnnnnnnnnnnnnnnnnnnnnnnnnnnnnnnnnngcccctgctgcattctctgtccatctgtctgtttctattaataaagatttgttgatctgttc

SEQ ID NO: 15814 - DNA, 1119 bp, Homo Sapiens
ttttggagcgccccccccgtggggcgcatcccttactcccgggggggcggctcgcggaacgacgggtaccgcggccggacgcggcctccgagggtggccggcagacagcggcgagacaagtgcccggggccggtctcggtggaacaagcaggattctgctcagcacagactccggtcgcatcggtagtcccgtctgaacaggctcagccaagtgaaaatggcggcctgccgctcctgccatccgcaggtcttcttcaaggcgtgcttgtcaagggtcctgccaaagaggtagtggtgagctcaaccgagccccgagcataggagcgaagagtatagaagaggctgaggaatcctgggtgctgaagacagtgtcgccaagcgcgtaagccagggtggatgggatgacgccccggccgtactccaccatccatgtgtttggcccccactccacagctgttgcctcaccaggcccgtgtactaccgtctcccctgggtagaagacctcacttttggtggtgccctctctccactggtggaaggtgccagagatgatggtatccgagatctcagcccagtagcgccccgagtggccgcgggagcccaaggcggtgccgaagagcagcacatactcggacagcgaggcgtgcagaaggcacatggcgcccatccagccacccgcattcacgaacacccactgcagctcctcgtcgggcagcacgtggcctgggtgcagccgccgcagctccacgatcagacgagagaaggccagctcgtggtccagcccagcgtactgccgcgccaactgcgctatctcttcgcgctggaagacgaagctctgcgtacccagccagagccagacgacctgggtcagcaccgctgcgacagccaggagcagcgcggcccacgcccaccgccaggcccacggcccactgcatcccggcggcaggcctggcacggcgcagctcaggagggagccggggcctgaggctttgcagctcacaggcctccggagcccagccggctgcccacgaagcgctcaccccgacgcgtggtcgacgatatcccgggaattccgagcgtaccactgctttttttaaaactggttatattcacatcgtg

SEQ ID NO: 15815 - DNA, 563 bp, Homo Sapiens
ggggcacagcgcgggcgcaggcgccgagaggcgcacgggagacctcaggcccagactccactccccagctgtgaaaggactgctggccagacccccaagctagcccgccaggcctccatagagctgcccagcatggctgcgtccagtaccaagagttggtgggagacgggtgaggtacaggctcagtctgcggccaagactccgtcctgcaagactctttggcagttgcactgggtactggctgagttctggaaaacaggaatgtgagcagagtgctgcagatctccttgtcaggagcacctaagaactggcatgactctacaccctctctccttctgcaatgacctcgtgtcaagatggcagacctgcagagatgaatgtgcctggatacctgagtcaccaggtggaggaaactcccattgacatgcatcacactccacatatgaaacccttctttttctgcactgtcactggggttagggattattactcactgcaacttagcctagcattaagttgcttgactaatacaagtttcaataaatgtcgcttcatttcccatg

SEQ ID NO: 15816 - DNA, 591 bp, Homo Sapiens
gggacagcgcgggcgcaggcgcccagaggcgcacaggagacctcaggcccagactccactccccagctgtgaaaggactgctggccagacccccaagctagcccgccaggcctccatagagctgcccagcatggctgcatccagtaccaagagttggtgggagacgggtgaggtacaggctcagtctgcggctcaaagactccgtcctgcaagatggactctgtgactacatgactaataaaatatggcagaaatgacaccatgcagtttccaagcccaggccttaggagacaggcagcttccagttcagtcttttggagggtcagctctggggccctcagccatcacgcatggagtccaaccaccctgagacgtcatgctggagacccacctgtggatgccccagtcaagagtcctggctgagcccagcctcccagccacccccacccaaggcaccagaccacggagcttctggccaaggcttcaccaacttcacttgatgctgtgaggaacagaactgcccatccaagccctgccagaatttctaacccacaaagccacgagtcacaataaatgctatgggacaaaaaa

SEQ ID NO: 15817 - DNA, 447 bp, Homo Sapiens
agaagaggcataacttatacctcttcccagatggggtgctcttaattgttgatgaggtcttggagcctcccttctgctcccagaggcttttcttgctcatgtctccagccacaatatccttgcaggacggagtcttggccgcagactgagcctgtacctcacccgtctcccaccgactcttggtactggccacagccatgctgggcagctctatggaggcctggcgggctagcttgggggtccggccagcggtctcgatggcctgggtgtattgttccagccactgatcaatcttggagatgggcaagtctggctgggatttcttcacactgttactcttctctatggagcggtttagggactcggtcctgtcgatgagtttggtggtagggctcaggggaggcgagctctgttcgatggtcccctccaagaacattgggctgggtg

SEQ ID NO: 15818 - DNA, 514 bp, Homo Sapiens
cggacaggagatgggtgcaactccctcccctcctactctcacagaagggcctggatgcaaggttacccttgagctgtgtgccacagtctggtgcccagtctggcatgcagctacccaggcccacccatcacgtgtgattgacatgtaggtaccctgccacggcctatgccccacctgccctgcttcctggctccttatcagtgccatgagggcagaggtgctacctggccttcctgccaggagctctccacccactcacattccgtccccgccgcctcactgcagccagcgtggccctaggacaggaggagcttcgggcccagcttcaccctgcggtggggctgaggggtggccatctcctgccctggggccactggcttcacattctgggctgactcataggggagtaggggtggagtcaccaaaaccagtgctgggacaaagatggggaaggtgtgtgaactttttaaaataaacacaaaaacacaaacccaaaacaacaacaccaacatgt

SEQ ID NO: 15819 - DNA, 873 bp, Homo Sapiens
ggattgtaagctggattgacataacgacaggactaaagctgagactaggcttaaggtggggcgatgtcctgtcctcttcgcgctctatagctgtgacacgggggctggacggaggaggggccggcgaagatgatgtagtgaaccagtgctcgtgtgcttatctgcggcacccagtccccagagtgaagctgttgccaatgaactgcaggagctctccttgcagcccgagctgaccctaggcctccaccctggcaggaatcccaatttgcctccacttagtgagcggaagaatgtgctacagttgaaactccagcagcgccggacccgggaagaactggtgagccaagggatcatgccgcctttgaaaagtccagccgcatttcatgagcagagaaggagcttggagcgggccaggacagaggactatctcaaacggaagattcgttcccggccggagagatcggagctggtcaggatgcacattttggaagagacctcggctgagccatccctccaggccaagcagctgaagctgaagagagccagactagccgatgacctcaatgagaagattgcacagaggcctggccccatggagctggtggagaagaacatccttcctgttgagtccagcctgaaggaagccatcattggtgaggaggacccagccagcgtggccctaggacaggaggagcttcgggcccagcttcaccctgcggtggggctgaggggtggccatctcctgccctggggccactggcttcacattctgggctgactcataggggagtaggggtggagtcaccaaaaccagtgctgggacaaagatggggaaggtgtgtgaactttttaaaataaacacaaaaacacaga

SEQ ID NO: 15820 - DNA, 603 bp, Homo Sapiens
cccaacttgggcgagctgctactcaggcgcgagctgcagctgctgcaggatcttggcgtaggatgagtccatggggggtgcccccctgtcctgcttctggtccggggggatgtactggtggtacttgagcttcttcacctttggcttcagctccttggccttcttgctgcgctgtgacttctcactggcagacttgggttggctttgctgggtgggggatgcagaggtggcactgagcagtggttcgctgactcgggcctccaggggtgacggcacagaaccctgggactcatggctggcaggctgctcgggggataaggcatcgctgctgtcctcatcgaaggaagagctgtctgctactttgggatagttcacctggcccacaatgatggcttccttcaggctggactcaacaggaaggatgttcttctccaccagctccatggggccaggcctctgtgcaatcttctcattgaggtcatcggctactctggctctcttcagcttcaactgcttggcctggagggatggctcagccgaggtctcttccaaaatgtgcatcctgaccagctcttattgcccaggctaggaatggtcccgagg

SEQ ID NO: 15821 - DNA, 464 bp, Homo Sapiens
gggccccgagccatcttcagagggagagacaagagaggtggcaagcaaattagaggaacaccccccaagggtaagcagccttagaagtggctcccccaagggcaaaacaggggaaggcggtgtgtgtgagggggtggggcttaggagttgaccccacttgggctgttggaaagagctacccctatagccactcccaggcattttaaattttcttttagaaggagctgcctccatagccacccccaccgccatagccgcctctgtaaggtccactattactgcgaccgccccagctactgcctccaccgccgccgccgccgccgctcttcatgggcccataggaggactgatgctggctgtagctgccgaagccgccgaagccgttaccgtagtcgctcccaccgtaggacgaaacggcggcgacgcctccgtaggcattgtagccgacgcctcggcgggggtta

SEQ ID NO: 15822 - DNA, 363 bp, Homo Sapiens
cgaagacgaggagctgacattgaaatatggcgccaagcatgtgatcatgctctttgtccctgtgactctctgcatggtggtggtcgtggctaccattaagtcagtcagcttttatacccggaaggatgggcagctaatctataccccattcacagaagatgcccagggcccagaagccatcagaattatcagtggagaagcaccttttgactcttcccttccaatgtaatctctgccaacaccatgaggcttaaggtgctctaagtcatgagtgttttggtctcaaatgctgcagttttaataatctgtgactcctgagagcccatggttttttgaccttgtggttctaaaattccttgtctg

SEQ ID NO: 15823 - DNA, 859 bp, Homo Sapiens
ggatggtgatctagaggatcccagctcaggcaggacgaactggcaatcacagacggtaatgagtgtcagtgcttgagaagaagaatggccaaaggcaatctacatatttgacttgactcaaagagaggggaaaacaagtctcatttaaaaaggatgagtctgcagcaaaaaatcaaagggaagctggaacccctgcccacctctccattccccattctgctgctggtgcctgctcttcctcacagtacctcctgaaaagttcagaattcagttaatacagaattatggggttgattttcaacgtgtagtttaagatgaagagttccgttgggtttaaaccacttcacctaacctctgggtaacggtagtcctgagagttcgcagtgtcagtgaaatcgtcctgtgaccacgcgtcaagctgctgatggggcacagcaacttccgggcctatcatatctccttgacctcgtccctcaaatctggtagtttctgcaccgagggacacagtccactgcgatgaagtatgttcaaaatcgttttctataggcacctccttccaaagtccaatagtgcaaggtggtcaggaagacttggaaggaagctgcaacaagtccagccggtgaatcttgactattgttagcatgtggacaccagggaaaatcacccattgtcctccccagcattaggttatagtacaacagaagacacatccatgggattctaacccgcaaatatgctagatatacacattgatggaatgctaataggtccataaaaggctgtacaagataatctgtggcaaagtagaaaacaaagcccaaaggtgatggaccttggacagagctggcaatgctttctt

SEQ ID NO: 15824 - DNA, 1412 bp, Homo Sapiens
acgtaactcttcatctaactacacgttgaaaataaacccaataattctgtattaactgaattctgaacttttcaggaggtactgtgaggaagagcaggcaccagcagcagaatggggaatggagaggtgggcaggggttccagcttccctttgattttttgctgcagactcatcctttttaaatgagacttgttttcccctctctttgagtcaagtcaaatatgtagatagcctttggcaattcttcttctcaagcactgacactcattaccgtctgtgattgccatttctttcccaaggccagtctgaacctgagggtgctttatccctaaaagttttaacctcaggttccaaattcagtaaattttggaaacagtacagctatttctcatcaattctctatcatgttgaagtcaaatttggattttccaccaaattctgaatttgtagacatacttgtacgctcacttgccccagatgcctcctctgtcctcattcttctctcccacacaagcagtctttttctacagccagtaaggcagctctgtcgtggtagcagatggtcccattattctagggtcttactctttgtatgatgaaaagaatgtgttatgaatcggtgctgtcagccctgctgtcagaccttcttccacagcaaatgagatgtatgcccaaagacggtagaattaaagaagagtaaaatggctgttgaagcactttctgtcctggtattttgtttttgcttttgctacacagtagctcagaatttgaacaaatagccaaaagctggtggttgatgaattatgaactagttgtatcaacacaaagcaagagttggggaaagccatatttaacttggtgagctgtgggagaacctggtggcagaaggagaaccaactgccaaggggaaagagaaggggcctccagcagcgaaggggatacagtgagctaatgatgtcaaggaggagtttcaggttattctcgtcagctccacaaatgggtgctttgtggtctctgcccgcgttacctttcctctcaatgtacctttgtgtgaactgggcagtggaggtgcctgctgcagttaccatggagttcaggctctgggcagctcagtcaggcaaacacacacaaacagccatcagcctgtgtgggctcagggcacctctggacaaaggcttgtcggggcataaccttcttttaccacagaagagcccttaagctattgctcgatccagaaccgtaagcgtttatgaagaaaactttagttttcctcctgtgggctgaggaggggggcagtttttcttcttttgccctgctgtttctcctcccaaatctatgacatgatatgacctggtgggggctgacatagggggtacacaaatttgggcttggcccagcatatttatattaga

SEQ ID NO: 15825 - DNA, 299 bp, Homo Sapiens
atacagcaagtgaacctgctgcagacagaagcagaggaaagccaagaacagcctttattggtgaagaaaagaatgaatgattctttgtaggcgccatcagccacttttagaagccatcagccagtgtgttgggaaaagaggtttgccaagtgttggcctatgggaaggtggtcaatgaatgttttgatgaaatgaatgtttttgtataatggccttaaacttttctggaagtatttcaaataaattacattattaagtcgggcccaaaaagaaaaagaacatggaacataactgtttcc

SEQ ID NO: 15826 - DNA, 1275 bp, Homo Sapiens
  misc_feature (32)..(32): n is a, c, g, or t
cctgttgaaatgctcagtttaccctgagttcngcagaaaacgctctttctcccaacacggagtcaggaagacccctacctctcaatctatgacccccctgtaccagacttcaccattatgaagacggaggtccctggctctgtcactgaatacaaggtcttggcactggactctgccagcatcctcctgatggtacaggggacagtaatagccagcacacccacaacccagacaccaatccctctgcaacgtggtggcgtgctcttcattggggccaatgagagtgtctcactgaagcttactgagccgaaggacctgctgatattccgtgcctgctgtctgctgtaaaggctgcagcctccccagctctcctctgccagccaccctaaattccagccaacctcacctcctcgggcccagctcaagcccccttccttgctctggaccccttaggtataccctggaagagctggggtgggggaggagggagcgtgaaggtagtgactcctgaacacacccaggtggaaccatctttggggaggagaggcccgtgtgaggggtctgatactccctttgtcttccctctctactcctcgctacacctgagccaggctcttgccaactctgttccagcctatggctttaggctagctgttaaatatgtgacccagcattagctcagcatctgtcagagcaagagaccaggtaatttctaagaacagggttctagcgatgggactgcccatttcctcagctgcagaggaggaaagggaaagggtaggcctgtagactaacgctgtttacacccttgttctgtcaaagcaattaaagatcacttgtgttgggcgataacatacacaaagaatcattcagtcttttcgtcaccagtaaaggctgttcttggctttcctctgcttctgtcggcagcaggttcacttgctgtagctataacgacttgagaaagcagttttaaataaacttgtaatagaaaaaattcatcatgttgaagacctataaatacagaaatatgttttacagggtaaaattgatcactatatccttgttttcaaaaaataataaagtatataccttgtttttatattgatatatcgtgtcacacagcttgaatgcacatgatatatgtacataataaaatgacatcatgcatttactgctttcttttctgtaaacttgaaagacagattaaaaaaaactttttgcaataatttagtataatgaccactagtgctgtgttggcaatacatgacaggacgg

SEQ ID NO: 15827 - DNA, 454 bp, Homo Sapiens
  misc_feature (154)..(154): n is a, c, g, or t
aacccaaagccaataaactataatgacttgttacaggtgttctctctggcctcaaatcctactcaggaattcttggcaattgcttcagaaaaaatgaaagaagcagtcagattggttcatcttccttcctgtacagtattttcaaacttccagntcattaaaaataagaatatttctcatgttcataccatggatttttctccgagaagtggatactttgccttggggaatgaaaagggcaaggccctgatgtataggttgcaccattactcagacttctaaagagactatttgaagtccagttgagtcacaagagaagcctgtcttgatatatcatctcagaaactttcctgaatatgtgataatatatggaaaatgatttatagatccagctgtgcttaagagccagtaatgtcttaataaacatgtggcagcttttgtttgcaccaacacc

SEQ ID NO: 15828 - DNA, 775 bp, Homo Sapiens
gtgtctagaggatacccaacctgaagttgccaaatcacagcaagtctggctcggttcttctgaggtctgatctctaatgttgcattcaataattctcatcaaaattgtaattactgaacatgtttaatccacaaaagacttaataacacagagagatgggtcttcagatatagctatagcttgtatgagcttgaatcctcttattatatatatgtttcttgagagattagcagcttgctctgtttcacagagctagataatggggctggccattagttctgctgcccaatatttaaaaccatagaacatccttcccttctcatggtgtcctttcaggcctgagatgtggtggttctgagattgagctttgcaattggcctcttcatcacagttgactgtttggcctcctcagagattaatgaatgttgagggactttgagaatgcagatagatttaattaggacaaaggatttttaaaggtacaggcattttgggcaaagctttagcaaggaggggaaagcagtttagctctcctgtctcaaaagattacattgccagtacgtgtctgttgatgaccagcagctataaatcaggtatgtaatttcttttgttctttcctcaggtccagttgagtcacaagagaagcctgtcttgatatatcatctcagaaactttcctgaatatgtgataatatatggaaaatgatttatagatccagctgtgcttaagagccagtaatgtcttaataaacatgtggcagcttttgtttgaaacc

SEQ ID NO: 15829 - DNA, 1044 bp, Homo Sapiens
agtattgtggccaagtgggaccagacgggatcaaagtcaagtaacctcctggatctgaaaaaccctttctttaaaaacacgggcacaaggccctcacccccacccggctcccagtaaacatctccctcggaaaacatgtggaacacgggcagcacctacaacctcagcagcgggatggccgtggcagggatgccgaccgcctatgacttgagcagtgttattgccagtggctccagcgtgggccacaacaacctgattcctttagggtcctccggcgcccagggcagtggtggtggcagcacgagtgcccactatgcagtcaacagccagttcaccatgggcggccccgccatctccatggcgtcgcccatgtccatcccgaccaacaccatgcactacgggagctaggggcccgccccgcggactgacagcaccaggaaaccaaatgatgtccctgcccgccgcccccgccgggcggctttcccccttgtactggagaagctcgaacacccggtcacagctctctttgctatgggaactgggacacttttttacacgatgttgccgccgtccccaccctaacccccacctcccggccctgagcgtgtgtcgctgccatattttacacaaaatcatgttgtgggagccctcgtcccccctcctgcccgctctaccctgacctgggcttgtcatctgctggaacaggcgccatggtggcctgccagccctgcctgccaggtcccttagcacctgtcccccttgcctgtctccagtgggaaggtagcctggccaggctggggcctccccttcgacgaccaggcctcggtcacaacggacgtgacatgctgctttttttaatttcatcttttcatgacacagaaccagtgttcatccgcagacctctgtgaagccaggccggcgtggccgagccagcagaccctctcactagactcagacggcgccgcgtagaggggtggccccgccgaggcttcagaggccccactcccatacaccgggtacactcacacttgactgtacaaccca

SEQ ID NO: 15830 - DNA, 661 bp, Homo Sapiens
  misc_feature (129)..(149): n is a, c, g, or t
  misc_feature (396)..(411): n is a, c, g, or t
ggtccggaaatccgggatggtcccttagcacctgtccctctgcctgtctccagtgggaaggtagcctggccaggcggggcctccccttcgacgaccaggcctcggtcacaacggacgtgacatgctgcnnnnnnnnnnnnnnnnnnnnnatgaaaagaaccagtgtcaatccgcagaccctctgtgaagccaggccggccgggccgagccagcagcccctctccctagactcagaggcgccgcggggaggggtggccccgccgaggcttcaggggccccctccccaccaaagggttcacctcacacttgaatgtacaacccaccccactgtcgggaaggcctccgtccatggcccctgcctcttgctgctgtcctgtccccgagcccctgcaggtnnnnnnnnnnnnnnnnactcaagagttagagcaggtggctgcaggccttgggcccggagggaaggccactgccggccacttggggcagacacagacacctcaaggatctgtcacggaaggcgtcctttttccttgtagctaacgttaggcctgagtagctcccctccatccttgtagacgctccagtccctactactgtgacggcatttccatccctcccctgcccgggaagggaccttgcagggacctctccctccaaaaaaaga

SEQ ID NO: 15831 - DNA, 584 bp, Homo Sapiens
tcagtggcgctgccctcgatcactctgcccctctgggtgcctgtcacctcattagtgcagttactcctgggaacaagaacaggaaatctaaccaataagcaatggtaacaagtgactcagtgcctcagtccgccctcagtggcccgagtccgaggtgggcatcatggcaccagtttacatctccggaaagggaggctcagagaggtcaagtcacttgcctaaggtcacccagggaatgcttagctggctaggatgagaaccagcctgctccaacgccccctcgtggaacagttgcgagcctaggaattaaatgttccctcccccaggctatgccaatgaggtgggcgaggctttccgccctcttgtgccagcggcggtggtgtggctgagctatggcgtggccagctcctacgtgctggcggatgccattgacaaaggcaagaaggctggagaggtgagtgttagcctattttccaacccccaaacctagctctcctcttgtgtggctcagtccacagcctggcatgtgataaagtccctgtgggacactccagtccctacaacttgcctagtgcagtccataa

SEQ ID NO: 15832 - DNA, 922 bp, Homo Sapiens
  misc_feature (172)..(172): n is a, c, g, or t
ggcgggtcccggccgggcagacccaagtgccggcggcggagactgcagtggagccagtaccggctgtagtggccggggccgtggcgggagagtcatgtcagagccgcagccgcggggcgcagagcggatctctaccgggacacgtgggtgcgatacctgggctatgccaatnaggtgggcgaggctttccgctctcttgtgccagcggcggtggtgtggctgagctatggcgtggccagctcctacgtgctggcggatgccattgacaaaggcaagaaggctggagaggtgcccagccctgaagcaggccgcagcgccagggtgactgtggctgtggtggacacctttgtatggcaggctctagcctctgtggccattccgggcttcaccatcaaccgcgtgtgtgctgcctctctctatgtcctgggcactgccacccgctggcccctggctgtccgcaagtggaccaccaccgcgcttgggctgttgaccatccccatcattatccaccccattgacaggtcggtggatttcctcctggactccagcctgcgcaagctctacccaacagtggggaagcccagctcctcctgatcatactctggtacctggcctgtgcatcggcctcctgcttcatgtcaacctcctactcctgccagggaatgtggacacctggctcccctggggtccaaagaccctggcacctgggtggggttggagctggacaaaaagcttaaagacaaagggcttcaagaagcagtggctgcagggagtcacagaagggcaggacctgaacgctgtctgcttccctggaatccaagatgctgagtggaagtggaccctgggtgggcccggccctgtctttttcaggacagattctctggccaggcccttccctgacccaataaatcctgaaaaggtt

SEQ ID NO: 15833 - DNA, 521 bp, Homo Sapiens
ggcggtgatggcggggccggtgaaggaccgcgaggccttccagaggctcaacttcctgtaccaggccgcccattgtgtccttgcccaggaccccgagaaccaggcgctggcgaggttttactgctacactgagaggaccattgcgaagcggctcgtcttgcggcgggatccctcggtgaagaggactctctgtcgaggctgctcttccctcctcgtcccgggcctcacctgcacccagcgccagagacgctgcaggggacagcgctggaccgtacagacctgcctaacatgccagcgcagccaacgcttcctcaatgatcccgggcatttactctggggagacaggcctgaggcccagctcgggagccaagcagattccaaaccactacaacccttgccaaacacagcccactccatttcagaccgccttcctgaggagaaaatgcagacgaagggttccagtaaccagtgatggattcaccccatctcccgaataaagtttacttgttttacattcaaaa

SEQ ID NO: 15834 - DNA, 903 bp, Homo Sapiens
  misc_feature (601)..(610): n is a, c, g, or t
  misc_feature (624)..(624): n is a, c, g, or t
gggggagcgcggcggtgatggcggggccggtgaaggaccgcgaggccttccagaggctcaacttcctgtaccaggtgagtctgcgacaagggccccacggggacggtgctcggcgtcccagagtgactgctcccctcccgcaggccgcccattgtgtccttgcccaggaccccgagaaccaggcgctggcgaggttttactgctacactgagaggaccattgcgaagcggctcgtcttgcggcgggatccctcggtgaagaggactctctgtcgaggctgctcttccctcctcgtcccgggcctcacctgcacccaccgccagagacgctgcaggggacagcgctggaccgtacagacctgcctaacatgccagcgcagccaacgcttcctcaatgatcccgggcatttactctggggagacaggcctgaggcccagctcgggagccaagcagattccaaaccactacaacccttgccaaacacagcccactccatttcagaccgccttcctgaggagaaaatgcagactcagggttccagcaaccagtgatggattcacccccatctcccaaataaagtttacttgttttacattggccnnnnnnnnnngcgggccgagtctntccctcgtcggcccgcctcgggcccttcaagaacctttccaagaccatcccggttcggcgccgcgggcccccgctagccgacgccgaaacccgggcccccccgttgctttctccccggaacgacccctggtgcgaccgctctcgtcgggttccggacatttgtcacaccccaagatacgagggcgcgtggccgccccccttcgccggtcctctccgcgaatacgatcctccctcgtgcgccgccgacgcccccttagcgccccctcttgctcgctctgc

SEQ ID NO: 15835 - DNA, 947 bp, Homo Sapiens
ctccggtcgcagtccacgacccctccggtggtgcgcatcccagtggctctcacggcagttggacacggcagacagcggcgaacctcccgaggccggtgctggttcgacccggaccgctgctggtttcggccgcggccggagttgaaccagccggcgcgcctcacactgggccgttgggagcgcgcgccgctagcctctcaaggctggaagagtcgacgcgcgcgtcgggaccacttctccatcgagcgcgcgcaacaggaggcgccagcggtgagaaagctctcgtctaagggcagctttgctgacctgggcctggagccccgtgtgctgcacgcactacaggagcccgcgcctgaagtcgttcagcccacaaccgtgcagtctagcaccatcccctcactacttcgcggccgccatgtcgtttgcgccgcagaaaccggcagtggcaagactctcagctacctcctgccgctgcttcaacggctcttgggccagccaagcctggactcccttcctatccccgcgccccgaggcctggtccttgttccttcccgagaattggcccaacaggtgcgggctgtggcccaacccttgggccgctccttgggcctgctggtgcgggacctggagggaggccacggcatgcgtaggatcaggctgcagctgtccagacagccttcagcagatgtgcttgtggccactccaggggctctgtggaaggccctgaaaagtcgactgatcagtctggagcaactctccttcttggtgttggatgaggcagacacactgctggatgaaagcttcctggaactggtggactacatcttagagaagagccacatagcagaaggcccagctgacttggagaagaagctgctgagcatggctttctgtagtctttagcaagacacaagtggattttgactttgtatcatgtcatgatttct

SEQ ID NO: 15836 - DNA, 519 bp, Homo Sapiens
ggcctggacagcacttgtctggagctggttgtcaattatgatttccccccaacgctgcaagattacatccacagagcagggagagtgggccgtgtggggagcgacgtgccaggcaccgtcatcagttttgtgacccatccctgggatgtgagactggttcagaagattgagctagcggctcgccgaaggagaagtcttccaggactagcatcctcggtgaaagagcctttgccccaagcaacctgattttgacaaatctgattaaaatgtgatgctagaacagggatctttcccagtatcttgagtgggtgaccacacttgtcagtgggaggctctgggctgccctgtcggctccttgagggcgggatgaactgctttgtgacttggaaaggtacgctgctggccaccattggacaagaagctgctgagcatggctttctgtagtctttagcaagacacaagtggattttgactttgtatcatgtcatgatttctaacaataaatgatgtttttatgtg

SEQ ID NO: 15837 - DNA, 831 bp, Homo Sapiens
  misc_feature (596)..(692): n is a, c, g, or t
cccaggcctttgactccggccctggaagcccctttgttcttctgttgaaaggctttggcttcccgctgtagagctgctcccgccaccacctgctggggtcctgcctcagcccagtgcccagtatggggagaggaggacatttgggctcacctgtcaaggtggccctgggaccagagctggtcccagcatggggtgcaccgggtacacttaacgtgtctctataagccaagttgcttcaggaccttcaccactggcctctagaatggtccagaggggctggctgggtccctttgtcagactcctgccggcagctgccctgggggacatgtgtgcccatctggcatcctccagacagagcagtgtagacagcactcagccccagccccaggtgtggacctcatgctggtgatggctcccctgggtggcctgccagcacagccagtgccatcagggagctgaaggggctgtcccccacctaactccagctcccccttcacgttgtcaccaaggccctgtgccgcccgcctcgcccccctgctctgtggattcctttgggaagggctccctgggcaggacaataaagagttttgactccnnnnnnnnnnnnnnnnnnnnnnnnnnnnnnnnnnnnnnnnnnnnnnnnnnnnnnnnnnnnnnnnnnnnnnnnnnnnnnnnnnnnnnnnnnnnnnnnntttgtcggccccctcgcccctcgaaaaacctttcaaaacctttcgttgggcgcccggccccattaggaaaggaaaattgggccatacctgttcccaaggaaaacccgtggccagaaaatagggttgggaatcccccccc

SEQ ID NO: 15838 - DNA, 409 bp, Homo Sapiens
gctgccctgggggacatgtgtgcccatctggcatcctccagcccgtgcagtccgctcttcactgttccacggcctcccagtgcctcccagcattggacccatctccccctgcagtttgaggccagagacgtgagtggacctgacaagtgccagagtaaccgtgtagacagagcagtgtagacagcactcagccccagccccaggtgtggacctcatgctggtgatggctcccctgggtggcctgccagcacagccagtgccatcagggagctgaaggggctgtcccccacctaactccagctcccccttcacgttgtcaccaaggccctgtgccgcccgcctcgcccccctgctctgtggattcctttgggaagggctccctgggcaggacaataaagagttttgactc

SEQ ID NO: 15839 - DNA, 761 bp, Homo Sapiens
gggaaggaagagggaacgggtcctggcggtgctttgcaaagggcccgtgtttctgttgcgggaagctcccgggggtcgcacgtgcgtccgagcccaagcccctcccctccactccccttcctgcgtgccccggagccgccaagcggctacgttcttctcggcccgccgagatggcgctcgaccccgcaggtaccggggcgggaagcggggtttgccgaggggcctcgccccgggtctcacgccgcgggccatgcgggctggatgccgacctgggaaagaccagcatctcagacatgtcgaaaaagatgttttgatccctaaaataatgagagaaaaggccaaagagaggtgttctgaacaagttcaagattttaccaaatgttgcaagaactctggagttcttatggtagtaaaatgccggaaagaaaattctgcattgaaagaatgtctaactgcttactataatgatccagccttttatgaagaatgcaaaatggaatacctgaaggaaagggaagaattcagaaaaactggaattcctacaaagaaaaggctacagaagcttccaacaagcatgtaggcagatactcaaatgacattcaggaactctaatattcatggaagtcattttatagtccttaaataatggactcaagcatatatgtttgctttaccttaattatggaaatattaactttatctgaaataaatattttatttccaaaaaaaccggtgggagtcgcagcgcccgcgcgcctgaa

SEQ ID NO: 15840 - DNA, 603 bp, Homo Sapiens
  misc_feature (540)..(540): n is a, c, g, or t
  misc_feature (543)..(544): n is a, c, g, or t
  misc_feature (549)..(549): n is a, c, g, or t
  misc_feature (551)..(552): n is a, c, g, or t
  misc_feature (556)..(556): n is a, c, g, or t
  misc_feature (558)..(558): n is a, c, g, or t
  misc_feature (589)..(589): n is a, c, g, or t
ggggaagagggaacgggtcctggcggtgctttgcaaagggcccgtgtttctgttgcgggaagctcccgggggtcgcacgtgcgtccgagcccaagcccctcccctccactccccttcctgcgtgccccggagccgccaagcggctacgttcttctcggcccgccgagatggcgctcgaccccgcagattttaccaaatgttgcaagaactctggagttcttatggtagtaaaatgccggaaagaaaattctgcattgaaagaatgtctaactgcttactataatgatccagccttttatgaagaatgcaaaatggaatacctgaaggaaagggaagaattcagaaaaactggaattcctacaaagaaaaggctacagaagcttccaacaagcatgtaggcagatactcaaatgacattcaggaactctaatattcatggaagtcattttatagtccttaaataatggactcaagcatatatgtttgctttaccttaattatggaaatatcaactttatctgaaataaatattttatttcnggnnctagngnnccgntngaatattccactttgaaacacttaaagattnttttaaaattgtcg

SEQ ID NO: 15841 - DNA, 921 bp, Homo Sapiens
ggggctgcctgcggaagccggcggctgagaggcagcgaactcatctttgccagtacaggagctcgtgccgtggcccacagcccacagcccacagccatgggctgggacctgacggtgaagatgctggcgggcaacgaattccaggtgtccctgagcagctccatgtcggtgtcagagctgaaggcgcagatcacccagaagatcggcgtgcacgccttccagcagcgtctggctgtccacccgagcggtgtggcgctgcaggacagggtcccccttgccagccagggcctgggccccggcagcacggtcctgctggtggtggacaaatgcgacgaacctctgagcatcctggtgaggaataacaagggccgcagcagcacctacgaggtgcgactgacgcagaccgtggcccacctgaagcagcaagtgagcgggctggagggtgtgcaggacgacctgttctggctgaccttcgaggggaagccccctggaggaccagcctcccgctggggggagtacgggcctcaagtccccctggagcaccgtggtccatgaaatctgcgccctgcgggggaggcgggcaccaaagccctgggcggggcggaagcctaaggggccctcccccaagcattccgagcagggatccaagggtcgggaaaattaaagggctggttgttcaaggaccccccaaccaacccaataagcctccccaaacaccccttggtcgggcccgcccttccgggcccctccgagaaagcgttttcctaaaaaccaatttcctttttggtgcggcggccggggcccccgataaaggttaaagggggaaccattggggccaataaccttgttttcccctagggagaaatcccgtggggccagaggaaataagaggggctttggggattttcctcacacccaaat

SEQ ID NO: 15842 - DNA, 667 bp, Homo Sapiens
tagggccggtgctgcctgcggaagccggcggctgagaggcagcgaactcatctttgccagtacaggagctcgtgccgtggcccacagcccacagcccacagccatgggctgggacctgacggtgaagatgctggcgggcaacgaattccaggtgtccctgagcagctccatgtcggtgtcagagctgaaggcgcagatcacccagaagatcggcgtgcacgccttccagcagcgtctggctgtccacccgagcggtgtggcgctgcaggacagggtcccccttgccagccagggcctgggccccggcagcacggtcctgctggtggtggacaaatgcgacgaacctctgagcatcctggtgaggaataacaagggccgcagcagcacctacgaggtgcggctgacgcagaccgtggcccacctgaagcagcaagtgagcgggctggagggtgtgcaggacgacctgttctggctgaccttcgaggggaagcccctggaggaccagctcccgctgggggagtacggcctcaagcccctgagcaccgtgttcatgaatctgcgcctgcggggaggcggcacagagcctggcgggcggagctaagggcctccaccagcatccgagcaggatcaagggccggaaataaaggctgttgtaaagagaaaaaaa

SEQ ID NO: 15843 - DNA, 837 bp, Homo Sapiens
agatttccatgtattttctgccatttttcatggtctaagattggtcatacattcccaatttactctcagttccagtcaagctggttgctctgaaagtaacccagcttgttgctctaaaatacctcagtagcctgagtgttatactagagatctaaagggttaacaggatagggataagcaaactgaatgggtggtggaattggcagaatggataccagttcctacattcctgaccccactaccataaaacaggatgtttcctgatgcaaagctaatgagaccccacccttctggtctcagagcaggcaggagctcatctgtcttgttctgcctgcctaattaccctggaagggccagaacgaagtacacctgagaatactgaaagtgcctaaaaacccctgctcctacgttgttttcccatttaaagcagactcttcagccagggggcagtgggacctggtcttcagacaaaactccctgagtctaatgtgtgtctaggactagggcacagaaatagagcttaaaatttggggaggataaggagtgtatctactgcttctctctcccctttccccaatcctaccataccctgttcatatctctacactgcaggaaccacttctccagagggcaagaatggaggagggggacctgtccatcatagcaacatgcaaacactagcaatacactgaataaagaattgtttggagattatgtgcagccctgactgagcctcatttatactgggctcctagttgatccatggtctcgggcttaagatgagtaagatgatgagggtagcgtccaagcagaagcacttcagagttaatagcgtgc

SEQ ID NO: 15844 - DNA, 519 bp, Homo Sapiens
gggactgcgaaggcttcgacgtgcacatcatggacgacatgattaagcgtgccctggacttcagggagagcagggaagctgagccccacccgctgtgggagtacccatgccgcagcctctccgagccatggcagatcctgacctttgacttccagcagccggtgcccctgcagcccctgtgtgccgagggcaccgtggagctcagaaggcccgggcagagccacgcagcggtgctatggatggagtaccacctgaccccggagtgcacgctcagcactggcctcctggagcctgcagaccccgaggggggctgatgctggaacccccactgcaagcaggccgtctacttcttcagccctgccccagatcccagagcactgctgggtggcccacggactgtcagctatgcagtggagtttcaccccgacacaggcgacatcatcatggagttcaggcatgcagataccccagactgaccactcttgagcaataaagtggcctgagggctgggaaaaaaaa

SEQ ID NO: 15845 - DNA, 502 bp, Homo Sapiens
cttctgcctgggatctgggcaggcttagagtagacggctgcttgcgtggggttcagcagcagcccctcgggtctgcaggctcgaggaggccagtgctgagcgtgcactccggggtcaggtggtactccatccatagcaccgctgcgtagctctgcccgggacttctgagctccacggtgccctcggcacacaggggcttgcaggagcaccggcttgctggaagtcaaaggtcaggatctgccagggctcggagaggctgcggcatgggtactcccacagcgggtgggggctcagcttccctgctcttcccttgaagtccagggcacgcctgcgaacagaaggggggcctggcggctacagagacagggccggcagctagacagaggtacccgctccccggctttggctccccactgactgcagtccacaaggggtgtgcggttcccccataaagatgccggagtggccagaggaccaagcggggccccctttttgcacttct

SEQ ID NO: 15846 - DNA, 872 bp, Homo Sapiens
ggtagtggtggaatcctcaactaaaatttttatttccttgtgctgaataggacacatacagatcccatattaaaaacagtcatcatattaggcaaattcaatctgtcaatgtagttttagtccagaaccaaaccagtgatagttaggaattacagagttaccaaccaaactgatttgctttcctggtggttctctgtgtattaatcccatggtgcaaggatttcctgcaaagtacctttaatgtgtttaaatcagcagcaagcattaggacatgctattttggccccataagttaggtgtgtagcactacacattagacaccaagtcatcccaaccaatatttatccatatgaacagataaactgaacaaaaacatagttctgataaaacctgcattcacaacctaatgtagtttaaagtaaattttttcacaattgagggctgctatttaggactgttttgttaataataaaaacaggaattatatagaagataaaacaccattttttactgctatataatgtcttgctatataaaacataccctcaacaagtcaaaatatttaaaaccagtgtttcaaataccaaaaatcacagctatgttactgttcagtaactccactcaaataaatgttagtactgcattcttgaaggaaaaaaactgcagccaaggcaagaactctgaagtttgcactcagagtttaaaagacagacccctactctgcaaactgaagactgccactctgcttcaataactccagcctgccacattttacttcaattggtaaagcactctgctgagaatataaaaagttataaaaaggcaatcataaaagattaaatattggtaggcatgtaagcttccttttaata

SEQ ID NO: 15847 - DNA, 460 bp, Homo Sapiens
aacgatggtcctcagctcagtatgagcttaagaaatctgtggaaaataactcacctggcatcttacatctgaaataaggaatgatataaggttttttttctcacagaagatgaagcacacaggaacctaatgggccaacctgggatgaggtgactcattctgagatgactattcaagtggctaacttggggttaggaagaaaataattaggtattttctccaaatgttcactggtactctgccactttatttctctcatctgttacacaaagaaccaccaggaaagcaaatcagtttggttggtaactctgtaattcctaactatcactggtttggttctggactaaaactacattgacagattgaatttgcctaatatgatgactgtttttaatatggatctgtatgtgttctattcagcacaaggaaataaaattttagctgaggattcagcactaaa

SEQ ID NO: 15848 - DNA, 837 bp, Homo Sapiens
gggggtcgttggtaaggggctggcggccggggagctgcgtagctcccggccccgcggccatgcccaagcggagctgccccttcgcggacgtggccccgctacagctcaaggtccgcgtgagccaaagggagttgagccgcggcgtgtgcgccgagcgctactcgcaggaggtcttcgagaagaccaagcgactcctgttcctcggggcccaggcctacctggaccacgtgtgggatgaaggctgtgccgtcgttcacctgccagagtccccaaagcctggccctacaggggccccgagggctgcacgtgggcagatgctgattggaccagacggccgcctgatcaggagccttgggcaggcctccgaagctgacccatctggggtagcgtccattgcctgttcctcatgcgtgcgagccgtggatgggaaggcggtctgcggtcagtgtgagcgagccctgtgcgggcagtgtgtgcgcacctgctggggctgcggctccgtggcctgtaccctgtgtggcctcgtggactgcagtgacatgtacgagaaagtgctgtgcaccagctgtgccatgttcaagacctgaggctggctcaagccggctgccttcaccgggagccacgccggggcatggcagccctccctggaagaccgctcggggttcccactgaaactgggggggtccgaccggaaggggggcccttttaacaggttccattttgggacccccaagggccgaaatggaaataaccccccttttatatttggcccccggtggagaaatcaggaggagcatacataatttaaggtgaacagaatgcaagaggggacaaaga

SEQ ID NO: 15849 - DNA, 813 bp, Homo Sapiens
caggctggtacagcgtccggtattcccgggatatcgtcgaccacgcgtcgcacggcgtcgttggtaaggggctggcggccggggagctgcgtagctcccggccccgcggcatgcccaagcggagctgccccttcgcggacgtggccccgctacagctcaaggtccgcgtgagccagagggagttgagccgcggcgttgtgcgccgagcgctactcgcaggaggtcttcgagaagacccaagcgactcctgttcctcggggcccaggcctacctggaccacgtgtgggatgaaggctgtgccgtcgttcacctgccagagtccccaaagcctggccctacaggggccccgagggctgcacgtgggcagatgctgattggaccagacggccgcctgatcaggagccttgggcaggcctccgaagctgacccatctggggtagcgtccattgcctgttcctcatgcgtgcgagccgtggatgggaaggcggtctgcggtcagtgtgagcgagccctgtgcgggcagtgtgtgcgcacctgctggggctgcggctccgtggcctgtaccctgtgtggcctcgtggactgcagtgacatgtacgagaaagtgctgtgcaccagctgtgccatgttcgagacctgaggctggctcaagccggctgccttcaccgggagccacgccgtgcatggcagccttccctggacgagcgctcggtgttcacactgaactgtggggtcgacgggaggggtgccttttacatgttctattttgtatcctaatgacagaatgaataaacctctttatatttgcacaag

SEQ ID NO: 15850 - DNA, 939 bp, Homo Sapiens
  misc_feature (113)..(197): n is a, c, g, or t
  misc_feature (238)..(263): n is a, c, g, or t
gggctttcagcgcctgcaggttccgggaggtcagctcccagccgaggacgtcggatgtcatcgtccttgctgctttgccaccccattcccgtcaataaagtggtttgaacccnnnnnnnnnnnnnnnnnnnnnnnnnnnnnnnnnnnnnnnnnnnnnnnnnnnnnnnnnnnnnnnnnnnnnnnnnnnnnnnnnnnnnaacttgtcgggccgcctcggcctctaaaattccaacaaggnnnnnnnnnnnnnnnnnnnnnnnnnngggaaactggccaaaaaggcatgggcgggaaaaatagttaacggggaaaaaacttgaaaggagggccacctttgttaaaggccttagaaaattttcgtgaacaacccaaccttatttgttaaaaacacgggttttaaattcatgtaagggggaaaaaggtttttttgatgtggaaagcaaaaaccggaacttacaaattccttggggggcgcccccgcgccctaaaaaacttttctaaaacatttcctttggggcgcgggggccccataaggaaaggggaacatggggccataaacgggttccccagaggaaaacccggggccaagaaataaagggctgggggattccccccccatattaaaaaacacgccggggggggaaacaccaagggttttcttaaaaaatccccaaaaggggggtttctggaggggcccattagttgtgggtcctatcaccaccagggggtgtcccaaacgcgaacctccggaatatttaaaatattaagcccccgggcctgggtcgcaatttatgttggaagaaaagggtggttgagatcacctataaagggatttcctgcgccgcacgatggggaaaaccccttcaaacagaggggcgggtgatagaaaccctttaataatcccgcctcgggttattccacacccttcttgtcgcggtt

SEQ ID NO: 15851 - DNA, 740 bp, Homo Sapiens
  misc_feature (294)..(357): n is a, c, g, or t
  misc_feature (574)..(584): n is a, c, g, or t
gggtcgtctggctgggtgggccccggaggtcgtggctcgggagcagggaggcgtaggggggccggcctgctgtgatgacattccaattaaagcacgtgttagactcctgacgcgggtgatgcgaactggagtctgagcctgcccgagcggagctgggagggggctggcgggcgggcgcgcgcacacccgctgatctatcactctcgttcttgtagctcccagccgaggacgtcggatgtcatcgtccttgctgctttgccaccccattcccgtcaataaagtggtttgaacccnnnnnnnnnnnnnnnnnnnnnnnnnnnnnnnnnnnnnnnnnnnnnnnnnnnnnnnnnnnnnnnngggggggcccccaaattttccccgggggggcccactgttttccgcttcgtccgccgccagttttttttgacaaacagggggcgcccctattaggggcagcctgctgttttattaacaccgacgagccgcggcgcgcgcggtgttatacacacgtctcagctggggaacaaccactcgctcgcgcgcaccctctgcgcgccgccgccccctctcttcnnnnnnnnnnncccaccaccaaatttgtgtggcgacacacacacctctcctcccacaaagaaattattaaaaccccccacaggggcaaatatctactacatctttcaaagggtcttatataactggtgttaaccccacccaccgcgaccataattcactcccccgtg

SEQ ID NO: 15852 - DNA, 857 bp, Homo Sapiens
ctcccagtatgcaccgggacgacaaagatggcggcagggaccagcagttactgggaagatctcaggaaacaggctcgacagctggaaaatgaacttgacctgaaactagtttccttcagcaaactatgtacaagttacagtcatagcagtacccgagatggaagacgcgacaggtatagttctgatacaacaccccttttaaatggatcaagccaagacagaatgtttgagacaatggcgattgagattgaacaacttttggcaaggcttacaggggtaaatgataaaatggcagaatataccaacagtgcaggtgtcccctccttgaatgcagccctgatgcatacattacagcggcatagagacatattgtcaggattatacaacctgaattccataaaaccaaagcaaactttatggcaatacgggaaagggagaatcttatgggatcagtacgaaaagatattgagtcatataaaagcgggtctggagtaaacaacagaagaactgagctatttttgaaagaacatgaccaccttcgaaactcagatcgtctgatagaagagacaataagcattgctatggcaacaaaagaaaatatgacttcacagagaggaatgttgaagtcaattcacagcaaaatgaacactttggccaatcgttttcctgctgtaaacagcctgatccagaggatcaacctgaggaagcggcgggactcgctcatcctagggggtggtattgggatctgtaccatcctgttgctgctgtatgcgttccattgatgggacatctccagggactcttgacagccacccgctttcccaccctgggctgggaataagaaacttcggaagggg

SEQ ID NO: 15853 - DNA, 434 bp, Homo Sapiens
taattaaaaacagaaaaatgtgttagaaaacacagcacagagaaactgtggcttcagctcaacctgaccatgtcacagagtccatcactgtcagtcttgcattcatcctgctggtcaggctaattatcaagacagtcaacttctccctccgatgtttccttattccagaccagggtgtgaaagcggtggctgtcaagagtccctgaagatgtcccatcaatggaacgcatacagcagcaacaggatggtacagatcccaataacaccccctaggatgagcgagtcccgccgcttcctcaggttgatcctctggatcaggctgtttacagcaggaaaacgattggccaaagtgttcattttgctgtgaattgacttcaacattcctctctgtgaagtcatattttcttttgttgccatagcaatgctgcaagggg

SEQ ID NO: 15854 - DNA, 671 bp, Homo Sapiens
  misc_feature (567)..(567): n is a, c, g, or t
tttctctttctctctttttaattgctatatattagcttagaacaaggtacaaaatttggagattcacaggaacagcacagaagtttaacaatattaataataataaagttctaacacatgacaggaaagtttatctggatcttgaaggcaacagctgatctgcatgcacatttctggagtccagtgattcaggaagaggtcttctctccattgctccatcttgctctttcacaaaggacccctagtccatagcaccataagcccaggacagtgattgcagcatggagaggaatgaagggcccgctagagatggctcctcactctacagggctgatgcttatggggctactatgtcgattcaaattcatttaccagcttagaatggggatcttaaaaatatgattcacgggggagaagctctgctagcatacgtttcccaggaagctttcattggatctgcagaacacctttagacgggacgccgggcatactttcggcgatgctcgaaatgaaaagaaacttgctgctaaaccagagccattagagaaggcaccaatcctggagccngcctattcttgaccagagtgggtgggacagaagcgaggccagcaaccctacaggattgaaggggtcatgttcccattgtgagtggagaagtaaaagggagctct

SEQ ID NO: 15855 - DNA, 1742 bp, Homo Sapiens
  misc_feature (1243)..(1251): n is a, c, g, or t
  misc_feature (1335)..(1382): n is a, c, g, or t
gggctcactcgcgcgttaggaggctcgggtcgttgtggtgcgctgtcttcccgcttgcgtcagggacctgcccgactcagtggccgccatggcatcagatgaaggcaaactttttgttggagggctgagttttgacaccaatgagcagtcgctggagcaggtcttctcaaagtacggacagatctctgaagtggtggttgtgaaagacagggagacccagagatctcggggatttgggtttgtcacctttgagaacattgacgacgctaaggatgccatgatggccatgaatgggaagtctgtagatggacggcagatccgagtagaccaggcaggcaagtcgtcagacaaccgatcccgtgggtaccgtggtggctctgccgggggccggggcttcttccgtgggggccgaggacggggccgtgggttctctagaggaggaggggaccgaggctatggggggaaccggttcgagtccaggagtgggggctacggaggctccagagactactatagcagccggagtcagagtggtggctacagtgaccggagctcgggcgggtcctacagagacagttacgacagttacgctacacacaacgagtaaaaacccttcctgctcaagatcgtccttccaatggctgtgtgtttaaagattgtgggagcttcgctgaacgttaatgtgtagtaatgcacctcctccaagtcccacttcgtaggcaggacacttcagaccttgtcaaacccagcctgaccgcagaagacgccgcatctgtcctcgtcactagacatttctatcgcaggacgcaaaagccaaatgaaactgaccaaaaaaggcaaagggagagcgagggcccgctgggaagccagctaggtgcatgtggggccgcaggccagcctccctcggctgtggggggtggttgctccccggccgcaggccgcgcctggtctggcctctggggtgaagctgcctcttgttgcttcggtgcctttacactgtgcctgcttcttgtcctcagctacacacaacgagtaaaaacccttcctgctcaagatcgtccttccaatggctgtgtgtttaaagattgtgggagcttcgctgaacgttaatgtgtagtaaatgcacctccttgtattcccactttcgtagtcatttcggttctgatcttgtcaaacccagcctgaccgcttctgacgccgggatggcctcgttactagacttttctttttaaggaagtgctgnnnnnnnnngagggttttcaaaacattttgaaaagcatttacttttttgaccacgagccatgagttttcaaaaaaatcgggggttgtgtgggnnnnnnnnnnnnnnnnnnnnnnnnnnnnnnnnnnnnnnnnnnnnnnnngtggggttggccccatgaaagtgggtgccccaacttcacttctctgaagatcggaaacggactgtgaatccgctctttgtcggaaagctgagcaagctgtggcttttttccaactccgtgtgacgtttctgagtgtagtgtggtaggaccccggcgggtgtggcagcaactgccctggagccccagcccctgcgtccatctgtgctgtgcgccccacagtagacgtgcagacgtccctgagaggttcttgaagatgtttatttatattgtccttttttactggaagacgtacgcatactccatcgatgttgtatttgcagtggctgaggaattcttgtacgcagttttctttggctttac

SEQ ID NO: 15856 - DNA, 668 bp, Homo Sapiens
  misc_feature (195)..(195): n is a, c, g, or t
aatcccttaagcaggattgaagaccagtgaacgcccccgccttttggattttttgctcaattgaccgtcttttccagacctctttaagtcacactcttaacttagctttctctgatgtctgttgccgccattagtttttttctagagcccacactggcccacatagctccatcccatacgggtagctggctccanctgcgccaaggtgcagacccgccctgggaatgctggcctgtgacggagcctgaggtcacagccccctgactaagcctgagaccttcctaggggctgtggctgtttccggggaggccgggaagggcaagctgtgagccctgtggaggacgttgggagtaacgctgctttgctttggcaggttgaaggggcccggccaggactcggggaagggtggcctgagagcagcgatgacctctggggtcactgtcccaggagggacttcacctggaacaagagctggaggcagccgcttgcccaggaggcttgtcccctgaggcgcttcgccagtgaggtgcgggctcagggcctcgagtctctcctggagcacgggctgcggtgcgccggcagcttacggggcggccagtccttgcccacaacgatgtggagccctgtgaaagtcggattcgaataaagggccacgtgtgcacccagaa

SEQ ID NO: 15857 - DNA, 457 bp, Homo Sapiens
agcgatgacctctggggtcactgtcccaggagggacttcacctggaacaagagctggaggcagccgcttgcccaggaggcttgtcccctgtaagtgctttcgggaagagtggcatgtggcgctgagccctgtcccgggcggcacctgggcgtttcagtgagtcctgctctcccgcacctatggccccacggcgggcgcctttcggtgtgtgttgggtgcagggcagcgcctcccgggagcgccgggtccctcgcctggagcccgcgcctgttctccctcccttcctcctccttccaggaggcgcttcgccagtgaggtgcgggctcagggcctcgagtctctcctggagcacgggctgcggtgcgccggcagcttacggggcggccagtccttgcccacaacgatgtggagccctgtgaaagtcggattcgaataaagggccacgtgtgcacccaga

SEQ ID NO: 15858 - DNA, 540 bp, Homo Sapiens
  misc_feature (384)..(384): n is a, c, g, or t
ctgtgcccctatgagtgaccctatgaggtaagagccagagccgggctcacacctgagctcctggcatgtggcggccctttagaagacagaaagtgtgtgcttagcccctgaagcagccacgctgtgcccagcggagggcaggcgcagacagcactccttcccagaccaggatgccacttaagatttcaacaaactaaacagacaagtgaataaaagatcattaaataccactttttacaaatgtcacagacgctttcctagaatagtttgtttttggtttatttaatctgtgtaggggaaagaataccaggaattagactctgggcactgcaggacacatctactgttttgtgctaagccaggcaccgtgttatactcgattcncggtatggacaggcagctgcagccacctacgcagttttaccccagttccacggcacatgaggagaggaccaacattattctattttggcagcacgtgctttcaacccatctccaaaacagtgtcaccaaccagatgtgccagccccatactgcggg

SEQ ID NO: 15859 - DNA, 575 bp, Homo Sapiens
gggactctccaaaaagcagagacagcaggaagaggggagtggaggcagcccattcacctggggaaatgactgggttgtcgatggacggtggcggcagccccaagggggacgtggacccgttctactatgactatgagaccgttcgcaatgggggcctgatcttcgctggactggccttcatcgtggggctcctcatcctcctcagcagaagattccgctgtgggggcaataagaagcgcaggcaaatcaatgaagatgagccgtaacagcagcctcggcggtgccacccactgcactggggccagctgggaagccaagcatggccctgcctctggcgcctccccttcttccctgggctttagacctttgtccccgtcactgccagcgcttgggctgaaggaagctccagactcaatgtgacccccaggtggcatcgccaactcctgcctcgtgccacctcatgcttataataaagccggcgtcagagaccgctgcttccctcacctgcctgcctgtctccctcctctgtcaccaccagccttctccaagctcaagtacaaatacagccgggtctc

SEQ ID NO: 15860 - DNA, 547 bp, Homo Sapiens
aaatgcccaggctggtacggtcctgagggtcgtatggatcccaggcaagcagcacctccctgctctcctgcactcctggacacaaccagcagctcctgccatggacaggtggtacctgggcggcagccccaagggggacgtggacccgttctactatgactatgagaccgttcgcaatgggggcctgatcttcgctggactggccttcatcgtggggctcctcatcctcctcagcagaagattccgctgtgggggcaataagaagcgcaggcaaatcaatgaagatgagccgtaacagcagcctcggcggtgccacccactgcactggggccagctgggaagccaagcatggccctgcctctggcgcctccccttcttccctgggctttagacctttgtccccgtcactgccagcgcttgggctgaaggaagctccagactcaatgtgacccccaggtggcatcgccaactcctgcctcgtgccacctcatgcttataataaagccggcgtcagagaaagacaaagaaaaataaatgaaacataggg

SEQ ID NO: 15861 - DNA, 1143 bp, Homo Sapiens
  misc_feature (88)..(110): n is a, c, g, or t
  misc_feature (978)..(987): n is a, c, g, or t
ggggagagcaaacccagtgactcacctccgccgtgctaactcctcgctagctctccctctcacacacgctcacacccggctcgagatnnnnnnnnnnnnnnnnnnnnnnngggactcggactcctgggacgccgacgctttctccgtggaagacccagtgcggaaggtggggggcggcggcactgccggcggggaccgctgggaaggcgaggacgaggacgaggacgtcaaggataactgggatgacgatgatgatgaaaaaaaagaggaagcgagaagtaaaaccagaggtaaaaatttcagacaagcaaaaaatagcccacaagataaaagagaaagaacggccccagaagaaaaggggcaaaatcccccagcgggccgcagaaaacaccctgggcgggcccgccctcgcccccttcgaaacaccttttccaaaacccatccccgttttggcctctgcggggcgccccagggaggcgaaaagggcaaccatggggcccaataggccttggttctcccccaagggaagaatttccgtgggtcacacctcgcaacccaaaggcgcccacttggagaaattttccttctccgcccccgcacctgaaggagaaaaacagcggccccccccgcggggcagggggtccaaaaaaacccccgctaacgccgggtgttttctccctctagaaaaaaacacacccaccactttatcctccaaaaaatttgggcggcgaacggctctttgtttgcgcagaggggagaatcccacttctataaaccgtggtgggcgactctcctatatatttcccgcggtgtcgcgggggggagggcccccaccacaaatgaggggggccgcgccgctctccgcccaccctctcttaaagaaattttctaagtgaagccccttcgccgaggaccctccgtgggcgccacaaattacggtgtgctcgcgccaaaacgacaacaccttggtggttgtgnnnnnnnnnntctccccgcccacagaaggcaacactcccccgggagcccgcggtaaccgcccggcccaagattgcccccccctttatacccaccctctccctgggtctcatcttgtggaaggaccccctccgcctgtagacggtcgcgcgcctatgtcgctgcgcg

SEQ ID NO: 15862 - DNA, 839 bp, Homo Sapiens
  misc_feature (146)..(267): n is a, c, g, or t
  misc_feature (727)..(746): n is a, c, g, or t
gggactcggactcctgggacgccgacgctttcaccgtggaagacccagtgcggaaggtggggggcggcggcacagccggcggggaccgctgggaaggcgaggacgaggacgaggacgtcaaggataactgggatgacgatgatgannnnnnnnnnnnnnnnnnnnnnnnnnnnnnnnnnnnnnnnnnnnnnnnnnnnnnnnnnnnnnnnnnnnnnnnnnnnnnnnnnnnnnnnnnnnnnnnnnnnnnnnnnnnnnnnnnnnnnnnnnggttagaagaacccgaagaacctaaagtgctaacaccagaagaacaattagcagataaactgcggctaaagaaattacaggaagagtcagacctccaattagcaaaggaaacttttggtggtaataatacaggttatgggaatagatggtatgaacccctcttcaagagatgactttacagaggttgggaaggtactaaaagaataaattaccccatatgaaaaggcactatattatgcccagttttttgggaaatcttacttcccagatgggtgggattttctttgggaattggtggacttggaaaaaaattccccagtcccctgcactgggcgttggcgcgggaaaacccgaaagccagaacagccaaaccaaggcccaaaaggaagaaaaaagggggggttcccgggaaggggcgattaaaaaccccccatggaaaagatgccctgggcagaataannnnnnnnnnnnnnnnnnnntattggacccggcctcgggaagaactcctgggggcatttattttttttcctggggggcctccctaagggtggccccacaccccttgaaagggg

SEQ ID NO: 15863 - DNA, 825 bp, Homo Sapiens
  misc_feature (57)..(57): n is a, c, g, or t
ggggctggcgggaacgtgaagctccgcggtgcctgatggggccgttgggcggccggntagctgttgctgttgggggaccccctcattcctgccgctgccgtccctgctgcctcatggcggccatcggagttcacctgggctgcacctcagcctgtgtggccgtctataaggatggccgggctggtgtggttgcaaatgatgccggtgaccgagttactccagctgttgttgcttactcagaaaatgaagagattgttggattggcagcaaaacaaagtagaataagaaatatttcaaatacagtaatgaaagtaaagcagatcctgggcagaagccagaaatgcggtccttggacctggcttctcagcaattatccctgagagggaagatcctggagatatcctgagagcacacagagcttccccacaccttcagacttgcaccttgctgtccagaagctgcctagccctcctttcaacccacaatggccagtgccaatagcagtgcgggcatccggtggtccagacaggagacacgaactcttctcctcatactaggcgaggcagagtatattcagcgcctccagactgtgcatcacaatgcagatgtctatcaggctgtgtctaagcgaatgcagcagggagggcttccgccgcaccgaacgtcagtggcgcttccaggtttaaaggtctgaaagggattatattttaaaggcctatgtttgcccatggccccaagtattgggtgagcccaccaacactggccattttttatggatacggtttggatccagccttcctccccaaaatcacgataggtggactt

SEQ ID NO: 15864 - DNA, 823 bp, Homo Sapiens
  misc_feature (778)..(778): n is a, c, g, or t
ggggcggccggtagctgttgctgttgggggaccccctcattcctgccgctgccgtccctgctgcctcatggcggccatcggagttcacctgggctgcacctcagcctgtgtggccgtctataaggatggccgggctggtgtggttgcaaatgatgccggtgaccgagttactccagctgttgttgcttactcagaaaatgaagagattgttggattggcagcaaaacaaagtagaataagaaatatttcaaatacagtaatgaaagtaaagcagatcctgggcagaagctccagtgatccacaagctcagaaatacatcgcggaaagtaaatgtttagtcattgaaaaaaatgggaaattacgatatgaaatagatactggagaagaaacaaaatttgttaacccagaagatgttgccagactgatatttagtaaaatgaaagaaacggcacattctgtattgggctcagatgcaaatgatgtagttattactgtcccgtttgattttggagaaaagcaaaaaaatgctcttggagaagcagctagagctgctggatttaatgttttgcgattaattcacgaaccgtctgcagctcttcttgcttatggaatttggacagactcccctactggaaaaagcaatattttggtgtttaagcttggaggaacatccttatctctcagcgtcatgggagttaacagtggaatatatcggggttctttcacaaacactgatgataacatcggtggtgcacatttcacagaaccttagcacagnatctagcttcgtgagttcaaagatcctttcaacatggatgtgagt

SEQ ID NO: 15865 - DNA, 429 bp, Homo Sapiens
  misc_feature (46)..(89): n is a, c, g, or t
ggctggctggcctgccatttgcctctccccagaggcggtggttttnnnnnnnnnnnnnnnnnnnnnnnnnnnnnnnnnnnnnnnnnnnnaggtggtggtttcagagggagaggacattaagtgaaacagttgacagacatcaccagttgacttctgcattaacctgcatgatctgtttctactatggattggaaacttgtttcttgaacaagtcttgaagatcttggtcattttatgacaatggatctaaaatgtcagcatcatgcaaagtgcaacggaatagtgaattttgctctaaaagagcatgaacaagtctttctaatgttttgtacagtgcctggcactctgtgggggctcaataaatggataggagttttcatttgaaggatatttgaatttttaaaataaagtgttttattcccttaagtt

SEQ ID NO: 15866 - DNA, 772 bp, Homo Sapiens
aacagatcatgcaggttaatgaagaagtcaactggtgatgtctgtcaactgttcacttaatgtcctctccctctgaaccaccacctcttcctcctctgaagcccccacctccacctcctcttccacctctaaaaccaccgcctctgccaccacctctgccacctcctcctcttcctcctcctcggcctcccctgccaccacctcttggaggtcctttctcacctggaggtcgaggtaaaaacctctgcagtggcagcagcttatatgggtctatataaaacttctgtagttttttaaaggatgaagccttcatgttttctgacaacttaactgaaaaataaaaatctctgagttgtccaaatatttcatccacttttccaatttgttctttgttttctaagtaaacaggagcattgaaataaggcaccttattttcatctgtggtacatttacaaactatgtcatcttcacagggatgcaggaactctcctaataagactacacgttctggaggtccttggtcttggcctttgttaaagcctccgcggccaccccctcgtccaaatcctcccctgccgccgcctctgaaattgccgccgcctccaccgccgcctccacctcggaagtggttgctgctgccacctcggttgaagccgccacctccaccacctcgattaaagcctccacgacctccgcctcgaaaagacattctctctcctccctgacgctgagccgtggaagtgacgtataacagcggcgtcctttgcagcac

SEQ ID NO: 15867 - DNA, 1323 bp, Homo Sapiens
  misc_feature (139)..(156): n is a, c, g, or t
  misc_feature (251)..(285): n is a, c, g, or t
  misc_feature (1310)..(1310): n is a, c, g, or t
agtggcgcgggaacggggaatacggcgtgtaggaagcccacctaacgcgcggcggacaacggcggcgcagttcgcggcgattatagagcagacggggtccgcccggcgatcgaaccaaagggtggagcgggagggggcnnnnnnnnnnnnnnnnnnggtacagaaaagggggccgggggcggccgggaaggcgtaaagcggtgttgctcctgggagggagacgtggtggaaatgggaccgcgaaacgcaannnnnnnnnnnnnnnnnnnnnnnnnnnnnnnnnnnccgccaggaacttcctcaaccctccacggcctcgtccgacgaaagctccagcgccgctgcgtcctcctcgggccgctcgccctcgcccagctcctcgccctccttctctggcagcgcctccgactctttcagcgatttgctgatgctcagtttggccggcagcttcacttcatcctggtagatcatgactttaaagttgcggcgccgcagcagctcggcctcgttgacctccagcttcttgatctgccccgcctggcgctccaggctgccgcgcacggtcttcacgttgacgctgaccttgcgcaccttctccagcagcttgctcaccgtattgctcgtggtggcgtgcgccttgcccagcttgctcagctcgccctggatgctctgcactgcgccctccatctccgcctgccgctcctccagctgtgcttgagtcagctggatctggtctacggccccgatgattttgtccaggaggctcagcaccagcacgccgttcacctggtccgacttgatcagctcttctgagccggcccccgacggctcctccgctgcctgagccccagcggaggaaggctccggggcctcggcgtcggggtacccgggaagcggccgctcgacaatatagagcgtggggtcctccatggctacccggagccgtgcgggaccggccgggtggggctggagctggagcgggagacccggagagaagcaggagcggaagggaggagagctagcgggcgagagcggagagcagaggaaactcgagccacgtccgtgcgcaccgggactccgcccagaggggcctcagcttttccaccactgctttctagtcctttaactcctagaggcaaacttttgggggataagaaagcctgggaggggcctgtgccaaaaccctctctgcctggggactgggcggtgattccgcttctgcctggacgcggtgctgggcgtcatggacgcggcgcgcccggaggcggctgccgccaagcccgacgcggaaccccgccccgggacgcagnccccccaggcccg

SEQ ID NO: 15868 - DNA, 527 bp, Homo Sapiens
  misc_feature (160)..(229): n is a, c, g, or t
cccgtgctgaagcagttgggccccgcgcagcccaagaagcggcctgatcgcggcgccctgtccatatccgcgccgctcggcgacttccggcacacgctgcacgtggggcgcgacggtgacgccttcggggacacctcgttcctgaaccgccacggcggcnnnnnnnnnnnnnnnnnnnnnnnnnnnnnnnnnnnnnnnnnnnnnnnnnnnnnnnnnnnnnnnnnnnnnnagtccgcagcgccctcgcctgccgacccgctgctgtccttccacctggatctggggccctccatgctggacgcggtgctgggcgtcatggacgcggcgcgcccggaggcggctgccgccaagcccgacgcggaaccccgccccgggacgcagcccccccaggcccgctgccgccccaacgcggacctcgagctgaacgacgtcatcggcctctaggttccctcattccccgcgcccttcccgcccggcaccccacttctgtatacataaacggccaaggtgtgtgcccgggaaaaaaa

SEQ ID NO: 15869 - DNA, 965 bp, Homo Sapiens
  misc_feature (413)..(415): n is a, c, g, or t
  misc_feature (418)..(553): n is a, c, g, or t
  misc_feature (565)..(635): n is a, c, g, or t
  misc_feature (668)..(723): n is a, c, g, or t
  misc_feature (747)..(796): n is a, c, g, or t
cctgcacggcgaacccttgagtggcctgacggggagcgggcctcgcgcgcctggagggccctgtggaacgaatagaggcacacagcatggcagaaaaccgacacacgggagccactgactcggatccgcaacaactcagccatccacatccgagtcttcagggtcacacccaagtaattgaaaagacactcctccacttatcccctccgtgatatggctcttcgcatgctgagtactggacctcggaccagagccatgtaagaaaaggcctgttccctggaagcccaaaggactctgcattgagggtgggggtaattgtctcttggtgggcccagttagtgggccttcctgagtgtgtgtatgcggtctgtaactattgccatataaataaaaaatcctgttgcactagtaannnaannnnnnnnnnnnnnnnnnnnnnnnnnnnnnnnnnnnnnnnnnnnnnnnnnnnnnnnnnnnnnnnnnnnnnnnnnnnnnnnnnnnnnnnnnnnnnnnnnnnnnnnnnnnnnnnnnnnnnnnnnnnnnnnnnnnnnnnaaaaattggggnnnnnnnnnnnnnnnnnnnnnnnnnnnnnnnnnnnnnnnnnnnnnnnnnnnnnnnnnnnnnnnnnnnnnnnggggcaataatttttcccaaagaaacacccggnnnnnnnnnnnnnnnnnnnnnnnnnnnnnnnnnnnnnnnnnnnnnnnnnnnnnnnngaaggtttttaaaacaaaacccgnnnnnnnnnnnnnnnnnnnnnnnnnnnnnnnnnnnnnnnnnnnnnnnnnncccaacggggggcctttttattaaaaaaattagcccccccgccccgtgtgggctttttttggagagaggcggggggggaaatattctaaaaaaacaactccccccccgccggggtgggagccctccctccacaaccgggggtggtggaacaccccttgaatcccgccgc

SEQ ID NO: 15870 - DNA, 814 bp, Homo Sapiens
cacgaggcgcccacgagctggctggctgcttgcacccacatccttctttctctgggacctggggtcgcggttacttgggctggccggcgaacccttgagtggcctggcggggagcgggcctcgcgcgcctggagggccctgtggaacgaagagaggcacacagcatggcagaaaaccgagagccccgcggtgctgtggaggctgaactggatccagtggaatacacccttaggaaaaggcttcccagccgcctgccccgaagacccaatgacatttatgtcaacatgaagacggactttaaggcccagctggcccgctgccagaagctgctggacggaggggcccggggtcagaacgcgtgctctgagatctacattcacggcttgggcctggccatcaaccgcgccatcaacatcgcgctgcagctgcaggcgggcagcttcgggtccttgcaggtggctgccaatacctccaccgtggagcttgttgatgagctggagccagagaccgacacacgggagccactgactcggatccgcaacaactcagccatccacatccgagtcttcagggtcacacccaagtaattgaaaagacactcctccacttatcccctccgtgatatggctcttcgcatgctgagtactggacctcggaccagagccatgtaagaaaaggcctgttccctggaagcccaaaggactctgcattgagggtgggggtaattgtctcttggtgggcccagttagtgggccttcctgagtgtgtgtatgcggtctgtaactattgccatataaataaaaaatcctgttgc

SEQ ID NO: 15871 - DNA, 874 bp, Homo Sapiens
  misc_feature (789)..(805): n is a, c, g, or t
ttcttccagaggacagatgatactatgggaaggatctagccttaagactgtcactcagggctagaaccagccattgttttatccatttagaattctgtcctctggaatgactctcctgtccctaaaggggttaagagagagatcacctagaaatccctctggacacttgtgggttctttagggtttgagtttcttcttccccttgagcttcagagaggagagttggcatggttaaatctgaatggttacctcactgctgaaaacccagaggggcgtggcacactcgcttgtgtggaaaagcctctaaatgcatcccttcctgtctttcctgcttcctttgccttacaattgaagcagcccgtggtaccatcacagtatgcagagacttcctcacctttcaaatatagggaccacccccgatgcattggtgagggtgggcacttataaatgcctgctattgttaagccattccagcctcttcctctgaatagaccagacgccctttcacttagttcagtggcagtccttttgccttcccaaccctgctgttaggcctgctgttccctttgctcttgattaggagagatggaaggagatgagctcccataactgaattggcctttggttcatgttttctccccatatgtatatatgccatatgtgaatatgccatatatatgtgcccacaaatctatctacgttgttcttttcaaattagcacgcagataggaattttgagtttcttcttcttttagtaactagtataacaagcactggtatttttgtacnnnnnnnnnnnnnnnnngattgactattgtggtcgcatgacataaacaaacaaatggtgatgctcaaagatctttgaggtcctgtg

SEQ ID NO: 15872 - DNA, 653 bp, Homo Sapiens
tttttttacaagtgggcatgagtttttattctcagtgcacagcagtattggtttctgttcatcagcaaaaagctttattggttccaacaaattatcccttttaaaactcctcttcttcttctggtctcagtggaacaacacatttgaatttcagatttgcagtttatagcattttttttccctaagaaccatataaatacatgcaaaaccttgtacatggagcttaaataatatcaaaatgcaaatatagattgggtgcactgttaagctgaattgcaaattatggcaacacacactggactggggtatacgttgctttgatatcaccatttgtttgtttatgtcatgcagaccacaatagtcaatctttggtttttctttttggtacaaaaataccagtgcttgttatactagttactaaaagaagaagaaactcaaaattcctatctgcgtgctaatttgaaaagaacaacgtagatagatttgttggcacatatatatggcatattcacatatggcatatatacatatggggagaaaacatgaaccaaaggccaattcagttatgggagctcatctccttccatctctcctaatcaagagcaaagggaacagcaggcctaacagcagggttgggaaggcaaaaggactgg

SEQ ID NO: 15873 - DNA, 490 bp, Homo Sapiens
ggggccccacgctgcgcacccgcgggtttgctatggcgatgagcagcggcggcagtggtggcggcgtcccggagcaggaggattccgtgctgttccggcgcggcacaggccagagcgatgattctgacatttgggatgatacagcactgataaaagcatatgataaagctgtggcttcatttaagcatgctctaaagaatggtgacatttgtgaaacttcgggtaaaccaaaaaccacacctaaaagaaaacctgctaagaagaataaaagccaaaagaagaatactgcagcttccttacaacagtggaaagttggggacaaatgttctgccatttggtcagaagacggttgcatttacccagctaccattgcttcaattgattttaagagagaaacctgtgttgtggtttacactggatatggaaatagagaggagcaaaatctgtccgatctactttccccaatctgtgaagtagctaataatatagg

SEQ ID NO: 15874 - DNA, 486 bp, Homo Sapiens
ctctatccttaatcttcaaaatgaaaactgaataacatgtactttaacactttatcgtatgttatcaattcctttccaaatgaataacgagaaaataagaaaacgactaagcaagcatttcataccttaaatgaagccacagctttatcatatgcttttatcagtgctgtatcatcccaaatgtcagaatcatcgctctggaaagggtaagaaataaaaacaactcatgttcagataggtttaatcagaaaatgtatgttagtaccaagagtcatcttaatccacacataacaaaattacactgaaaatgagtatttaaaatcctaaataaagccacaggaaacttacctggttagaggttatgtgactttactccaaaagctagacataggtaaatgttctaagaatgaatgccatcaagtgaatgcccctacaatttaattcctatccacataccatgagtagattaaggatagaggggtaccg

SEQ ID NO: 15875 - DNA, 611 bp, Homo Sapiens
  misc_feature (14)..(14): n is a, c, g, or t
  misc_feature (51)..(51): n is a, c, g, or t
ggcgctggcacagnaaggacaaaggcggcaaggcaagaagacggcggccgnggaggcaagaaggtgaagaaggcggccaagcccagcgtccccaaagtgcccaagggccgcaagtgagcgtgtcggccggtcagagcggccggcgtgggcttttcggtgtttttgtttttctaccccaagtgacgtagattttgtacggctcacgccggccggggccgcgaggcctggtctgagcctcagggaggggccccgggtcctctcagtctttcccctcccccaacgatgtagcgtttttcgttgtttgctttaggtttttgaaacagccccggcgacgcctctattggctctcggccttggcaacggccgtcgtcatggttactggcccctaggcgccgatggccgaggccgcgcctgcccaccgggcggggtcgctggttggccgggcccaggcgcgcggggacgcggaggccgcgcatcctttcccagctccccaccctccttgcctttgggtgcgcgacaaacaatcgctccgggctcagggctgcgcggctcttcccttcattccatgggcctttttttgggcacaataaagcgtttaaaccttaaaaaaa

SEQ ID NO: 15876 - DNA, 475 bp, Homo Sapiens
gcggccgccgggggcaagaaggtgaagaaggcggccaagcccagcgtccccaaagtgcccaagggccgcaagtgagcgtgtcggccggggccgcgaggcctggtctgagcctcagggaggggccccgggtcctctcagtctttcccctcccccaacgatgtagcgtttttcgttgtttgctttaggtttttgaaacagccccggcgacgcctctattggctctcggccttggcaacggccgtcgtcatggttactggcccctaggcgccgatggccgaggccgcgcctgcccaccggggggggtcgctggttggccgggcccaggcgcgcggggacgcggaggccgcgcatcctttcccagctccccaccctccttgcctttgggtgcgcgacaaacaatcgctccgggctcagggctgcgcggctcttcccttcattccatgggccttttttatgggcacaataaagcgtttaa

SEQ ID NO: 15877 - DNA, 557 bp, Homo Sapiens
ggggacgctggcggtggacgcaggcagcatggaccacggttgctgggcggatggggagcgtctatggtcagttgccttagaagtggtgagatgggaagctgcagttggaagaccctggaggatgcctgacaaggggatgtctgacacatgattggagctctttttgaaatgtttcttgcccttcctggagcagaggagccattatttatgcagagctgcaaaggaacctgaagctgtggctgtaaaaaatcacaacccagacaaggtgtggtgggccaagaacagccaggccaaaaccattgccacggagtcttgtcctgccctgcagtgctgtgaaggatatagaatgtgtgccagttttgattccctgccaccttgctgttgcgacataaatgagggcctctgagttaggaaaggtgggcacaaaaatcttcatgagcaatacttcttagtagattgttttgttattcaaatcaagttctagtgtttttatgtgagattatataatttacagtgttgttttatatacttttgaataaatgtacacctattaaagt

SEQ ID NO: 15878 - DNA, 810 bp, Homo Sapiens
  misc_feature (655)..(694): n is a, c, g, or t
  misc_feature (697)..(704): n is a, c, g, or t
  misc_feature (706)..(729): n is a, c, g, or t
gggacgctggcggtggacgcaggcagcatggaccacggttgctgggcggatggggagcgtctatggtcagttgccttagaagtggtgagatgggaagctgcagttggaagaccctggaggatgcctgacaaggggatgtctgacacatgattggagctctttttgaaatgtttcttgcccttcctggagcagaggagccattatttatgcagtgattatgcctgtcatcgctggtggtatcctggcggccttgctcctgctgatagttgtcgtgctctgtctttacttcaaaatacacaacgcgctaaaagctgcaaaggaacctgaagctgtggctgtaaaaaatcacaacccagacaaggtgtggtgggccaagaacagccaggccaaaaccattgccacggagtcttgtcctgccctgcagtgctgtgaaggatatagaatgtgtgccagttttgattccctgccaccttgctgttgcgacataaatgagggcctctgagttaggaaaggtgggcacaaaaatcttcatgagcaatacttcttagtagattgttttgttattcaaatcaagttctagtgtttttatgtgagattatataatttacagtgttgttttatatactttttgaataaatgtacactattaaaaatnnnnnnnnnnnnnnnnnnnnnnnnnnnnnnnnnnnnnnnnccnnnnnnnnannnnnnnnnnnnnnnnnnnnnnnnctttgtcgggccggccctcgcggccctccgaagaaagctttttcttaaaacccaatttcggttttgggcccgccggcgggc

SEQ ID NO: 15879 - DNA, 888 bp, Homo Sapiens
  misc_feature (772)..(772): n is a, c, g, or t
ggggaagtgaatctagctctgaaggcatggcgcgtaccaagcagactgctcgcaagtccaccggcggcaaggctccgcgcaagcagctggccaccaaggcggctcggaagagcgctccggccaccggcggtgtcaagaagccccatcgctatcggcctggtacagtggctctccgcgagattcgccgctaccagaagtccaccgagctgctgatcagaaagctgccttttcagcgtctggtgcgtgagatcgcgcaggacttcaagaccgacttgcgcttccagagctccgcggtgatggcgctgcaggaggcctgcgaggcctacctggtggggctgtttgaggacaccaacctgtgcgccatccacgccaagcgggtgactatcatgcccaaggacatccagctcgcacgtcgtatccgcggcgagagggcttgagtctcaaggactcactgattacatacccaaaggctcttttcagagccacccacatgcgcgctgaaaagatctgtttctctcaggaattcttcctggtacttgttttgcctgtagtagatagggcccatttccagacgttatacaatctgtttcgtaagactcagcctatccctttttgaatgctaattttgggagtcttaacatctaataatgtccggcatttttccgtaagcattgagtgtagacaaaagttccttcgtgtattgctctcccatctccgcagcacggttttgaccggatggtgcttctaaatttctgctaacctgtactgtggntgtgtgtatatttcttgccacagcgccagaaatcccactaaggttgtactgaacgttggaaaaatacaggttaatgtagctcatgctggctaaagtgaaacgttctgtccccgtct

SEQ ID NO: 15880 - DNA, 1046 bp, Homo Sapiens
gggggacctgccctttagttgacctccagaaagtgggggatggggtctttagggccggggtttggctaggaagaggcacttggggaggtggcctcaatgagtgcagggttgaggatgatgggcagagtcatgggcgggaccccccacttgcagtggggaggtcaagggctgcaggatcagtgggggctgggtcagtgggggaggtccctcttgggcaggactcagtttgctggggctagaggccatgggcgatccgggggagctgctgctgggagctcgggtactctcgggcttctctgagtcacaaacccccatttctgagggtatctctgggagaggtggatggccaggcatcctggggtcaccagcagcagaagtcaggtgagtagaggccagaggtttttgactgtgcggttccgcaggcatggggtcctggatgacagtctgcttgaagagctcatctcgtaggtgagggagaaaacagtcaatgcgttcccaggtgatctcccagagggccgaggggccgcctccccgtgcatctgcactgtggaaaatctccgctgtgtccatcaccagaagcatgttcttcagagactcagggatcgcctctgacagtaagtcgctggagcctgcgtgcatgtacttgtccatgaagtccaagatggtgagccagagggccgcaaaggtagagagtgacagcagtggagacaggtgctgcaggaagaccttagagagcaatgtggaagccctcatccgggtctcctccatcccacccacatctgcagggctgatgttctccaagagcttggtaagtagaggaaacagcaccttgttaaaacaggactcccattccagggcatctagcttttgcagatcatgtacaagtagtgctcgctgcagataggtcagtgcctgcatccgtacctggcgccgggcatcgcagcacaggcaggcaatatcctgcagtaaagggcaccagcagtgggcccagagggtgcgagagtccaagaattgccccgagtccagaatgccccgagtccagaatt

SEQ ID NO: 15881 - DNA, 1626 bp, Homo Sapiens
cagtaactccagcggtataaggtagcgaggctgggtggcgaattcggcacgaggcagaaagcaagttcctccagctggaggtcactacaggagctcatgaaggctctggtctcagtgacaccagatgaagagacatatgatgaggaagatgctgctttctgcctagagatgctggctaaggattgtgttggagaacagggatcgtgtgggctgtgtgtggcagactgttcgagaccatctataccacctctgtgttcaggcacaagatttctgcttccttgtggagcgggcagtggtggggttgctacgcctggccattcggcttctccggagagaagagatcagtgctcaggtgctgctctccctgcgcattttgctactgatgaagcccagtgtgctatcccgagtcagccaccaggttgcgtatgggctccatgaactcctgaagaccaatgcagccaacatccactcaggtgatgactgggccacactcttcacactgctggagtgcatcggctcaggtgtgaagcctccagctgctctgcaggccacagccaggcagatgcacctgatgccggggcccagtcagatagtgagctcccatcctaccatcagaatgacgtgagcctggatcgagggtacacttccgactcagaggtctacactgaccatggcaggccgggcaagatacaccgatcagccacagatgccgatgtggtcaacagtggttggttagtggttgggaaggatgacgttgataactccaagccagggcccagccgcccaggcccttcacccctgatcaatcaatacagcctaacagtgggactggatttggggccacacgacactaagtctctgcttaagtgtgtggaatcgctgtccttcatcgtgcgtgatgctgcccacatcacacctgacaactttgagctctgcgtcaagactctccggatctttgtggaggccagtctgaatggcggatgcaagtcccaggagaaacgtggcaagagtcacaaatatgacagcaaagggaaccgcttcaagaagaaatccaaagagggatcaatgcttcgccggcctcgaacctccagccaacatgcctctcggggcgggcagagtgatgatgatgaggacgaaggcgtgcctgccagctaccatacggtgtctttacagttgctagacctgatgcacaccctgcacacgcgggcagcctctatctacagctcatgggcggaggagcaacgccacctggagacaggtggccagaagattgaagctgattctcgcaccctctgggcccactgctggtgccctttactgcagggtattgcctgcctgtgctgcgatgcccggcgccaggtacggatgcaggcactgacctatctgcagcgagcactacttgtacatgatctgcaaaagctagatgccctggaatgggagtcctgttttaacaaggtgctgtttcctctacttaccaagctcttggagaacatcagccctgcacatgtgggtgggatggaggagacccggatgagggcttccacattgctctctaaggtcttcctgcagcacctgtctccactgctgtcactcgtctacctttgcgccctctggctaccatcctcc

SEQ ID NO: 15882 - DNA, 247 bp, Homo Sapiens
ggtgattcaatagcaggggagtggcggggagatgtggcacaaatagaagtatgtaacattcaaacaacagcatctaggattttggaaaaaactttcggttacagttacacaaagggtcacttcctccccagcgacacatgggcctctcaaaggagaggagggagtaagtcccacggtagggccagtggttgctcccggggttttgaaacttctaaaactaggtgctattgaaacttctaaaactagg

SEQ ID NO: 15883 - DNA, 362 bp, Homo Sapiens
agggcctggaagggtgggaggtatgtctagggggcagtgtctcttccagggggaattctcagctcttgggaacccccttgctcccaggggaggggaaacctttttcattcaacattgtagggggcaagctttggtgcgccccctgctgaggagcagccccaggaggggaccagaggggatgctgtgtcgctgcctgggatcttggggttggcctttgcatgggaggcaggtggggcttggatcagtaagtctggttcccgcctccctgtctgagagaggaggcaggagccccagggccggcttgtgtttgtacattgcacagaaacttgtgtgggtgctttagtaaaaaacgtgaatggagc

SEQ ID NO: 15884 - DNA, 590 bp, Homo Sapiens
gtactatagaaccgtggttaaaacaaagcaggctggtaccggctccggaatatccgggcatatcgtcgacccacgcgtcagcccacgcagtcgcccacgcgtacggcctccgtcgtggccccctcggggctgacactaatggacagaggctctcggtgccgaagattgcctgccagaggactgaccacagcctggctggcagctgctctgtggaggacctccaggactgagactagggctctgttttccaagggtctatcactaggccccctagctacacctggaagtttcagaacccactttggggggcctcctgcctgggcaggctcttcaagtgtggccctctttggagtcaaccctccttcccgaccccctccccctagcccagccccaggaggggaccagaggggatgctgtgtcgctgcctgggatcttggggttggcctttgcatgggaggcaggtggggcttggatcagtaagtctggttcccgcctccctgtctgagagaggaggcaggaccccagggccggcttgtgtttgtacattgcacagaaacttgtgtgggtgctttagtaaaaaacgtgaatgg

SEQ ID NO: 15885 - DNA, 1243 bp, Homo Sapiens
  misc_feature (673)..(723): n is a, c, g, or t
gggggggtcgggcctgggtccgacggtagtgggtagcgggtctcgggttgcgggttgcaggttgcaagccgcaggccccaggcaactgccttcccggggccatgttcggctccagtcgtggaggcgtgcgcggcgggcaggaccagttcaactgggaggacgtgaagactgacaagcagcgggagaactacctgggcaactcgctgatggcgccggtacgccgctggcagaagggccgcgacctcacctggtacgccaagggccgggcgccatgcgcgggcccgagccgcgaggaggaactggcagccgtgcgggaggcggagcgcgaggcgctgctggccgcccttggctacaagaacgtgaagaagcagcccacgggcctgagcaaggaggacttcgcggaggtctgcaagcgggaaggaggcgaccccgaggagaagggcgtggaccggctgctggggctggggagcgcaagtggctccgtgggccgcgtggcgatgtcccgagaggacaaggaggccgccaaactggggctgtctgtgttcacgcatcaccgcgtagagagcggcggacccgggacctcggcagcctcggccaggaggaagccgcgggcggaggatcagacggaaagcagttgtgagagccacaggaaaagcaagaaggagaagggggnnnnnnnnnnnnnnnnnnnnnnnnnnnnnnnnnnnnnnnnnnnnnnnnnnncacaggcggccagctgaggccggccgtcctctcccacatctcctgagaggcccaggcaccaccaccatgactccgactccaactccccctgctgtaagaggaggaagcggggacacagtggggacaggaggagcccgtctcgcaggtggcatgacagaggctctgaggcctgatggctggaccctgctcactgctgttgtgggaccctgaaccctcccttcaccttgcttgcctcctgcctcggaagctccttgggtgtgggtgaagccgaggctgctcctgtggaagtggctctgggcaccagcctgtggggctaaagacttgacagctagctctggagcagccggcttcctggaaaacctccaggtttcgcataccagggatggccctctggcttggcctgcgaaggtgaacctgcccagatttatcagtagaggctggactccctctgtgtcctgcccatggttgcagcagccatgggcctatgagcggtctaactgtaaaccaagtatggtgactt

SEQ ID NO: 15886 - DNA, 587 bp, Homo Sapiens
aagaagaacgacacagggcacaggcggccagctgaggccacctcctctcccacatctcctgagaggcccaggcaccaccaccatgactccgactccaactccccctgctgtaagaggaggaagcggggacacagtggggacaggaggagcccgtctcgcaggtggcatgacagaggctctgaggcctgatggctggaccctgctcactgctgttgtgggaccctgaaccctcccttcaccttgcttgcctcctgcctcggaagctccttgggtgtgggtgaagcccgaggctgctcctgtggaagtggctctgggcaccagcctgtggggctaaagacttgacagctagctctggagcagccggcttcctggaaaacctccaggtttcgcataccagggatggcccctggcttggcctgcgaaggtgaacctgcccagatttatcagtagaggctggactccctctgtgtcctgcccatggttgcagcagccatgggcctatgagcggtctaactgtggccaagtatggtgacctctatttttctttatattgactctttgtatttcaataaatataaaataaaagg

SEQ ID NO: 15887 - DNA, 604 bp, Homo Sapiens
aagccaaatatatttttaaaagatcatgcttataataagtaaattacacattaaggaaacatcaaaataaagtagatgaataaaaaggcacactcgaaaaatttgagcgcagaaaggacagttctttttgttttgtttctaatgtcggaagaaaaagaaagagatatattaaaatcattgttttcaagtgaaggtttctgtcagttgaagtagttagcaatggcttcttttctcccgtgtccaaagcaggctcttcctgcgctgacttctgaggaggtgttcagtcctctgccatgtataggcgatacatcaaggcgacggccactgcagagatggcagggatcacccagttggtccaccaactagaaagacacaaaaagcaatgatgctgacatgatgtgcactgtggtggactcaaaatctttgccccttctaacagaaaattaccagggcatgtttttcttaactctgtaatgaattttgctgaaaaggcaacgtggatttgctaaaagtgacatgagtgtaacacatgccctgctatactaggaatcactctgccctgctggctttatgagaaaactcatgccccacttggctggtacgt

SEQ ID NO: 15888 - DNA, 1108 bp, Homo Sapiens
caaataagggttcagactgcaaatgaagttaagcaagctgttgaacagcagagtccagagccatagagaaactcatcaaaaacagatcagtagtttgagagatgaagtagaagcaaaagcaaaacgttattactgatcttcaagaccaaaaccagaaaatgatgttagagcaggaacgtctaagagtagaacatgagaagttgaaagccacagatcaggaaaagagcagaaaactacatgaacttacggttatgcaagatagacgagaacaagcaagacaagacttgaagggtttggaagagacagtggcaaaagaacttcagactttacacaacctgcgcaaactctttgttcaggacctggctacaagagttaaaaagagtgctgagattgattctgatgacaccggaggcagcgctgctcagaagcaaaaaatctcctttcttgaaaataatcttgaacagctcactaaagtgcacaaacagttggtacgtgataatgcagatctccgctgtgaacttcctaagttggaaaagcgacttcgagctacagctgagagagtgaaagctttggaatcagcactgaaagaagctaaagaaaatgcatctcgtgatcgcaaacgctatcagcaagaagtagatcgcataaaggaagcagtcaggtcaaagaatatggccagaagagggcattctgcacagattgctaaacctattcgtcccgggcaacatccagcagcttctccaactcacccaagtgcaattcgtggaggaggtgcatttgttcagaacagccagccagtggcagtgcgaggtggaggaggcaaacaagtgtaatcgtttatacatacccacaggtgttaaaaagtaatcgaagtacgaagaggaacatggtatcaagcagtcattcaatgactataacctctactcccttgggattgtagaattataacttttaaaacaaaatgtataaattatacctggcctgtacagctgtttcctacctactcttcttgtatactctgctgcttcccacacactagagtgcattttggctcttaggagggtaagacgtttacactgtgccctatgtattacacgtttctatcgcc

SEQ ID NO: 15889 - DNA, 597 bp, Homo Sapiens
  misc_feature (576)..(576): n is a, c, g, or t
gagtgaaatgataaatttaagggagaatatttccctaagtattcatcacagggcgaagtataaagcgttgagctcaacgctttatacttcatctcatcaaaaacagatcagtagtttgagagatgaagtagaagcaaaagcaaaacttattactgatcttcaagaccaaaaccagaaaatgatgttagagcaggaacgtctaagagtagaacatgagaagttgaaagccacagatcaggaaaagagcagaaaactacatgaacttacggttatgcaagatagacgagaacaagcaagacaagacttgaagggtttggaagagacagtgagtgctgagattgattctgatgacaccggaggcagcgctgctcagaagcaaaaaaaatctcctttcttgaaaataatcttgaacagctcactaaagtgcacaaacagttggtacgtgataatgcagatctccgctgtgaacttcctaagttggaaaagcgacttcgagctacagctgagagagtgaaagctttggaatcagcactgaaagaagctaaagaaaatgcatctcgtgatcgcaacgctatncaccagaagtataagcgttga

SEQ ID NO: 15890 - DNA, 833 bp, Homo Sapiens
ggggaagccaacaagaatttgagaactgtaaataccaagccttgaaagggaccatggtgcggcctgtgagacataagaaaccagtcaattactcacagtttgaccactctgacagtgatgatgattttgtttctgcaactgtacctttaaacaagaaatccagaacagcaccaaaggagttaaaacaagataaaccaaaacctaacttgaacaatctccggaaagaagaaatcccagtacaagagaaaacccctaaaaaaaggatggctttagatgacaagctctaccagagagacttagaagttgcactagctttatcagtgaaggaacttccaacagtcaccactaatgtgcagaactctcaagataaaagcattgaaaaacatggcagcagtaaaatagaaacaatgaataagtctcctcatatctctaattgcagcgcagccagtgattatttacatttggataagatcactgtggaagatgatgttggtggtgttcaagggaaaagaaaagcagcatctaaagctgcagcacagcacaggaagattcttctggaaggcagtgatggcgatcacgctaatgacactgcaaccatactttggacctgcgggaaaattctcgaggatgattctgaatccttgggcacagtgcggataatcgacccacaactttttctattgaaaaaaacgcaacgtctcaagcaaattttcaaaaggaaagaaagtggaagggtaaaaatccctcccccgctgcaaaaaccaccccagtaacccacctcctctaaacccccaaaccggtaactcggcctttgcgcgggaacctttccgggg

SEQ ID NO: 15891 - DNA, 427 bp, Homo Sapiens
ttcaggcacatttagtccaaaaacataggcgttcacctctcagttcagtttaacaatatttctcaaggatctatctgtgaggcacttggatgcatggtctataaataagaccaagtccctttcttgaaagtgcttaaaatctaatgaaggggagggagataaatacacaaatcaatggattcaagacagggtatcgaagatgttatgagagtaatacaagtaaaacattgaccaagttaaaaaggacaaaacaaaacctaacttgaacaatctccggaaagaagaaatcccagtacaagagaaaacccctaaaataaggatggctttagatgacaagctctaccagagagacttagaagttgcactagcttgatcagtgaaggaactgccaacagtcaccactaaatgtgccgcagggtaccgagct

SEQ ID NO: 15892 - DNA, 1056 bp, Homo Sapiens
  misc_feature (195)..(196): n is a, c, g, or t
gatttgtttaaaaacccttcgggtttcccccccggggggttttttattgggtgggaattcccagccactagttcatggcccaggatttccttgggaaacaggttatggccatgtttcatttacttacggggccccggcggcaaaacgaatggtttagaaagctcttcgagggccgaaggcggccacaaagggaannctcccgcaagctctccccgcgggggtcagaagaattttactggaacctggaggtatcccattcttcataataataaaaaagaaatgtagtgtataaaagctccaggttacattactaagcaacgacatttccgggagtgaatatacttcctgtattccgcaagctgcttcaagtacatattcgacggccatctgtgcttttcaacaaaactgcgttcttccactgaaagatcctgaaattcaggcttttgactgaagatgaggtagttagtagcaatgaaatgaagttagccaggttgaaagggcaatcagagtggtgaaacttggcctttttaagcaggtcaactatagcaaggttcatggatgccagttccctgcttggcaatgctctgcagctgggtaatgatgaacagctccaccagatgtgctgcagtctggacacttggtacatctcggcacagatcaggagacacatggcctggaatatgccagctgggcagcaggagtctgtgtacaggtattctaaaaatgacaagaaagtctctttggaaacaccataaacgggaatcaggacactctttggcttccatgtaattaccattaaacatggctgccatcacttcacaacgggccaccaggatggccctgtgggctggcactgtcgtaccttgaatttcgaagacaacatcggcaagcatcggcttattaaggaaaaacttgagggaagtgttataaaaccacaaaggttttctggcttgataggttttgcaattccttaggcaattaatctttcctggtgtttttaaaatgcatttaactttctcgattacatttgaaacatccccagaatctttcaacttc

SEQ ID NO: 15893 - DNA, 337 bp, Homo Sapiens
  misc_feature (46)..(46): n is a, c, g, or t
cgaaatgtcgttgcttagtaatgtaacctggagcttttatacactnacatttcttttttattattatgaagaatgggatacctccaggttccagtaaaattcttctgaccgaaaccaatgtgggtgttagaaaaattaccatatagcttaatatgtttattagttctctttggaaaaaaactaccactgtggtcttaaaagggaacaaaatataccataggctaaaactaaggctttcactctagaatgcaaagctgttttgcagctgttttcccttaaagatgtcctgttgctttagtgatatttagacccctctcagttaagaaatgcttagatt

SEQ ID NO: 15894 - DNA, 1100 bp, Homo Sapiens
gggggagttagagatgagtcaccgctgagaagcagctgcagtagctgagcagtggcagcagagaggcagacgtgagctgagggcgcagaggcaggcagcatctctgagggtccccaaggaacatggctgggagccgtgaggtggtggccatggactgcgagatggtggggctggggccccaccgggagagtggcctggctcgttgcagcctcgtgaacgtccacggtgctgtgctgtacgacaagttcatccggcctgagggagagatcaccgattacagaacccgggtcagcggggtcacccctcagcacatggtgggggccacaccatttgccgtggccaggctagagatcctgcagctcctgaaaggcaagctggtggtgggtcatgacctgaagcacgacttccaggcactgaaagaggacatgagcggctacacaatctacgacacgtccactgacaggctgttgtggcgtgaggccaagctggaccactgcaggcgtgtctccctgcgggtgctgagtgagcgcctcctgcacaagagcatccagaacagcctgcttggacacagctcggtggaagatgcgagggcaacgatggagctctatcaaatctcccagagaatccgagcccgccgagggctgccccgcctggctgtgtcagactgaagccccatccagcccgttccgcagggactagaggctttcggctttttgggacagcaactaccttgcttttggaaaatacatttttaatagtaaagtggctctatatttttcgtctaagaagagcatcaggagagaacgaaacaaggtacgaaagctacgagcagaagaggggggcgccgacgccaagatagttccccgacaggagggcccccatttagcgcggccacgcggtttgtgacaagcagagggcgaccatatagagagaggccacacatacaaaaagacgaggagccggaggacgcggtaacaaaaacgacatgaacgggggaaccacgcgagacagcggacatatggggggaacagacccacatcgcgagggggcgcacacggggcacaaacacccgacgagaacacgagcgcccgcggggcaaa

SEQ ID NO: 15895 - DNA, 339 bp, Homo Sapiens
agtttctccatctgtaaaatgagaattctagcaactcgtagggtatttgtgagatgttgcatgcaaagcccccagcaccatgcctgtcctagcttaagcacccaccaggtgtcgataagtaattgttcttccctggactgcctgcacatctagggcaccccaggaagagtcaccgcactctgtttcggggctcggctctctgaggggagggcatcctgtatggggaggagggtctggaccagagctgtccctgatcgctagaatcaacggcagaattcttgttattttaataataattaataatttagtgcttccactaataaaaatcattggaatggt

SEQ ID NO: 15896 - DNA, 557 bp, Homo Sapiens
  misc_feature (87)..(89): n is a, c, g, or t
  misc_feature (121)..(121): n is a, c, g, or t
cggcctgaaggggcacgcgggggacctgcaaagctagtgaggggcggggcaggcggcgcggtgggggcgggccgagccggatggccnnnatgagcggacacagccccacgcgcggggccantgcaggtggcatgaacggtaaggcccgcaaagaggcggtgcagactgcggctaaggaactcctcaagttcgtgaaccggagtccctctcctttccatggctggcttcagtgaactcaaggagactgagaaatggaatattaagcccgagagcaagtacttcatgaccaggaactcctccaccatcatagcttttgctgtagggggccagtacgttcctggcaatggcttcagctcatcggggcccacacggacagcccctgcctccgggttgaaacgtcggtctcgccgcagccaaggtgggcttccagcaagtcggtgtggagacctatggtggtgggatctggagcacctggtttgaccgtgacctgactctggctggacgcgtcattgtcaagtgccctacctcaggtcggctggagcagcagctggtgcaac

SEQ ID NO: 15897 - DNA, 1849 bp, Homo Sapiens
ccaacattgggcggggctggcgcgtgccggtggaagcgtgatgaaggcctacgagtgcggcgcggcctgaaggggcacgcgggggacctgcaaagctagtgaggggcggggcaggcggcgcggtgggggcgggccgagcccggaggccagatgagcggacacagccccacgcgcggggccatgcaggtggccatgaacggtaaggcccgcaaagaggcggtgcagactgcggctaaggaactcctcaagttcgtgaaccggagtccctctcctttccatgctgtggctgaatgccgcaaccgccttctccaggctggcttcagtgaactcaaggagactgagaaatggaatattaagcccgagagcaagtacttcatgaccaggaactcctccaccatcatagcttttgctgtagggggccagtacgttcctggcaatggcttcagcctcatcggggcccacacggacagcccctgcctccgggtgaaacgtcggtctcgccgcagccaggtgggcttccagcaagtcggtgtggagacctatggtggtgggatctggagcacctggtttgaccgtgacctgactctggctggacgcgtcattgtcaagtgccctacctcaggtcggctggagcagcagctggtgcacgtggagcggcccattcttcgcatcccacacctggccatccatctgcagcgaaatatcaacgagaactttgggcccaacacagagatgcatctagtccccattcttgccacagccatccaggaggagctggagaaggggactcctgagccagggcctctcaatgctgtggatgagcggcaccattcggtcctcatgtccctgctctgtgcccatctggggctgagccccaaggacatagtggagatggagctctgccttgcagacacccagcctgcggtcttgggtggtgcctatgatgagttcatctttgctcctcggctggacaatctgcacagctgcttctgtgccctgcaggccttgatagattcctgtgcaggccctggctccctggccacagagcctcacgtgcgcatggtcacactctatgacaacgaagaggtggggtctgagagtgcacagggagcacagtcactgctgacagagctggtgctgcggcggatctcagcctcgtgccagcacccgacagccttcgaggaagccatacccaagtccttcatgatcagcgcagacatggcccatgctgtgcatcccaactacctggacaagcatgaggagaaccaccggcctttattccacaagggccccgtgatcaaggtgaacagcaagcaacgctatgcttcaaacgcggtgtcagaggccctgatccgagaggtggccaacaaagtcaaggtccccctgcaggatctcatggtccggaatgacaccccctgtggaaccaccattggacctatcttggcttctcggctggggctgcgggtgctggatttaggcagcccccaactggccatgcactctatccgggagatggcctgcaccacaggagtcctccagaccctcaccctcttcaagggcttctttgagctgttcccttctctaagccataatctcttagtggattgagccctcttggaaagacttctctgccatccctttgcacctgagaggggaagttctcagctgagctgaagctggattattaaagtggattgtcactcagactctccgtggtacgcttatttggagactagaggagtgggagttgagcctggcttgaacctttggaaccagaaaagttggggagcaggtggaggaggccacactcctgggagctgatggttttaaatctggttttaaatttccc

SEQ ID NO: 15898 - DNA, 874 bp, Homo Sapiens
  misc_feature (738)..(746): n is a, c, g, or t
ggggagccgtgcaggctgaaaaaatggcgccacccagtacccgggagcccagggtcctgtcggcgaccagcgcaaccaaatccgacggagagatggtgctgccaggcttcccggacgccgacagctttgtgaagtttgctcttgggtccgtggtggcagtcaccaaggcatctgggggcctaccacagtttggcgatgagtatgatttttaccgaagttttcctggcttccaagcattttgcgaaacacagggagacaggttgcttcagtgcatgagcagagtaatgcagtaccatgggtgtcgcagcaacattaaggatcgaagtaaagtgactgagctggaagacaagtttgatttactagttgatgccaatgatgtaattctggagagagtgggtattttactggatgaagcctcaggtgtaaacaagaatcaacagcctgtcctccctgccggcttgcaggtccccaaaacggtagtgtccagctggaaccgtaaggcagcagaatatggcaaaaaagcaaaatctgaaactttccggctgcttcatgcaaaaaatatcatccgacctcagctcaagtttcgagagaagattgacaattccacacaccaatttcttcctaaaatcttcatcaaaaccaaatgctcaagaaacctcttccctcaaggctctcttctaaggaaagggcggggaacggccccccaggatcggtccctgggaggactttgggacggtnnnnnnnnntggcaccttggcgctggatttttcctttcccttcacacccagagaaaacccccggccagggtttggaggcaaagaacatggtttttggcaacattcccctttttattcaaatattggaaaaccttaac

SEQ ID NO: 15899 - DNA, 425 bp, Homo Sapiens
tgcggccgcgggcgactcctggtacccccgaggccccgcgaactcaccttcacaaagctgtcggcgtccgggaagcctggcagcaccatctctccgtcggatttggttgcgctggtcgccgacaggaccctgggctcccgggtaagctcctgaagaaagcgtctagctccaactgtgcttcctccctccagtaccctctgaactcctccaagcagacgttgtttcctgcagacatcgctggaaccattctggttaacacagagtgggaactcagtacacatttgtgaagtgaactcctggaagagctcttgtgagggaggcaccgaattatcaggcagctcaagagatagattcactctcctgaaattagagatgggatgcccttaatacaattcattccacccattaagtcttcaataaatgtt

SEQ ID NO: 15900 - DNA, 947 bp, Homo Sapiens
ggcgggaggcgctgtaccctcccggtggagtcgggagggagggaggcagggaaggggacagggggctgcacctgtaataagcccttgtccccatgcagtctagcaggaaaggagacggagctttccccgaagacccggcctggaccagccccacgctcctgtgctggtgaggccgagggagagggatgtgggcataggacacgtagcaggatttccattttagaggcagccggacctgtcttcaggtcccttccttggtgagagacaggggtacgccagaggaagctgggcgctcggcctctgtgcagcctcatctcctggaatctgagtattgaaaactgggcttttacttcgcacacctcagcacagactcccatgggaatccaggtcacagcaaagcagccctgggcctccattctcctttaagcaagcatgacaatcctcacttcactgagtttttattaaaactagcaatgaccttagaaagcaaggcatgacctcagctccacttttgaggctgcagtccattcagagaggtttcgcagactcggtaacggccagaacagacagcctgggccctgccgcaggctgactcagaatctttgggagtagtgaccaacttctgcttttggaaaaacctctacaggcggttctgagaagtccaagggttgctgggagaggttgcaggttgcacgccagggcctgtactgaccacctccacgtgccactggggctgtaaggaggaatggcggccgtgggcagcctgcttgggtaagcatggacttttaggtcccctggggattactgtcaggggccacccccaggaacccctctcttcagcaggaaaccgcattctaatcctccctagtccttgctattgtccactgttccctgtgctggaagctttgtgccctgctcaggctggaagcttcttcctggctaggggc

SEQ ID NO: 15901 - DNA, 1061 bp, Homo Sapiens
  misc_feature (994)..(1002): n is a, c, g, or t
aaccttaggctaggtacgaggctgggtgtcgaattcggcacgaggagatggcgggaggggtgcgcccgctgaggggcctccgcgccttgtgtcgcgtgctgctcttcctctcgcagttctgcattctgtcgggcggtgagcaatcgcaggcgctggctcagtcaataaaggatccgggcccaacacgcacattcacagtagttcccagggcagcagaaagtactgaaatcccaccttatgtgatgaagtgtccgagcaatggtttgtgtagcaggcttcctgcagactgtatagactgcacaacaaatttctcctgtacctatgggaagcctgtcacttttgactgtgcagtgaaaccatctgttacctgtgttgatcaagacttcaaatcccaaaagaacttcatcattaacatgacttgcagattttgctggcagcttcctgaaacagattacgagtgtaccaactccaccagctgcatgacggtgtcctgtcctcggcagcgctaccctgccaactgcacggtgcgggaccacgtccactgcttgggtaaccgtacttttcccaaaatgctatattgcaattggactggaggctataagtggtctacggctctggctctaagcatcaccctcggtgggtttggagcagaccgtttctacctgggccagtggcgggaaagcctcggcaagctcttcagcttcggtggcctgggaatatggacgctgatagacgtcctgctcattggagttggctatgttggaccagcagatggctctttgtacatttagctgtggtgtgtgcttcagaaaggagcagggcttagaaaaagcccttatgtccgtaggagttgatgtggtgtgagtgaaatatttctaagtttttaatggacagcatctgtacttttgttgcctttgataaaggtaacataaatgaaacgctgaactatgctaaatctgggaatattggttttaatttggcctggaaaaataannnnnnnnnctggggaaaaagatttaaaacggtaactttaaaccccggggaagattggaatttatact

SEQ ID NO: 15902 - DNA, 1148 bp, Homo Sapiens
ggcgctggcaagatggcgggaggggtgcgcccgctgaggggcctccgcgccttgtgtcgcgtgctgctcttcctctcgcagttctgcattctgtcgggcggtgaaagtactgaaatcccaccttatgtgatgaagtgtccgagcaatggtttgtgtagcaggcttcctgcagactgtatagactgcacaacaaatttctcctgtacctatgggaagcctgtcacttttgactgtgcagtgaaaccatctgttacctgtgttgatcaagacttcaaatcccaaaagaacttcatcattaacatgacttgcagattttgctggcagcttcctgaaacagattacgagtgtaccaactccaccagctgcatgacggtgtcctgtcctcggcagcgctaccctgccaactgcacggtgcgggaccacgtccactgcttgggtaaccgtacttttcccaaaatgctatattgcaattggactggaggctataagtggtctacggctctggctctaagcatcaccctcggtgggtttggagcagaccgtttctacctgggccagtggcgggaaggcctcggcaagctcttcagcttcggtggcctgggaatatggacgctgatagacgtcctgctcattggagttggctatgttggaccagcagatggctctttgtacatttagctgtggtgtgtgcttcagaaaggagcagggcttagaaaaagccctttgtccgtaggagttgatgtggtgtgagtgatatatctctatgtttttaatgtacagcatctgtactttgtttgccttgataaaggtaagataaatgaaacgctgaactatgctaatctggaattggtgtttacttgcctgaaatatattttttttctgtgaaaaaattaaaacgtacctaaagccaggagaatgaattatacagtggattgaaaatcccatttaattcctatgaacttttgttttggaattggcccaagtcaaactacatcaccttggattctccagccccaattaaaagtctggccctggaaaaggccttttcacctgggaacttgccggaaaaggggaaatggtttttaattggttaaccaaatttgctcgggacttcccgagagaaaagggggaggggctttctggtggga

SEQ ID NO: 15903 - DNA, 567 bp, Homo Sapiens
  misc_feature (259)..(259): n is a, c, g, or t
ggaagtggtcctggtggcatccgaacggtaataatacgccagcatgagattgtcctgaaggtggcttatccacaggcagacagcaacctccgaaacatcgtgaccgagcagctggtagccctgatcgattgcttcctggatggttatgtttctcagcttaagtctgtggataaatccggtaatcgggaaagatatgacaatctggagatggaatacctacagaaaagatcagatctcttatctcctcttctttcactangccagtacctgtgggctgcttctctagcagagaaatactgtgactttgatatattggtacaaatgtgtgagcagactgacaaccagagccgactccagcgctacatgacccagtttgctgatcagaatttttcagactttctcttccgttggtagggtgtttgatatctgtttcagttagggctaatgggaaatgtctagtaagataaatgtcaacttttgctgacttattatgagatgaaaaaccaaaggagagtgggcctaactcatgtgagcttgataactgatgaactcattgggagcatttta

SEQ ID NO: 15904 - DNA, 1056 bp, Homo Sapiens
agctgctggcggagaaacagctaaatgtcagtgcgatgccagtattgactgcaccactactcattggtctatatatctgtgaagtaaatagaagagtctaatgaatatgatttcaagaaagcgttggacttgttggaatatattgatgaggaagaagagataaatataaatgatctaaaactggaaatcctttgcaaagctcttcagagagataactggtccagttctgatggcaaagatgatccaattgaagtatctaaagacagtatatttgtgaagatcttacagaaacttttaaaagatggcattcagctcagtgagtacttaccggaggtgaaagacctgctacaagcggatcagcttggaagcttaaagtccaatccttacttcgagtttgttttgaaagcaaattatgaatattatgttcagggacaaatataactttttctaaaaatggccattgtttatgaaatctgtataagtgtgtccttatacaaattttaggccataaacaagtgtaagtttgtacaatttcataacatgtatagctgagtttttatactttatatgtaggaagctaatataaaatagttatgtaactgtgattttggttttcagttatgtgacttgttttttccacctgaaatgtgtcagttgttgttcctgtactcggtgccctttctttttactctcacgtggtcccaggttctggagttcttgtcctggttctagctgctcacatgtacaaatcacttctaggcctcagtttctgcgactatgaaaattactagattgcactagcttgtctctaaaattgctgtgactccagatactttgcactgaagagaatctagggtgtttgatatctgtttcagttagggctaatgggaaatgtctagtaagataaatgtcaacttttgctgacttattatgagatgaaaaaccaaaggagagtgggcctaactcatgtgagcttgataactgatgaactcattgggagcattttaaacttttctacataaataataaatgagcactaatgaaagtattttagtg

SEQ ID NO: 15905 - DNA, 904 bp, Homo Sapiens
ggggcttcccattgggtagggccgggaaacacgataaaggggacatgccgggagttgcagtaccctcaggaaggtagcgtcttgatctgcgtggcgtggttctgtgccttgggaagagatgaatgggaagcggccagcggagcccggcccagcccgggtgggaaaaaagggaaagaaggaggtgatggcggagttttcggacgctgttacggaagaaaccttgaaaaagcaggtggctgaggcctggagccgcaggacgccgttcagtcacgaagtcattgtcatggacatggacccttttcttcactgtgtgatcccaaacttcatccaaagccaagacttcttagaagggcttcagaaggaactgatgaacttggacttccatgagaagtataatgatttatataagttccagcagtctgatgatttgaagaagagaagagagcctcacatctccactttaaggaaaattctgtttgaagatttccggtcctggctttctgatatttctaaaattgacctggaatcaaccattgacatgtcctgtgctaaatatgaattcactgatgccctgctgtgccatgatgatgagctggaagggcgccggattgccttcatcctgtacctggttcctccctgggacaggagcatgggtggtaccctggacctgtacagcattgatgaacactttcagccgaagcagattgtcaagtctcttatcccttcgtggaacaaactggttttctttgaagtatctcctgtgtcctttcaccaggtgtctgaagtgctgtctgaagaaaagtcacgtttgtctataagtggctggtttcatggtccatcattgactcggcctcccaactactttgaacccccactctgacctgttattaaagttcacattttg

SEQ ID NO: 15906 - DNA, 833 bp, Homo Sapiens
tgtgtcctttcaccaggtgtttctgaagtgctgttctgaagaaaagtcacgtttgtctataagtggctggtttcatggtccatcattgactcggcctcccaactactttgaaccccccatacctcggagccctcacatcccacaagatcatgagattttgtatgattggatcaaccctacttatctggacatcgattaccaagttcaaattcaagaagagtttgaagaaagttctgaaattctcctgaaggagtttcttaagcctgagaaattcacgaaagtctgtgaggccttggagcatggacatgtggaatggagcagccgaggtccccctaacaaaaggttttatgagaaagctgaggagagtaagcttcctgagatattgaaggagtgcatgaagttatttcgctctgaggcactattcttgctgctctccaacttcacaggcctgaagcttcatttcttggccccttcggaagaagatgagatgaatgataaaaaagaggcagaaaccactgatatcactgaagaagggactagccatagtcctcctgagccagagaataatcagatggccatcagcaacacagcccacagagcaatgagcagacagacccagagccagagggaaattgaaacaaagaaagatcaagtgttcccatgtgcccaaggggactgaggaatgggaagaccggtccctacacttttatttcttgaccatagcaaggttggaatttggccctaaactttaattccgtaaccgggggcttgggaaagggttggaaaaccccaaaattgggggttttttccttcttaattttgcccaagagggg

SEQ ID NO: 15907 - DNA, 1033 bp, Homo Sapiens
  misc_feature (146)..(146): n is a, c, g, or t
  misc_feature (158)..(159): n is a, c, g, or t
  misc_feature (166)..(171): n is a, c, g, or t
tttagtccacggcgcccaggttctcccttaggaaaaccaggctatgggccaggtttcccttacccctactggggcccgcggcgcccaaacggaatggtttaaggaaagcttctccgagggcccgaaggcggccggacatggtcttntttctctcctcnncctcccnnnnnngttttttaataaaataatctcatgcggcaggagaggagaggatcagggattggggcccccgcctctttggtctgtggctggggagggtgggctccgctcagggctggagggctctgtgggctgtgggggcagaggctcggttccaaggccagatcctaggcttggggatggaggtgcctcgagttttggcctgcgtttgaggacgggggagcgctgcagcctcaggggccgttcttcatttctggggcccaagcaagggtcctctgggaggcccaggctgtctggggaggggctggttctgcagggacttgggctttgaccaggggagggagggcctggaccatcctgttggccccaaccacggctcctgagctccgcattcaactgctgccccagtgtcttccaggtggcagactcaggcccctggctccctgggccaggtctgcaggaagggtcagcagacacagagtgggtgcgggacttgatcgagatgggaggggcctccgtggaactgtccataatgtcaccatctgagccagctttcttgatctcgccatctttgctttgcttcctcttgccttcggcacccccgctgcctcggctgacgcctatcctctgcagcattacttgtacccgctgttcaaaggatggagccagttctgtttctccccgctccaggggccgccgcttgtcgggtctggcacccagcgttgcctcctcctcggcaggcagcagtatcatcgagtaggccttgctatctcttgtgtagcgaggtcggctcctgccggcagggtcagggctgctggtgtccccctcagccccaccaagctcctcaccacggctgggacgggttggcggccgc

SEQ ID NO: 15908 - DNA, 450 bp, Homo Sapiens
gggtttgacagcaagcccttccaactagcactggctccacttcccgaagagcagcctctgccaggggtgaggacgcagggacgggggatgctctgaaggcagcagtgtgtgtgagtgcatgcttatgtgcactggaggtggaagagaggggcaggggatggacagaccccaagccttagcaacccaccccaagcctttctgtgtcccttagaacggcccctgaggctgcagcgctcccccgtcctcaaacgcaggccaaaactcgaggcacctccatccccaagcctaggatctggccttggaaccgagcctctgcccccacagcccacagagccctccagccctgagcggagcccaccctccccagccacagaccaaagaggcggcggccccaatccctgatcctctcctctcctgccgcatgagattattttattaaaaaaatcaaag

SEQ ID NO: 15909 - DNA, 842 bp, Homo Sapiens
  misc_feature (597)..(597): n is a, c, g, or t
  misc_feature (600)..(600): n is a, c, g, or t
  misc_feature (604)..(604): n is a, c, g, or t
gggagaaaaaattgctcagcttttcagcatttccccttgccagatcagccagatttacaagcaggggccaacaggaattcatgtgctcatcagtgatgagatgatacagaactttcaggaagaagcatgttttattctggacacaatgaaagcagaaaccaatgatagctatcatatcatactgaagtaggagtgcggcgtttcatgcccagtggctgctccttccttcacctctgaaaacggccctcttgaagggggatatgaatggagatttgaaggtctgcaagaacctgactcgtctgactgtgtgtggaggagtccaggccatggaggcagaatcctggccctctgtgttggcccaagctcttgtggtacacacagattactgcccaatatgcagttctgcagctgttttagttaaatttctggaccttgttgttgttaaatatcagtagaaactctacataatttagagtgtatgtagggcataatgatgatgggaattgtgtgatgtttaacaggaagatcttaaattttgtgatatggagccctgtaatttttttcttatataaaaatgggtatctatatttcaaaaanaanaaantaaagaagggaattgtccgtggtgggccgccctcgggccctccaaaaagctttctaaaaccattccgtttgggggcggggggccccgtagggaaagtggaaattgggccaaaggttgtttccccaaggaaaaacccggcgccaagaaacaaggggtttggaattcccccccacataaaaaaacgcccgcggggggaaaccgcaggggttttttgagaaaaaatcccgagaggggggcc

SEQ ID NO: 15910 - DNA, 752 bp, Homo Sapiens
tttttttatgaatatagatacccatttttatataagaaaaaaattacagggctccatatcacaaaatttaagatcttcctgttaaacatcacacaattcccatcatcattatgccctacatacactctaaattatgtagagtttctactgatatttaacaacaacaaggtccagaaatttaactaaaacagctgcagaactgcatattgggcagtaatctgtgtgtaccacaagagcttgggccaacacagagggccaggattctagttaatttcaataaatctgcccctgagaagttagtgaaaagccttgtgaatgtagaaaaacgatttcgatgcaaccactgctgagcttcctgaggtgtggttgttggtaagaggttatctgtgactggagggggtggctctggctggtggtttggtgaaccatttccttccccaagagaaaaactgctatgggaactgttgaagccaggtgatggggagttattgacatacgtgatctcgggccatggagaacactctgtgagtatggttgtctcataggaaggctgatatttctccttttcatgaggtgttcgtttcttccattttttcactatccgttgtgtgctttctgtctgcacctttgggcttgtttactttgatctggcagctggccgtgtgtcagcgctcagtatatacccgttttcattctcataagaagctatcgagtttgtacctcggaatgcacaaccatttttccccatgtaa

SEQ ID NO: 15911 - DNA, 1325 bp, Homo Sapiens
gacaatagctgcaaagaatactctgggatccttccgctgccgacccaagctacagtgcaagagtggctttatacaagatgctctaggcaactgtattgatatcaatgagtgtttgagtatcagtgccccgtgccctatcgggcatacatgcatcaacacagagggctcctacacgtgccagaagaacgtgcccaactgtggccgtggctaccatctcaacgaggagggaacgcgctgtgttgatgtggacgagtgcgcgccacctgctgagccctgtgggaagggacatcgctgcgtgaactctcccggcagtttccgctgcgaatgcaagacgggttactattttgacggcatcagcaggatgtgtgtcgatgtcaacgagtgccagcgctaccccgggcgcctgtgtggccacaagtgcgagaacacgctgggctcctacctctgcagctgttccgtgggcttccggctctctgtggatggcaggtcatgtgaagacatcaatgagtgcagcagcagcccctgtagccaggagtgtgccaacgtctacggctcctaccagtgttactgccggcgaggctaccagctcagcgatgtggatggagtcacctgtgaagacatcgacgagtgcgccctgcccaccgggggccacatctgctcctaccgctgcatcaacatccctggaagcttccagtgcagctgcccctcgtctggctacaggctggcccccaatggccgcaactgccaagacattgatgagtgtgtgactggcatccacaactgctccatcaacgagacctgcttcaacatccagggcggcttccgctgcctggccttcgagtgccctgagaactaccgccgctccgcagccacccgctgtgagcgcttgccttgccatgagaatcgggagtgctccaagctgcctctgagaataacctactaccacctctctttccccaccaacatccaagcgcccgcggtggttttccgcatgggcccctccagtgctgtccccggggacagcatgcagctggccatcaccggcggcaatgaggagggctttttcaccacccggaaggtgagcccccacagtggggtggtggccctcaccaagcctgtccccgagcccagggacttgctcctgaccgtcaagatggatctctctcgccacggcaccgtcagctcctttgtggccaagcttttcatctttgtgtctgcagagctctgagcactcgcttcgcgtcgcggggtctccctcctgttgctttcctaaccctgccctccggggcgttaataaagtcttagcaagcgtcccccccagtgag

SEQ ID NO: 15912 - DNA, 1135 bp, Homo Sapiens
ccctgtagccaggagtgtgccgacgtctacggctcctaccagtgttactgccggcgaggctaccagctcagcgatgtggatggagtcacctgtgaagacatcgacgagtgcgccctgcccaccgggggccacatctgctcctaccgctgcatcaacatccctggaagcttccagtgcagctgcccctcgtctggctacaggctggcccccaatggccgcaactgccaagacattgatgagtgtgtgactggcatccacaactgctccatcaacgagacctgcttcaacatccagggcggcttccgctgcctggccttcgagtgccctgagaactaccgccgctccgcagccacgctccagcaggagaagacagacacggtccgctgcatcaagtcctgccgccccaacgatgtcacatgcgtgttcgaccccgtgcacaccatctcccacaccgtcatctcgctgcctaccttccgcgagttcacccgccctgaagagatcatcttcctccgggcccatcacggccaccgcatcctgccagccaggctaacatcatcttcaacatcacggaaaggaacctggcgggactctttttgacatcatcaagcgttacatggacggcatgaccgtgggtgtcgtgcgccaggtgcggcccatcgtgggcccatttcatgccgtcctgaagctggagatgaactatgtggtcgggggcgtggtctcccaccgaaatgttgtcaacgtccacatcttcgtctctgagtactggttctgagggctggtctgccgcacagccgcaggtgcacctccaggccaaatcattgctgccagtgactgtggtctgtacttgtatataccctcagacttaattaatgttaggtatttgtagcattaggccaacatgtattaagctgagccagatgaataagtccatctgatgtatttccggtgtttaaaaaatgagcccagttgctcaactgtttggttgaaaaccttgctcattttttaatgcgaaggctaagtgtcaccccctttctctgcctctggctgggccttgctaaagggccaaggaaagaaagacattttttagggggccagccagtccaaatgccaaaagaagaccagttcttgccctgat

SEQ ID NO: 15913 - DNA, 354 bp, Homo Sapiens
  misc_feature (15)..(15): n is a, c, g, or t
  misc_feature (147)..(187): n is a, c, g, or t
ctagaggatcccggnacttcctttcacagcgaccgttttatatatagcagagaataatgaagagattgctagtctagatggggcaatcttcaaattacaccaagacgcacagtggtttatttaccctcccctcctcataagaacttnnnnnnnnnnnnnnnnnnnnnnnnnnnnnnnnnnnnnnnnntttgaggaaccccttccaaacagtacacagttattaagttcagtgtcaataattcacatcttgcacaaagtgtatggacatgatttcttttacaaactttcagtgtcaaaaagaaacttaatggccattcagacttgcagcttaaaaattcacataaggatccgctt

SEQ ID NO: 15914 - DNA, 821 bp, Homo Sapiens
ggggctggaccccggggtcagtaggaagccgcggggtggtggcgagagaggacccaggtgtcctggcagtgggcgccgcggggcacacgctgggccaaggtgcaggcggccagggtgggagactgttcgccccgccctgagtactcctatcttgtttctccacctgttcgggagttggagatgtgcacctaaaggaggcgcatctggggacggacacatctggcactgaggccctcgccacctgcctcgccacctggcgaccctgaccccaccacactgccttgagagtcgctcaaaagtagggccccagggctcgcagcagcatgggcaccgagaaagaaagcccagagcccgactgccagaaacagttccaggctgcagtgagcgtcatccagaacctgcccaagaacggttcttaccgcccctcctatgaagagatgctgcgattctacagttactacaagcaggccaccatggggccctgcctggtcccccggcccgggttctgggaccccattggacgatataagtgggacgcctggaacagtctgggcaagatgagcagggcaggaggccatgtctgcctacatcactgaaatgaaactggtggcacagaaggtgatcgacacagtgcccctgggtgaggtggcagaggacatgtttggttacttccagcccctgtaccagggtgatccctgacatgcccgaggcccccagaagaccttcctggaaaagggtcacaggttggaaaagagcaagttgtgaatggagatgtcggggctgtttcagagcctccctgtctccccaaggaaaccggaccc

SEQ ID NO: 15915 - DNA, 662 bp, Homo Sapiens
cggggcccgcgctgctcttcgttcctcctgtggcccttcgtcgtccagtggctcttccgaatgtttctggaccctaaaagaggtgactgtcaggtggatgggtgtctcatgcagccagactgagactatcttgctgtgcccatgagctcttccgtagggtttagaagaacagcatgtcaaaagtccccgtcctgtcagtgttcgccttcgcacctcctcccctaaagcagcgcggggggcaaataagaccccacccctcccgtgcagcttcacagggacgctgtccttccgctccccgcaaccaccccaggctcccctgggaggctgcagttgtggtacacagtccccggtagctgggttggccagtgactcgggggcaggggcgatcgggtctcagcccctgccttccccagtctctgggtcaccgcgaattttcccacccctgcttctccccgaggaggttgagctcttgagcaagttgggacttgggccggggcctggaagaatgattggctgggaggccgcgggagggaggccaggaggcccggaccagttgggaggagtgagcaggccccgggggagggggatgagcgcagtttgctcgctttcctccctgccggcccctccgccccaaaacaccacggggacgtcttcactttgga

SEQ ID NO: 15916 - DNA, 724 bp, Homo Sapiens
ggggcggtgttctagcaggtggctgctttctctgggctggctgtgggaggctcccgaggtggggacccggccgggatggctgcagcggcggccggggcgtgggagcgggccctcggcggcccaggagaagcagttcctgccggcgctgctgagtttcttcatctacaacccgcgcttctggccgcgggaaggagaggttgttcggaatccctataattgaaaaacagtaaagatggaaaaccagctattgaatatcaagaggaggagttgcggggacaaggcttatagctcggtgctgcagcagtgctacagcatgtacaagaagtctcaggggatccagaactgcagccagtccttgctgggctgttcctgtccatgtgcctggtcacggtgctggggaacctgctcatcatcctggccatcagccctgactcccacctccacacccccatgtacttcttcctctccaacctgtccttgcctgacatcggtttcacctccaccacggtccccaagatgattgtggacatccagtctcacagcagagtcatctcctatgcaggctgcctgactcagatgtctctctttgccatttttggaggcatggaagagagacatgctcctgagtgtgatggcctatgactggtttgtagccatctgtcacccgctatatcattcagccatcatgaacccatgtttctgtgcttcctagtgctgtgtggga

SEQ ID NO: 15917 - DNA, 651 bp, Homo Sapiens
ttcccctggtacgggagtgggcctgggtggcccaggagaagcagttcccgccggcgctgctgagtttcttcatctacaacccgcgcttcgggccgcgcgaaggacaggaggaaaataagattttattttatcatccaaatgaggtagaaaagaatgagaagattagaaatgtcggattgtgtgaagctattgtacagtttacaaggacatttagcccatcaaaacctgcaaaatctttacatacacagaagaacagacagttcttcaatgaaccagaagaaaatttctggatggtcatggttgttcggaatcctataattgaaaaacagagtaaagatggaaaaccagttattgaatatcaagaggaggagttgttggacaaggtttatagctcggtgctgcggcagtgctacagcatgtacaagctttttaatggtacatttctgaaagccatggaagacggaggcgtcaagcttctgaaagaaagattagagaaattcttccatcggtatttgcaaacgctacatttgcagtcatgtgacctacttgacatttttggtggaatcagcttcttcccggtggataaaatgacttatttgaaaatccagtctttattaatagatggagaaagcctgatattgtcaatacacg

SEQ ID NO: 15918 - DNA, 878 bp, Homo Sapiens
  misc_feature (273)..(297): n is a, c, g, or t
  misc_feature (300)..(459): n is a, c, g, or t
gaggcaccaacgaggagcagtgtcagagtggattggaggctctgcgttcgggccaagcctacgagttcatgcggagaagcctcatcttctacaggaaacgaaatccggaaggtgacggggcaaggaccccggggaacagttcggcatatccgaggaggccaggttccagcctgagtggcttgcaggcgtgagcgcagggcacggtggtcagcgtgcagcgggacgggactggccctgcccagccatgaatcgcttggccatgcctggatctgnnnnnnnnnnnnnnnnnnnnnnnnngtnnnnnnnnnnnnnnnnnnnnnnnnnnnnnnnnnnnnnnnnnnnnnnnnnnnnnnnnnnnnnnnnnnnnnnnnnnnnnnnnnnnnnnnnnnnnnnnnnnnnnnnnnnnnnnnnnnnnnnnnnnnnnnnnnnnnnnnnnnnnnnnnnnnnnnnnnnnnnnnngggaggtttttggtttggagacatccaaagcctgaagccaggtgggtgtgggcaggggctgcattttatgaaactgcccagcaagctgcgctccctggggccccaggatccacctaactggcctggcacctggtgccacgtgctgctgccgccaggatatgcgccttcccacaggtgccctgcctgagttgtgtgcatccaggggcctggtgagcccccaggctggtggcatggcccccctgccccgtgctgaatgaatgtacagagccagacaaagctgtgaatggcctaggggctgagtcccacaccagctgtgaattctcctgcagacaggagggccctggctgtgcacctggggaagtggttgccctggggccagggtgcttgttctgttcaaataaaggtacctcttttccaca

SEQ ID NO: 15919 - DNA, 740 bp, Homo Sapiens
  misc_feature (132)..(133): n is a, c, g, or t
  misc_feature (135)..(135): n is a, c, g, or t
  misc_feature (427)..(437): n is a, c, g, or t
gagtttctttctgaagtgctctttgattaccttttctatttttatgattagatgctttgtattaaattgcttctcaatgatgcattttaatcttttataatgaagtaaaagttgtgtctataattaaaaaannantataaatatatacacaccacacatatacatacaaagtcaaactgaagaccaaatcttagcaggtaaaagcaatattcttatacatttcataataaaattagctctatgtattttctactgcacctgagcaggcaggtcccagatttcttaaggctttgtttgaccatgtgtctagttacttgctgaaaagtgaatatattttccagcatgtcttgacaacctgtactcttccaatgtcatttatcagttgtaaaatatatcagattgtgtcctcttctggacaattgacccnnnnnnnnnnnttttgttttctcactctaaaagaggtgtggctcacatcaagattcttcctgatattttacctcatgctgtacaaagccttaatgttgtaatcatatcttacgtgttgaagacctgactggagaaactaaatgtgcaataacgtgaattttatcttagagatctgtgcagcctatttctgtcacaaaagttatattgtctaataagagaagtcttaatggcctctgtgaataatgtaactccagttacacggtgacttttaatagcatacagtgatttgatgaaaggacgtcaaacgataaata

SEQ ID NO: 15920 - DNA, 1327 bp, Homo Sapiens
  misc_feature (102)..(102): n is a, c, g, or t
  misc_feature (804)..(816): n is a, c, g, or t
  misc_feature (1140)..(1150): n is a, c, g, or t
aacaagcaccctggccccagggcaaccacttccccaggtgcacagccagggccctcctgtctgcaggagaattcacagctggtgtgggactcagcccctagnccattcaaagccttaatgttgtaatcatatcttacgtgttgaagacctgactggagaaacaaaatgtgcaataacgtgaattttatcttagagatctgtgcagcctatttctgtcacaaaagttatattgtctaataagagaagtcttaatggcctctgtgaataatgtaactccagttacacggtgacttttaatagcatacagtgatttgatgaaaggacgtcaaacaatgtggcgatgtcgtggaaagttatctttcccgctctttgctgtgatcattgtgtcttgcagaaaggatggccctgatgcagcagcagcgccagctgtaataaaaaataattcacactatcagactagcaaggcactagaactggaaaagaccacagaaaacaaagaatccaaccctttcatcttacaggtgaacaaactgtgatgatgcacatgtatgtgttttgtaagctgtgagcaccgtaacaaaatgtaaatttgccattattaggaagtgctggtggcagtgaagaagcacccaggccacttgactcccagtctggtgccctgtctacaccagacaacacaggagctgggtcagattcccctcagctgcttaacaaagttcctcgaacagaaagtgcttacaaagctgccttctcggatactgaaaggtcgagttttctgaactgcactgattttattgcagttgnnnnnnnnnnnnngctattccaaagatttcaagctgttctgagacatcttctgatggctttacttcctgagaggcaatgtttttactttatgcataattcattgttgccaaggaataaagtgaagaaacagcaccttttaatatataggtctctctggaagagacctaaattagaaagagaaaactgtgacaattttcatattctcattcttaaaaaacactaatcttaactaacaaaagttcttttgagaataagttacacacaatggccacagcagtttgtctttaatagtatagtgcctatactcatgtaatcggttactcactactgcctttnnnnnnnnnnnccagcatatttattgaaaacatgagacaggattatagtgccttaaccgatatattttgtgacttaaaaaatacatttaaaactgctcttctgctctagtaccatgcttagtgcaaatgattatttctatgtacaactgatgcttgttcttattttaataaatttatcagagtgaaaa

SEQ ID NO: 15921 - DNA, 780 bp, Homo Sapiens
gggtggttgggggccgctgagggcagcacggagcctggggacctgggttcctggctcagggagagctgtggcttctcatgggcctcgcaggcgtgtactgttaccgtgtcaaccggcgcctgttcccggtgcctgtggatcccggtaccccctgccgcctgtgcaggacaccgcgagaccagcagggccctgggaccctggcgcagccagcgcacgtcagggtgagcatcccgctgtcgatcctggagcccccgcaccggtaccacatccaccggcgaaagagctttgacgcctctgacacactggccctgccccggcactgcctgctgggctgggacatttttcctccgaagtctgagaaaagctcagcccccaggaacctggacctctggtcctctgtctccgctgaggcccagcaccagaagctgtccggcaccagcagcccttttcacccggcctcaccaatgcagatgctgcccccgaccccgacctggtcagtgccccaggtccctcggccccacgtcccacggcagaagccctgaggactgactcctgggggagaacagcattcccgccgcctccagcctctcccctctggcaggcgcacccaggagatggaatcccctgcccgcccagctcaggcccagctgtcctaggttgggcaggtgggtggacccaagcttgtctgctgcctgagttccagagagggaggaccctggggtggagggtgagggattctgtggaagtttgtaaataaagctcagtgtctgcagctcaaaa

SEQ ID NO: 15922 - DNA, 999 bp, Homo Sapiens
gcgcatgctaggggattctgccgtggtagaagagctgggcctggaatcccagccctgaggacatcctgcggcccaggggcaagtgacacctgctgagagagtgcccaggatggtggaggctgaggaactggcacagctgcggctgctcaatctggagctcctgaggcagctgtgggtggggcaggatgctgtgcggcggtcagtggccagggcagcctcggagtcaagcctggaatccagcagcagctacaactcagagactccatcgaccccagagacgtcctcaacttccttgagcacctcctgcccacggggccggtcctccgtgtggggcccaccagatgcctgtcgaggggacctccgtgatgtggccagatcgggggtggcctctctcccacctgccaaatgccagcaccaggagtccctgggccgaccgagaccccactcagcaccctcgctgggcacctcaagcctgagggacccagagccctcagggaggctgggtgatccaggaccccaggaggcacagacccccgaggtccatcctggctcaacagagcaagctgtccaagcccagggtgacccttctctgaggagtctgcagttccctgagaggagctggcgcctcaggccatacctgggctatgaactgggattgcaggctctctggacaccagctcttccatcaccagccagcctgaagccttcttctccaagctggcagggagtttcgggaaacccaacaagggaggagtgtatctgcagcccatcctgaaacccagttgccagggcctgcgttgagagcagtggcagcggcgttgaaggaagactcgtgaatgcgttgtcctgttaccgtgttcaccgggcgccttgtcccggtgcctggtgatccccggtaccccctgcggctgtgcaggacccgggagaacagcggggcctggacctggccagccacgccgttaggggagctccgtgtgacctgaccccgccgtcattccg

SEQ ID NO: 15923 - DNA, 1313 bp, Homo Sapiens
  misc_feature (568)..(568): n is a, c, g, or t
gggcacttcctcctggctacagcttcagaaacagggtttctaacctacctggatgtgtcagtggggaagattgtggcagctctgaatgctcgagctgggcggctcgatgttatgagtcagaacccttacaatgccgtcatccatctcggacacagcaatggtactgcgtctttatggagtccagctatgaaggagccactggcaaagattctctgtcatcgtggtggggtccgggctgtggcagtagattctacaggcacgtacatggccacctctggcctagaccaccagctgaagatctttgacttgcgagggacgtaccagcctctgagcactcggaccctgccccatggagcagggcacctggccttctcccagaggggactgctggtggcgggaatgggtgacgttgtcaacatctgggcagggcagggcaaggccagcccaccctcccttgaacagcccaacctcacccaccggctctcaggccctgtgcatggccttcagttctgccccttgaaagatgtgctgggggtggggcacactgggggcatcaccagcatgctgngtccctggggccggtgagcccaacttcgatggcctggagagtaatccatacagaagccggaagcaccgccaggagtgggaggtgaaggccctgctagagaaggtacctgcagagcttatttgtctggacccacgagccctggccgaggtggatgtcatctccctggagcagggaaagaaggagcagatagagaggctgggctatgacccgcaggctaaggctcccttccagccaaagccaaagcagaagggccgcagctccacggcaagcctggtgaagaggaagaggaaggtcatggatgaggaacacagggacaaggtccggcagagccttcagcagcagcatcataaggaggcgaaggccaagcccacgggggcccggccatctgccctggacagatttgtgcgctgagccagactccagggttgcctgggaacagtctctccccaagatcacctgtagggaaatgagtgttccctggaacaaggaggtgggggcagtgtggccccttccccaactgggggtggacagctgtctcctggggtgggttggtattaaagaggaaagcgattttttgaaaaaccctcctttttttcacttttcttaacttgttggccgccttcggccctcaaaaagtttttctaaaccttcgtttgggcgcgcgggccccctaggaaattgaacatgggccatctctgtttccccaggaaatcctgggtaaggcataagggccggactcccaccc

SEQ ID NO: 15924 - DNA, 867 bp, Homo Sapiens
cggaatggtacgtttcaacatccgcgcaggcaggaaggccaagcccaccctccctgacagccttacctcacccaccggctctcaggccctgtgcatgccttcagttctgcccctttgaagatgtgctgtgggtgggcacactgggggcatcaccagcatgctggtcctggggccggtgagcccaacttcgatggcctaggagagtaatccatacagaagccggaagcagcgccaggagtgggaggtgaaggccctgctagagaaggtacctgcagagcttatttgtctggacccacgagcctggccgaggtggatgtcatcctccctggagcagggaaagaaggagcagatagagaggctgggctatgacccgcaggctaaggctcccttgccagccaaagccaaagcagaagggccgcagctccaccgcaagcctggtgaagaggaagaggaaggtcatggatgaggaacacagggtaaatgagcattggcatgggccgggccttccacaggctgcaccctcctgcttgtgcctctgcccttgtcagcctgccacttctcactctgtgcctgtgtcctccccgtctccggtccccaggacaaggtcccgcagagccttcagcagcagcatcataaggaggcgaaggccaagcccacgggggcccggccatctgacctggacagatttgtgcgctgagccagactccagggttgcctgggaacagtctctccccaagatcacctgtagggaaatgagtgttccctggaacaaggaggtgggggcagtgtggcccattacccaactgggggtggaaagctatctcctggggtgggttagtatataaaagaggagagcggttatatgag

SEQ ID NO: 15925 - DNA, 814 bp, Homo Sapiens
gggaggtaggagcgatgtggcctgggaacgcctggcgcgccgcactcttctgggtgccccgcggccgccgcgcacagtcagcgctggcccagctgcgtggcattctggagggggagctggaaggcatccgcggagctggcacttggaagagtgagcgggtcatcacgtcccgtcaggggccgcacatccgcgtggacggcgtctccggaggaatccttaacttctgtgccaacaactacctgggcctgagcagccaccctgaggtgatccaggcaggtctgcaggctctggaggagtttggagctggcctcagctctgtccgctttatctgtggaacccagagcatccacaagaatctagaagcaaaaatagcccgcttccaccagcgggaggatgccatcctctatcccagctgttatgacgccaacgccggcctctttgaggccctgctgaccccagaggacgcagtcctgtcggacgagctgaaccatgcctccatcatcgacggcatccggctgtgcaaggcccacaagtaccgctatcgccacctggacatggccgacctagaagccaagctgcaggaggcccagaagcatcggctgcgcctggtgggcactgatggggccttttccatggatggcgacatcgcacccctgcaggagatctgctgcctcgcctctaaatatggtgccctggtcttccatggatgaatgccatgccactgggcttcctgggggcccaccaggacgggggcacagaatgaaactgggctggggggttgatggaaccaggggtcaccattcttcaactccca

SEQ ID NO: 15926 - DNA, 666 bp, Homo Sapiens
  misc_feature (14)..(14): n is a, c, g, or t
ctcaaatccacccntgggaaaggcctgggtggaagcacagagggctacacgacagggcctgggcccctggtgtccctgttgcggcagcgcgcccggccatacctcttctccaacagtctgccacttgctgtcgttggctgcgcctccaaggccctagatctgctgatggggagtaacaccattgtccagtctatggctgccaagacccagaggttccgtagtaagatggaagctgctggcttcactatctcgggagccagtcaccccatctgccctgtgatgctgggtgatgcccggctggcctctcgcatggcggatgacatgctgaagagaggcatctttgtcatcgggttcagctaccccgtggtccccaagggcaaggcccggatccgggtacagatctcagcagtgcatagcgaggaagacattgaccgctgcgtggaggccttcgtggaagtggggcgactgcacggggcactgccctgagctctgggtaaggacgagaagagccaaggtccgcctactgccacagggtcaaaggaggttttcgatcagcccagaccagaggctctgagccctgaaccaaagtcccagagctgggctgggacgtgacctgtgctgagggctgtgagaatgtgaaacaacagtgtgaaaattggctgtgaa

SEQ ID NO: 15927 - DNA, 1034 bp, Homo Sapiens
gggacagctctttgggcgttgattctagggtcagggccctcactcacactgctggaaggttaaagtcgacttcacgctagtttaaggaaatatctgacgctgataaccatgtcccaagcactgctctaagttcccaatgtgtccggaattggtgggttcttggtctcactgacttcaagaatgaagccacggaccctcgcgttttagactatgctaaaaacagcctcaagaccttcagcactgatcaacaatcctgggcatgggctgaccgacagttttcacccagagagtgaagatcatggaggagccatcttaaattccgcccagcgcaggctcccaggaatcctaatgtcaccgatctcaatgcagccaatgtgacaacccccgccattaattacgccccagagagctaaacacaccctccaaaagaattgtctccttggtatgagccggaatggcaataaaaatacatgggaaaccccacaccacccgcccccccagggaggggtggcgtgacgcacgtcaggccgacgcccccgtgtccttattcctgccccgcacggcccgcccccggatactcctggcccctggacccgcggggcggttgtcagttttatccccactctgacgaaataaaccggctgtgtgcgcgcgaaatctccgcgcggacctacaatgacagcgcccaccaccgcgggtatatatgccacactagggccgagcaccagacaacaattgcgcgagtgtaaaaagacttagattttttcttcgtggtatacgccgccacctttgagtgcaggtggcacctcgaaagcgaccatccgaagaacccgacccctccgagaacaataacatactcacccgcccgcgggtcgtgcctcctatcacactccgcccgagcggagacggaacctctcagtacatgcgcgtgctcgaaatgccgacgcctgcttcccggggaacgcagagcataacagcggtacattcaacctcgcgcagaggtagttttaacacccatgagatatctgcgcatc

SEQ ID NO: 15928 - DNA, 1052 bp, Homo Sapiens
  misc_feature (95)..(141): n is a, c, g, or t
atcgccactctgtatctagctgctctgtggggcccttggagaacctttatgtcgaaactctgtatctaactaatctgatggagacgtggagaacnnnnnnnnnnnnnnnnnnnnnnnnnnnnnnnnnnnnnnnnnnnnnnncaaaacaggccacttggctctaccaatcagcaggatgtgggtggggccagataagagaataaaagcaggctgccccagccagcagtggcaacccgctcgggtccccttcaacactgtggaagctttgttcttttgctctttgcaataaatcttgctactgctcactctttaggtccacgctgcttttatgagctgtaacactcactgcgaagatctgcagcttcactcctgagcccagcgaaaccacgagcccaccgggaggaacgaacaactccagacgcgccgccttaagagctgtaacactcaccgcgaaggtctgcagcttcactcctgagccagcgagaccacgaacccaccagaaggaagaaactccgaacacatactgaacatcagaaggaacaaactccagacgcgccaccttaagagctgtaacactcaccgcgagggtccgcggcttcattcttgaagtcagtgagaccaagaacccaccaattccggacacaattacatgtgaaagtgttaaagcacatcgcaagtcagaatgaattccttacaggccaaggcatctgaagatggtgtctctggcttcgttgctcttttgtttgttgaagatagggtatgggtgacatttgattcagattgggtcagaactcggctctgtgatgtcgtgcgcacctccggtctcctgtgacttcccatcgcaggtgctggagaggagggtgtagcctccatgcagccctcagcgaaccaaagacccaaggcagccagacaggccaacaatgctaattaaagtggtttccaagcgttccagagtatgtgtgagaaactatacccttggaaatgttgaaatgttttctaagcaagcacatccagttcccgggcagctccaacttgcttggctctcatttgcc

SEQ ID NO: 15929 - DNA, 565 bp, Homo Sapiens
atggaccaatcagcaggatgtgggtggggtcagataagggaataaaagcaggctgcccaagccagcagcggcaacccatttgggtccccttccacactgtggaagctttatctttgcaataaatcttgctgctactcactctttgggtccgcactgcctttatgagctataacactcaccgcgaaggtctgcagcttcactcctgaggccagcgagaccacgaacccaccgggacgaatgaacaactctggacaagagatacaaacaactccagacgtgccaccttaagcgctgtaacactcacccacgaaggtctgcagcttcactcctgaagccagtgagcccacgaacccaccaaaaggaagaaactccaaacacgtctgaacatcagaaggaacaacctccggacacaccatctttaaaaactgtaacaccacgaagatccacggcttcattcttgaagtcagtgagaccaagaacccaacaatttcggacacaacattttcctagctgggcaactgtgaagcaggaaccaaccatgaccttagactccagaccccatgat

SEQ ID NO: 15930 - DNA, 682 bp, Homo Sapiens
  misc_feature (58)..(58): n is a, c, g, or t
  misc_feature (136)..(136): n is a, c, g, or t
  misc_feature (139)..(139): n is a, c, g, or t
caaccgaatataggtgaactccacctgccttgaagggtcgactcaatgattcaaatanaatcttggtacagcaaacgctgaatatcttgcaacaactggcagtagccatgggcccaaatattaagcaacatgtaanaantttaggcatccctatcatcacagtccttggagacagcaagaacaatgttcgagctgctgccctagcgactgtgaatgcttgggcagaacagactggcatgaaggaatggctggaaggagaagatctttctgaagagctcaaaaaggaaaatcctttcttgaggcaagagcttctgggctggctggctgagaaactacctactcttcgttccacccctacagaccttatcctttgtgttcctcatctctactcctgcctagaagactgtccgtggatgagtttagtgtacagacttgtaaacagctgccccctctctgctcagtctagttcccagatccttttctttttaattgctcatttgtaaaattgtcctaatctttcctagctttttaatagttaatattagaaactctttaatagttttcctttcagtttgtgagctcttctctgtcgccctgaagggtcactgtattctgtatgaatgcatggcatgatacaactaatttaagagtcttttataaataaagtttgcattaacaaaaa

SEQ ID NO: 15931 - DNA, 1188 bp, Homo Sapiens
ggatcccggtaatgatcgagcgaggagagaaggcactactgcctattagaactacaagtatgacggctctgacagtcggaagtctatgcgtcagtctacagcatagagcatacacgacaaacgttccttcgggtacaggagaggcagggccagtcaagacggcgaaaggggccccactgtgagcggccactaacccaggaggaactgctccgggaggccaagatcacagaagagcttaatttacggtcactggagacatatgagcggctcgaggctgataaaaagaagcaggttcataagaagcggaagtgccccgggcccataatcacctatcattcagtgacagtgccacttgttggggagccaggccccaaggaagagaacgttgacatagaaggacttgatcctgctccctcggtgtctgcattgactcctcatgctgggactggacccgtcaacccccctgctcgctgctcacgtaccttcatcacttttagtgatgatgcaactttcgaggaatggttcccccaagggcggcccccaaaagtccctgttcgtgaggtctgtccagtgacccatcgtccagccctataccgggaccctgttacagacataccctatgccactgctcgagccttcaagatcattcgtgaggcttacaagaagtacattactgcccatggactgccgcccactgcctcagccctgggccccggcccgccacctcctgagcccctccctggctctgggccccgagccttgcgccagaaaattgtcattaaatgaagagatgtctagtcctcagaaacttctttccctgccctgattggggctcttgctgttccgtttcttctccctgcttctcccctttgtcatctctgatctttgcctaatctgtttctttttccttttcccctagttcttacagggtttcggtgtgttttttaatctaataaaatagaaggattccccctcaactacacaaacactaaaaaacataccccttgtcgggcccgccttcgggccccttcgaaaaagctttttccaaaacccattctcggttggggccgcgccggggccccccgttagggttaaagtggaaaaccttgggcccataacgtcgtgttttccttagggagaaaccctgggggccctgaacatagtggcttggggattctctccccaaat

SEQ ID NO: 15932 - DNA, 810 bp, Homo Sapiens
  misc_feature (367)..(410): n is a, c, g, or t
gtgaggggctgcaggtggcggcgcagtctcggtaggcggtatgagtttggctgggggccgggcaccccggaagaccgctgggaaccggctttctgggcttttggaggcagaggaggaagatgagttctaccagacgacttatgggggtttcacagaggaatccggagatgatgagtatcaaggggaccagtcagaaacttctttcctgccctgattggggctcttgctgttccgtttcttctccctgcttctcccctttgtcatctctgatctttgcctaatctgtttctttttccttttcccctaggttcttacaggtttcgttgtgttttttaagtctaagtaaaatagaaagatccctttaatnnnnnnnnnnnnnnnnnnnnnnnnnnnnnnnnnnnnnnnnnnnntcaagacaaaaacccatagaaaggaaccacccaagagaagcaaacaggaacatagaaaccctagcagaactagtacagacaggacaagacagagcagcaatgattgggaagacaagcttggcctaggcaagatattcattcagacactgatattaggacaccagtgctggaaagttggcgacagttttgtcggcacacgggtgtccttgagaagatcattcgcgcgatccatggaggtcccctaatgagttcagcggcggatacacacaaggaactatcgaaggataagcaaggtcgagataccccattaatatggtcgaagcaccgcaccactcgacgtagagccagtagaggcaactatgggaccgaacagggtcagaacgaacacggaaaggctaac

SEQ ID NO: 15933 - DNA, 1198 bp, Homo Sapiens
agcagtagtgaataagaaccgtggttaaaaaagaggctggtacaggtccggaattcccgggatatcgtcgacccacgcgtacgaccacgcgatacggagccgcggacggtattgctagagcccgttagtgcgcccggccgagacacgccgccgccatgtcccgctacctgcgtccccccaacacgtctctgttcgtcaggaacgtggccgacgacaccaggtctgaagacttgcggcgtgaatttggtcgttatggtcctatagttgatgtgtatgttccacttgatttctacactcgccgtccaagaggatttgcttatgttcaatttgaggatgttcgtgatgctgaagacgctttacataatttggacagaaagtggatttgtggacggcagattgaaatacagtttgcccagggggatcgaaagacaccaaatcagatgaaagccaaggaagggaggaatgtgtacagttcttcacgctatgatgattatgacagatacagacgttctagaagccgaagttatgaaaggaggagatcaagaagtcggtctttagattacaactatagaagatcgtatagtcctagaaacagtagaccgactggaagaccacgggcgtagcagaagccattccgacaatgatagatctctctgcataataactaaaaacatctaggaagccacagctaagcacgacgaaccacgaagagataaggatcagtcgagacaggcaccgggtgcccacataagccatcacgacgcctgaaaagtcacaattcccagggcaaacaaccgggggcaccaaacggacaccaaccatctgaacaatcctcggccccagtaactgctcacacatcacggtacacgcaacaccatccgacacacccaggagccaacaaacgatacaacaaggcgaagaaaccctagtgtcagcgacacacagggcgggaaaacccgcacacgtcggcgtcaacgcctcgcagaggcggccgagcgcgagaaccacccacagacggcgaccacacaccaccgcgcgcgcgcccaccagacaccccaaaagcgagcgtaagcacccagccaacgccacagaggaacccgggagcacccgccccccagaccccctacgaaccgcgagacaggcggaccacaaagatggtgcgcccccacacgcccgtccgcaacacccgccggcgagc

SEQ ID NO: 15934 - DNA, 430 bp, Homo Sapiens
agccggccccaggttatagaaaaaaaagaactactttttagatgttaccacttacataaacttgaatttcaaacttcaacacccctcactaatcagccatctgaagaaaggatattgaacataagcaaatacctcttggacggcgagtgtagaaatcaagtggaacatacacatcaactataggaccataacgaccaaattcacgccgcaagtcttcagacctaaaacatcataaaaagacctcaaatttttatgtccaagtccttaagatgtataggcaatatatctttttgatgaaggaaagctaggatccaagaatttggaagataaaaatgcagtttacattaacaggacaacagcagacatatgtatggtacaagggaatgaccacaacttatttttatctacagccgtcatttttcataaaagg

SEQ ID NO: 15935 - DNA, 1349 bp, Homo Sapiens
aattagaaggccagttgtacaaagcggttttacaggcagtatatacggcctagtacgagctggtgcgaatcggacaggcagctcggccccggcggccctgtctcccgaccccggaaggcgaagcaggctgcccggggaccccgcgctgtgggcgcttgaagccgagaccagcctgcccgggcctgggcaggcggagcagggccttggaccccgcggcgcccctcggcctcggagcaacgagcgcagcgccgcctctgaagagccaatccattcaggatgggaaaccacgcaggcaaacgagaattaaatgccgagaaggccagtacgaatagtgaaactaacagaggagaatctgaaaaacagagaaacctgggtgaactttcacggacaacctcagaggacaacgaagtgttcggagaggcagatgcgaaccagaacaatgggacctcctctcaggacacagcggtgactgactccaagcgcacagcggacccgaagaatgcctggcaggatgcccacccagctgacccagggagccgcccccacttgatccgcctcttttcccgagatgccccggggagggaggacaactaccttcaaagacaggccctctgtagtcctgacgagctccagaccatccaagaagacagtgcagccacctccgagagcctggatgtgatggcgtcacagaagagaccctcccagaggcacggatccaagtacctggccacagcaagtaccatggaccatgccaggcatggcttcctcccaaggcacagagacacgggcatcccttgactccatcgggcgcttctttggcggtgacaggggtgcgcccaagcggggctctggcaaggactcacaccacccggcaagaactgctcactacggctccctgccccagaagtcacacggccggacccaagatgaaaaccccgtagtccacttcttcaagaacattgtgacgcctcgcacaccacccccgtcgcagggaaaggggagaggactgtccctgagcagatttagctggggggccgaaggccagagaccagggatttggctacggaggcagagcgtccgactataaatcggctcacaagggattcaagggagtcgatgcccagggcacgctttccaaaattttttaagctggggaggaagaaatagtccctcctggatcacccatgggctagaccgctgaaaaacccacctggttccgggaatcctggccctccgccttccttaatattacctggcctttaaaaatttttaatccccccctttgccccctgtttaccctaatttaaaaggcggaaggaccccccttcccccctaatgggcctgggggg

SEQ ID NO: 15936 - DNA, 505 bp, Homo Sapiens
  misc_feature (402)..(402): n is a, c, g, or t
  misc_feature (426)..(426): n is a, c, g, or t
  misc_feature (445)..(445): n is a, c, g, or t
ccgcgcgtgggcgcttgaagccgagaccagcctgcccgggcctgggcaggcggagcagggccttggaccccgcggcgcccctcggcctcggagcaacgagcgcagcgccgcctctgaagagccaatccattcaggatgggaaaccacgcaggcaaacgagaattaaatgccgagaaggccagtacgaatagtgaaactaacagaggagaatctgaaaaaaaagagaaacctgggtgaactttcacggacaacctcagtgctgctagcttcatgttgctctgcgacaatcataggattgaggtcgaggaagacttttgaacaaactcctcaatttaaatccgccttgagcaaacgttctctgtggtctgagaagtggaaggggggagggataaatgagtgtcntatgaatcaaagctttattattcnttgtgattcccattaattntgcatacagagttcttagaagtttctttattcaaaagcaaatgtggataaaaatgtatta

SEQ ID NO: 15937 - DNA, 682 bp, Homo Sapiens
agggtttaatattgttaaaaaatgcataccaaatgaagactgcctatcatcatatcaaatatgccaattctaaaaagagcttaacattagaatagcatatggtagaattactagttcagaattggcatagattctggtgttaaaatagactggatctgtattatctgagggttagtaactaatgcttagccaggcctgcttcacagagttgctaccagggagtattctttggataagcaaaatgctagcagcatgtgttttaagctctgttaaggggtgaaagatgtaattattgacagattaaatagataacttcgtaaccaccagggggcagatatcaatacatcacagaatggctgaggaagatccttgggttgtgaagagagtagaaaccctagggagcagtgcttttgggtcctagaacctgttgagttactaatgaatatttgtagaatctcataaaacagtttaaatacaagcttaagtggcttatgaatcctgtgaagctcatttatggactagtgtaaaacaatgtgaagctctactaagtcctgtccttaatcataaataatagccccttgaggactagcctgttctctggtcaccttaccagttgggttgcacattgtgtggtcgtccaaataactcaatcttgcgagtgccaggagatagtctttcaatc

SEQ ID NO: 15938 - DNA, 887 bp, Homo Sapiens
atccgctacctggacgtcagtatcttggggcaagtttgcagttgtgatggctgacccacctgggatattcacatggaactgccctatgggaccctgacagatgatgagatgcgcaggctcaacatacccgtactacaggatgatggctttctcttcctctgggtcacaggcagggccatggagttggggagagaatgtctaaatctctgggggtatgaacgggtagatgaaattatttgggtgaagacaaatcaactgcaacgcatcattcggacaggccgtacaggtcactggttgaaccatgggaaggaacactgcttggttggtgtcaaaggaaatccccaaggcttcaaccagggtctggattgtgatgtgatcgtagctgaggttcgttccaccagtcataaaccagatgaaatctatggcatgattgaaagactatctcctggcactcgcaagattgagttatttggacgaccacacaatgtgcaacccaactggatcacccttggaaaccaactggatgggatccacctactagacccagatgtggttgcacggttcaagcaaaggtacccagatggtatcatctctaaacctaagaatttatagaagcacttccttacagagctaagaatccatagccatggctctgtaagctaaacctgaagagtgatatttgtacaatagctttcttctttatttaaataaacatttgtattgtagttgggattcggaagtccattctggctctgctacttaacagtgtataatcttgtgcaactcatctctcagtattatatgtgaaatgggagtattacctcattgggttgctgtgaaggttcaaactaaatgagtgcatgggaaacattaaaatgatcattata

SEQ ID NO: 15939 - DNA, 804 bp, Homo Sapiens
  misc_feature (657)..(657): n is a, c, g, or t
ggggacaaagtggtgagctgcgacgtgactggctagctgcgtgggtactggaacaagcaaacgaggcagcgagcgaaggacgggagccggaccctgggccccgtggaactccagcctgcgccaccacgtcacgcacacgctcggcgctgcgatccgcgcatataacgatatttggatttgacctgcattttggaatttatctacacttaaaatgccaccagcagttggaggtccagttggatacacccccccagatggaggctggggctgggcagtggtaattggagctttcatttccatcggcttctcttatgcatttcccaaatcaattactgtcttcttcaaagagattgaaggtatattccatgccaccaccagcgaagtgtcatggatatcctccataatgttggctgtcatgtatggtggaggtcctatcagcagtatcctggtgaataaatatggaagtcgtatagtcatgattgttggtggctgcttgtcaggctgtggcttgattgcagcttctttctgtaacaccgtacagcaactatacgtctgtattggagtcattggaggtcttgggcttgccttcaacttgaatccagctctgaccatgattggcaagtatttcctacagaagccgaccattgggcccaccgnactggcccatgggctgggcagccccggtggttcctccttggactctgggcccccccctcaattcagggttttccttcggtaatcctttgggatgggaaaaaggaaacctcttcctaaactctcttggggggggcttgggctacccta

SEQ ID NO: 15940 - DNA, 441 bp, Homo Sapiens
aacaagcaaacgaggcagcgagcgaaggacggagccggaccctggccccgggaactccagccgcgccaccacgtcacgcacacgctcggcgctggatccgcgcatataacgatatttggatttgacctgcattttggaatttatctacacttaaaatgccaccagcagttggaggtccagttggatacacccccccagatggaggctggggctgggcagtggtaattggagctttcatttccatcggcttctcttatgcatttcccaaatcaattactgtcttcttcaaagagattgaaggtatattccatgccaccaccagcgaagtgtcatggatatcctccataatgttggctgtcatgtatggtggaggtaagtacccattaaggcctgctcttttaattttcatgaagcagccagagtgtctgtattaggtaactt

SEQ ID NO: 15941 - DNA, 798 bp, Homo Sapiens
cacgaaacacagggtcagcaggaccaatgccagctcagcctagggaagcacatgggacaattcttgtaaaacatttaaatacaaacccagttgaaactgctggggaggggctcaaaaacaccaaaaatgtttggtccctgaggttttaatttggccgtttaatttgttctgttttggtttgttgttgaggattagatacaatttaaaaaaagaaattttggtgacttcctttatcttgtcagaaagctttagaatactactgactgccctaagaataaagatttctaagccatgagtccatatagaaacgataccttaggtatacctatagcttaacatcccatggaatactgccaagaaaatctccagatggaggagccaattgctgtggtctcttcagatctataggatcggcctccatctctgtccctagccttccacacacttccaagatcacaggggaaggaggagccagaagcaaccgcttcgccattcactcaccctgaagaggcttcccttctctatcccacaggcgaatgaggtattactatgactagtcaagtatcttccccttctgcccttaaactacactgaggccaaattctgacaagaacttgcacatctatatacataacaaataaacatataaatacattacgtaacaaactgaccatttacatgtcaagatgaagaagcagatctacttcaagaactaaataaaatctcacatctaagttaacatgaaaatccagtgattccactttagcaggaaaaatttgaacacaaactaaaaatccc

SEQ ID NO: 15942 - DNA, 812 bp, Homo Sapiens
ggcaaagaagaaacatggaaaagatcaacttcctggtacaatggccaccctttctctggtgaatgaggcacagtatctgctgatcaacacatccagtattttggaacttcaccggcaactaaacaccagtgatgagaatggaaaggaggaattattctcactgaaggatctcagcttgcgttttcgtgccaatattattatcaatggaaaaagggcttttgaagaagagaaatgggatgagatttcaattggctctttgcgtttccaggttttggggccttgtcacagatgccagatgatttgcatcgaccagcaaactgggcaacgaaaccagcatgttttccaaaaactttctgagagtcgtgaaacaaaggtgaactttggcatgtacctgatgcatgcatcattggatttatcctccccatgtttcctgtctgtaggatctcaggtgctccctgtgttgaaagagaatgtggaaggtcatgatttacctgcatctgagaaacaccaggatgttacctcctaaaaaaaatttttagcatacattaaagtttctcttttacagtgatctctattattgttaagatctgcaacttggttcagtagaacttgatgttttgaataaggagagctctttttctttagaggcagggaatgctctcacctgcttccttctgcctttgacttctcaccctgcaatttgcactggctgtgctcaggagagcacttctgaggcctcaggaacgaatgctgcacccacatccgtgaggctcctgtagtatttgaagtataagcgttgagggggtccttgc

SEQ ID NO: 15943 - DNA, 704 bp, Homo Sapiens
ccccggctgctttagccacttaaggcactttactcttcatgagctctctgtgttaaagaaaataatgatcaagacaacagaattacttgttttttttgtactccatatctcttcaacaagattggaaagcataaaaatacatgaagtaaaacaaaaaaagtgagaacttggatggaaaggaaaaataaaatgaaactacaaacaaggataggttaatggcagcccaacagctttggatgggcagcaaatcccccatttaaaaaaataactctgtgctattatgaacatagttctggtattgataacaccaggattggaaaccaggtgtcatattttgcaatcacgcttacctttgtttcacgactctcagaaagtttttggaaaacatgctggtttcgttgcccagtttgctggtcgatgcaaatcatctggcatctgtgacaaggccccaaaacctggcaggtgagaaggaaaacacagcgttgccacaaaagtgaccagagccttgcacctcagagggaggaatcacacagaaatgcccagtcccctaactatggagagccagaacggggcacctgttcaccgtctctgctggggaatcatctgcatttgtttgtcagctaaaagaccactgcttaaggtctttgcagacaaagaaaagagggactgagatcttgacggttctcaggaaatgttggagaatg

SEQ ID NO: 15944 - DNA, 1110 bp, Homo Sapiens
gggcatgtcagcatctcaagttcatttttcaacctacagtataacaatttgtaataaagcctccaggagctcatgacgtgaagcactgttctgtcctcaagtactcaaatatttctgatactgctgagtcagactgtcagaaaaagctagcactaactcgtgtttggagctctatccatattttactgatctctttaagtatttgttcctgccactgtgtactgtggagttgactcggtgttctgtcccagtgcggtgccacctcttgacttccccactgctctctgtggtgagaaatttgccttgttcaaataattactgtaccctcgcatgactgttacagctttctgtgcagagatgactgtccaagtgccacatgcctacgattgaaatgaaaactctattgttacctctgagttgtgttccacggaaaatgctatccagcagatcatttaggaaaaataattctatttttagcttttcatttctcagctgtccttttttcttgtttgatttttgacagcaatggagaatgggttatataaagactgcctgctaatatgaacagaaatgcatttgtaattcatgaaaataaatgtacatcttctatcttcacattcatgttaagattcagtgttgcttcctctggatcagcgtgtctgaatggacagtcaggttcaggttgtgctgaacacagaaatgctcacaggcctcactttgccgcccaggcactggcccagcacttggatttacataagatgagttagaaaggtacttctgtagggtcctttttaccttctgctcggcagagaatcgatgctgtcatgttcctttattcacaatcttaggtctcaaatattctgtcaaaccctaacaaagaagccccgacatctcaggttggattccctggttctctctaaagagggcctgcccttgtgccccagaggtgctgctgggcacagccaagagttgggaagggccgccccacagtacgcagtcctcaccacccagcccagggtgctcacactcaccactcctgtggctgaggaaggatagctggctcatcctcggaaaacagacccacatctctattcttgccctgaaatacgg

SEQ ID NO: 15945 - DNA, 292 bp, Homo Sapiens
  misc_feature (12)..(12): n is a, c, g, or t
ttaactgtccanagtgccacatgcctacgattgaaatgaaaactctattgttacctctgagttgtgtccacggaaaatgctatccagcagatcatttaggaaaaataattcaatttttagcttttcatttctcagctgtcctgttttgctgcgttcctactgtctctatgttctcctgcttgccatcaatggagtgacagagtgtttcacatttgctgccatgagcaaagaggaggtcgacaggtacaattttgtgatgctggccctgtcctcctcattcctggtgttatcc

SEQ ID NO: 15946 - DNA, 947 bp, Homo Sapiens
ctggtggcatagggcagacacgcctgcagacattctctgggaaagggcagcagcagccaggtgtggcagtgacaggcaggtgtgaatgaggcaggatgaactggacaggtttgtacaccttgctcagtggcgtgaaccggcattctactgccattggccgagtatggctctcggtcatcttcatcttcagaatcatggtgctggtggtggctgcagagagtgtgtggggtgatgagaaatcttccttcatctgcaacacactccagcctggctgcaacagcgtttgctatgaccaattcttccccatctcccatgtgcggctgtggtccctgcagctcatcctagtttccaccccagctctcctcgtggccatgcacgtggctcaccagcaacacatagagaagaaaatgctacggcttgagggccatggggaccccctacacctggaggaggtgaagaggcacaaggtccacatctcagggacactgtggtggacctatgtcatcagcgtggtgttccggctgttgtttgaggccgtcttcatgtatgtcttttatctgctctaccctggctatgccatggtgcggctggtcaagtgcgacgtctacccctgccccaacacagtggactgcttcgtgtcccgccccaccgagaaaaccgtcttcaccgtcttcatgctagctgcctctggcatctgcatcatcctcaatgtggccgaggtggtgtacctcatcatccgggcctgtgcccgccgagcccagcgccgtccaatccaccttcccgcaagggctcgggcttcggccaccgcctctcacctgaatacaagcagaatgagatcaacaagctgctgagtgagcaggatggctccctgaaagacatactgcgccgcagccctggcaccggggctggctggttgaaaaaggaccgtgtcggctgttatgcataca

SEQ ID NO: 15947 - DNA, 506 bp, Homo Sapiens
ttgctcaggtctgaagctgaacaaatgaggaagtagagagtgagcgtgagagagcccaggctctgcaagagcagggcgaactgaaggtggcccaagggaagggctctgcaagagaatttggccctcctgacccagaccctagctgaaagagaagaggaggtggagactctgcagggacaaatccaggaactggagaagcaacgggaaatgcagaaggctgctttggaattgctgtctctggacctgaagaagaggaaccaagaggtagatctgcagcaagaacagattcaggagctagagaagtgtaggtctgttttagagcatctgcccatggccgtccaggagcgagagcagaagctgactgtgcagagggagcagatcagagagctcgagaaggatcgggagactcagaggaacgtcttggagcatcagcttctagaacttgagaagaaagaccaaatgattgagtcccagagaggacaggttcaagacctgagcagaccagg

SEQ ID NO: 15948 - DNA, 422 bp, Homo Sapiens
  misc_feature (91)..(91): n is a, c, g, or t
cccccctggctttgctcagagtctagtaagggcttagcttaattaaagtggccgtggaggggagggagtgatggtttctagtggagaccanggaaggcttcttggaggaggcattttgagctggtccttgaagggctgttgtggttgaggcattctaggttgcagggatagttgagcaatggcggagaggctggaaagtcagaggcttcattcattcactcactcagtcattcaacaaatgcttatcgcaaaactgtgagggcaccagggagccagcagcgaacacaggaccgttcatctttcatggggaaacataacagcactcagatgagcaagccaggagacctgagcaagccaggagacctgagcaagccaggagacctgagcaagccaggagacctgagcaagccaggagacctgag

SEQ ID NO: 15949 - DNA, 1343 bp, Homo Sapiens
gtggaataaagtgggacaaaaagcgcgacggtcggaatccgggatatcgtcgaccacgcgtcgccacgcgtccgcggcccggaggactgcaacactccgaggccaggaacgctccgtctggaacggcgcaggtcccagcagctggggttccccctcagcccgtgagcagccatgtccaaccccagcgccccaccaccatatgaagaccgcaaccccctgtacccaggccctctgccccctgggggctatgggcagccatctgtcctgccaggagggtatcctgcctaccctggctacccgcagcctggctacggtcaccctgctggctacccacagcccatgccccccacccacccgatgcccatgaactacggcccaggccatggctatgatggggaggagagagcggtgagtgatagcttcgggcctggagagtgggatgaccggaaagtgcgacacacttttatccgaaaggtttactccatcatctccgtgcagctgctcatcactgtggccatcattgctatcttcacctttgtggaacctgtcagcgcctttgtgaggagaaatgtggctgtctactacgtgtcctatgctgtcttcgttgtcacctacctgatccttgcctgctgccagggacccagacgccgtttcccatggaacatcattctgctgaccctttttacttttgccatgggcttcatgacgggcaccatctccagcatggaccaaacccaaagccgtcattcattgcaatgatcatccattggggggggtcctccattgttcaggcccccatcttcttgattctctaaccaagggggggaatttcacccttgtgtccagaggccctctttctggtggtcctggggcaattgtggcttccctgggttaccttgggcattgggcacctaaccattgggggctccttccttctcaataaccattacctggcccccgatccgacctcaatatcagcgttcccggggcggcctatttgcgtttcacccctggcctccccggatcttcccaatccctctccgctttgttccccggcggtcaccccgcaatttacaccccttatattccccgtaaggaacctaaatttccgttgcgggccccctcgcctaattttcaccacaaagattttcttccaccccgttctctcctcttcctgtcggttttacggcctctcacggcgtggccatgccgctcactatcacggacacccataagcccctcacatatattcttccccccaaaacactcactgagagttttgttcccccctatatcagacccccatatatcgcggttctgccgccgcctttattgcacgctgg

SEQ ID NO: 15950 - DNA, 1091 bp, Homo Sapiens
  misc_feature (976)..(1005): n is a, c, g, or t
gctggaccggtccggaattcccgggatcgcgcctgagaagaggggacgccagcccggtcaggcctcggcgcggcctacacgctccgctcgctcgctcgctcccgcctcccgccccgcgcccggccatggcggagccgtcgtccgcccgacgcccggtgcctctcatcgagtcggagctgtacttccttatcgcccggtacctatcggcgggcccgtgtcggagagcggcccaggtgctggtgcaggagctggagcagtaccagttgttgccgaagagattggactgggagggcaacgagcacaacaggagctacgaggagttggtcttgtccaataagcatgtggctcctgatcatcttttgcaaatctgccagcgcatcggtcctatgttggataaagaaattccacccagtatttcaagagtcacttctttacttggtgcaggaaggcagtctttgctacgtacagcaaaaggtaccttaatttgaagaagtgttctgctttgtattaatagcctaataagttattataattgtgaagtaatgtaagcattgtggaagaaaggtgataatgtaactataaatcatgctgtggactataaaattctctgcatttagcatagaacattgaattttattacataagtgtttaatgggtccttctgcattaaaaagttgataaagatatagatgttaagctaaaaagcttgaatttattctgagatgttgtttgaggttttatcaatgtgagttcttaattttccatttgtgtagctcactcataactttcattgaatggaattggtatgtggcctaataaactccttttaaggctaaagggaatttcttttgaatattttagctttctggaagcccctttgggttataaaagggaaaatgattttttcctaactttgggtaaccagccttggaaaacaaagccccccccaaatggcgaaaactggccctgggctccnnnnnnnnnnnnnnnnnnnnnnnnnnnnnngccccaggctattggggcctgctaaaaatggcttgggaaaattggccaaatccctttttcccggggtaacacttggggcaaacatt

SEQ ID NO: 15951 - DNA, 426 bp, Homo Sapiens
  misc_feature (25)..(25): n is a, c, g, or t
  misc_feature (34)..(35): n is a, c, g, or t
cgccgggccccccgccctttaaacncaacgctcnnaggtgggcgcgcgcaggtgtttcctcgtaccgcagggccccctcccttccccaggcgtccctcggcgcctctgcgggcccgaggaggagcggctggcgggtggggggagtgtgacccaccctcggtgagaaaagccttctctagcgatctgagaggcgtgccttgggggtaccggatcccccggccgccgcctctgtctctgcctccgttatggtagcgctgccgttagcgacccgctcgcagaggaccctcctccgcttccccctcgacggggttgggggggagaagcgagggttccgccggccaccgcggtggtggccgagtgcggctcgtcgcctactgtggcccgcgcctccccccttccgagtcgggggaggatcccgccaggaaa

SEQ ID NO: 15952 - DNA, 800 bp, Homo Sapiens
caactgtgaacatgggtcagaaacaggaaattctggatctcttttcttcagtactctatgaatgtgttacccaggagaccccagagatgttgcctgcatacatagcaatggatcaggctataagaagacttgggagaagagaaatgtctgagacttctgaactttggcagataaagttggtgttagagtttttcagctcccgaagccatcaggagcggctgcagaaccaccctaagcgggggctctttatgaactcgaaattcctccctgttgtgaagtgcaccattgataataccctggaccagtggctacaagtcgggggtgatatgtgtgtgcacgcctacctcagcgggcagcccttgaaggaatcacagctgagcatgctggcctgcttcctcgtctaccactctgtgccagctccacagcacctgccacctataggactagaagggagcacaagctttgctgaactgctcttcaaatttaagcagctaaaaatgccagtgcgagctttgctgagattggctcctttgcttcttggaaatccacagccaatggtgatgtgaccgtgtctggcggtgaacctaccctgaaacgtgacttctgcacaacaaacgtgaccaaacatcaaagctaaagcaatgtttataaagttttatggtataactagggggaaatgagctgcacaaacctcaatgtattttaaatctgttgctgtcatcattaacggtatatgacatataaaagcaagttaaaatttacttttgtaaataaagtttttggtttgtttccaaaaaaaa

SEQ ID NO: 15953 - DNA, 1051 bp, Homo Sapiens
tcttgagggacaggttctgagatataaaactgctgctgagaatgctgagaaagttgaagatgaattgaaagcagaaaaacggaagctacaacgagagttacgaacagcactggacaagattgaggagatggagatgaccaacagccacctggccaagcggctggagaagatgaaggccaataggacagcacttctggcccagcagtaggaaaaccacccttcaacccgggtgatgctccttggggccctacctagagggactgacttttgtccattgacacaaaccccttttagtactgttttaatgacaaaactcaaaacagtcacctttgtattttataatttatgacagaatgaagtcattttgaatctacatgaatgaacactttggattttgttgtagtttgattctagggtagaaccagtccatgctgtttttattttttatctccgtaattgtagaatcatgtttactcaacatttttccccagctgcctcagtaactgggcactcggaggccttggcacgggttctggaggacagacagcaattctatgagtgctcactgagatacttgctgggagacctcagaaaacacaagtgccttctccacggtgcaattcagactccagtgatctccagtggtcaaaagacatttacccttaatatcagacaacatttatattttagtgaagaaacaagttctcgggtggggaatctatgtttcactcagatttatatgtttggaggaaaaaagcctttttttgtaaaatatttaaatttatataagaaaatgttagaaaaaaatatggggagtgtatataaaacttgctttattgcatggggcaggggaagtccaggcctaatactcctaaagtaagagttgggtcctttttttcttcaatacaactgtgctgtaccttgtaaagtattttatctgctgcttatttgtggaatgaaacctcaaacaaacccaaagggggagggtagggcatggcagcagattggaaatctgcctgcagattctattaaatacacccttttgccaacc

SEQ ID NO: 15954 - DNA, 1050 bp, Homo Sapiens
  misc_feature (398)..(436): n is a, c, g, or t
ccattgtagaatggcccatgccttttctctcctccgagacgaataatagagagttgagtgtaatttatttctattgtgagcagtgcagttttactccatttttacaaataaagaattccagagacgagacactgagacttgcctagctttatcctaagagtgagtgacaggctactctttctacctcattgggccactttctgagtgatgactgctacgtatcccagatggcaatattcacgtttctgaatctaagcacttttctttcttttctccttgcccgatcagctggacggccaaccgccatgtgatgtaagcctccatacgaaagcactgttgcagatagaagaagaggtggttgctgctcatgtagatctataaatatgtgttgtatgtcnnnnnnnnnnnnnnnnnnnnnnnnnnnnnnnnnnnnnnngcctctttagattacatagaagcattgtagtcttggtagaaccagtatttttgttgtttatttataaggtaattgtgtgtggggaaaagtgcagtatttacctgttgaattcagcatcttgagagcacaagggaaaaaataagaacctacgaatatttttgaggcagataatgatctagtttgactttctagttagtggtgttttgaagagggtattttattgttttttaaaaaaaggttcttaaacattatttgaaatagttaatataaatacataattgcatttgctctgtttattgtaatgtattctaaattaatgcagaaccatatggaaaatttcattaaaatctatccccaaatgtgctttctgtatccttccttctacctattattctgatttttaaaaatgcagttaatgtaccatttatttgcttgatgaagggagctctattttctttaccagaaatgttgctaagtaattcccaatagaaagctgcttattttcattaatgaaaaataaccatggtttgtatactagaagtcttcttcagaaactggtgagcctttctgttcaattgcatttgtaaataaacttgctgatgcatttaaaaaaa

SEQ ID NO: 15955 - DNA, 637 bp, Homo Sapiens
  misc_feature (170)..(186): n is a, c, g, or t
tctagaggatcccgaccattgtgtctcagtgatgctgaatcaacaggtaaatactgcacttttccccacacacaattaccttataaataaacaacaaaaatactggttctaccaagactacaatgcttctatgtaatctaaagaggccaaaaaagttattcctttttttnnnnnnnnnnnnnnnnngacatacaacacatatttatagatctacatgagcagcaaccacctcttcttctatcctgcaacagtgctttcgtatggaggcttacatcacatgggggttggccgtccagctgatcgggcaaggagaaaagaaagaaaagtgcttagattcagaaacgtgaatattgccatctgggatacgtagcagtcatcactcagaaagtggcccaatgaggtagaaagagtagcctgtcactcactcttaggataaagctaggcaagtctcagtgtctcgtctctggaattctttatttgtaacaatggcgtaaaaatgaactgctcacaatagaaataaattacactcaactctctattatttgttttggaggagagaaaaggcatgggcaattttacaatggtgattccagaaatcatttctatttggctctggaacttgctgagagagagaaaa

SEQ ID NO: 15956 - DNA, 387 bp, Homo Sapiens
tgtggggaaaagtgagtgattcgtgttgtttccagtcagccccgctccgagtctcagggggactgccccgcacacagactgttcaccagggcctgcagcctctcggacagcaccacctgcagggagcagaggacaggagcggtgggcagggtgagggcgggggcgcacagggcagaatgacagggtgggcctccccccaacctggtactgtgcagggctccgcagccgcctgtgctcagggctgagtcggctcagggacagctgggccaaggctctagactctgccagggatgggagcggctcacacagctgcacggaggaggtaaggaaagagaagcttggggctagctcccagtcagggctctaccggggctgggggtcaggatt

SEQ ID NO: 15957 - DNA, 467 bp, Homo Sapiens
gttctcacgtgggagggcacagggcttcctgcaggctcggaggcccagggcggattgtggccagtggaagggaaggatgtttctggcagggggacttgtgtgggccacggctgtgcggctgcggcgttgagcacggcctcactgtccacctgtcccctaggcctccagaggaagaagtccaagttccgcttgtccaagatctggtcaccaaaaagcaaaagcagcccctcccagtagtagccagtagggccgtgggctcggcccggacctggcatccggacttggactcggggccatgggcttggcccggacccggaacccggacttgtactcggggccgtgggctcggcccggacccggcattcggacttggactcgggaagggcctcctgtccctacaaggggcatgtggacagcagggacctgcgctaccgtctgtggtctcaataaagaaaccgaccacatgg

SEQ ID NO: 15958 - DNA, 584 bp, Homo Sapiens
cagcttctgctgagacaggagtcagagctgatgtacaagtccaaggcccagcgtctggaggagcagcagctggacatcgagggcgagctgcgccggctcatggccaagcccgaggctctgaagtcactgcaggagcggcggcgggagcaggagctgctggagcagtacgtgagcaccgtgaacgaccgcagtgacatcgtggactcgctggacgaggaccggctccgggaacaagaggaggatcagatgctgcgggacatgattgagaagctgggcctccagaggaagaagtccaagttccgcttgtccaagatctggtcaccaaaaagcaaaagcagcccctcccagtagtagccagtagggccgtgggctcggcccggacctggcatccggacttggactcggggcaatgggcttggcccggacccggaacccggacttgtactcggggccgtgggctcggcccggacccggcattcggacttggactcgggaagggcctcctgtccctacaaggggcatgtggacagcagggacctgcgctaccgtctgtggtctcaataaagaaaccgaccacatggaaa

SEQ ID NO: 15959 - DNA, 813 bp, Homo Sapiens
ggccaggcgttagctcccgtaggagaaaatgcgggaatcctgaatgaacagtgggtcctggctgtccttggggcgttccagggcagctcccctcctggaatagaatctttctttccatcctgcatggctgagagccaggcctcctgcttggtctccacaggaggctgtggcagctgtggcatccactgtggcatctccgtcctgcccaccttcttaagaggcgagatggagcaggcccatctgcctctgccctttctagccaaagttatagctgccctggactgctcactctctggtctcaatttaaaatgatcccacggccacagggctcctgcccaggggcttgttaccttcccctcctccttcctgagtcactccttcagtagaagggcctgctccctatcctgccccacagccctgcctggatttgtatccttggcttcgtgccagttcctccaagtctatggcacctccctccctctcaaccacttgagcaaactccaagacaccttctaccccaacaccagcaattatgccaagggccattaggctctcaacatgactatagagaccccgtgtcatcacggagacctttgttcctgtgggaaaatatccctcccacctgcaacagctgcccctgctgactgcgcctgtcttctccctctgaccccagagaaaggggctgtggtcagctgggatcttctgccaccatcagggacaaacgggggcaggaggaaagtcactgatgcccagatgtttgcatcctgcacagctacaggtccttaaataaaagtgtactgttggttaaaaaaa

SEQ ID NO: 15960 - DNA, 1395 bp, Homo Sapiens
tctacaggatccccttacaacccacgatcacgtgaccacagcgaaaactccaccacgcgctcagcttccaccccggcacaggccagcagctgctgccggaagtcagacaccggctgcatggtaccccccgcaatgaccactgcccggcattccttcaccacttgggcaaagtgcacagctggattcaggagcaaaaacttcagggtgctctgactgaggctgccttggcggctcaggatgaccctgccgtcctggttggccgtagtgagagctgccaggaagccttcgatgtgcatcagtggagaagctggtcgcagggtgctggcctgactctcgtctgcaggggctgcaagagcttcagtcgtcctgggctgcaggctctgcaggaattgctgaaacccagccagtttgagctgctcccgggatgagaacactgctccgtaccgttcagtgaacccaaagagctttctgctgatcatgctcttctcacagtatcgctgcaccttgaacaggttgatgttgtcgatctggctctggaagagaaagtcgttgatggtcttcagctccgtccctgtctgtgacagactctgtgtattgggattttgcttaatgttcccccctagcacagccacgaatttctccagcaaatacaggatctgcttcaggtacatcaggttcttggccttcaaacgcttcccgtatcgctccatgtactgcagcagctgggaatgggcctggcagagctgggagccgctgacctccacgctgtgcatgcccgtgatggtgtcgatcaggttgtgcgcctcgtcgatgatcaccacctggtcctgcagccggatgcccgcgccctgccgggtggccgcatgcagcagcatctgatagggcagcaccaccagctgggctgcagggatggcaaggcggctcccgtaatagggacaggcccgggcctccttcccaagggccagcagctgctccatgtccttcacctctgccagggcctcatcccggagaaggcccatctgctcgtggttgtagaaggggcaggctgcctgcttctcctgcctcctcctctttggcttctcctcctcagctcctttcttcttctcgtgcctgcttctctgcatgtccacacagcggtcgttgataagctgcacagaacctaggcttttcaagtcttcatttacacaaaggttctgccgggagccaagggagaccagccgaacatccttgccaaaggggctcttcttcacctcatgcacaaactggggtcagagggagaagacaggcgcagtcagcaggggcagctgttgcaggtgggagggatattttcccacaggaacaaaggtctccgtgatgacacggggtctctatagtcatgttgagagcctaacggcc

SEQ ID NO: 15961 - DNA, 544 bp, Homo Sapiens
aaaagaagaaatttgactctcagaagctaatagctggtcactgcaagaaaaattgaacatactaatttgaatggaaaacacatggtgtgagtccaaagaaggtgttttcctgaagaactgtctattttctcagtcatttttaacctctagagtcactgatacacagaatataatcttatttatacctcagtttgcatatttttttactatttagaatgtagccctttttgtactgatataatttagttccacaaatggtgggtacaaaaagtcaagtttgtggcttatggattcatataggccagagttgcaaagatcttttccagagtatgcaactctgacgttgatcccagagagcagcttcagtgacaaacatatcctttcaagacagaaagagacaggagacatgagtctttgccggaggaaaagcagctcaagaacacatgtgcagtcactggtgtcaccctggataggcaagggataactcttctaacacaaaataagtgttttatgtttggaataaagtcaaccttgtttctaaaaa

SEQ ID NO: 15962 - DNA, 1104 bp, Homo Sapiens
tgaccagtcggccacaaaccccaaaagcgtgtgacagtaagctaacctttgatgctataactacgattcggggagaagtgatgttctttaaagacagattctacatgcgcacaaatcccttctacccggaagtagagctcaatttcatttctgttttctggccacaactgccaaatgggcttgaagctgcttacgaatttgccgacagagatgaagtccggtttttcaaagggaataagtactgggctgttcagggacagaatgtgctacacggataccccaaggacatctacagctcctttggcttccctagaactgtgaagcatatcgatgctgctctttctgaggaaaacactggaaaaacctacttctttgttgctaacaaatactggaggtatgatgaatataaacgatctatggatccaggttatcccaaaatgatagcacatgactttcctggaattggccacaaagttgatgcagttttcatgaaagatggatttttctatttctttcatggaacaagacaatacaaatttgatcctaaaacgaagagaattttgactctccagaaagctaatagctggttcaactgcaggaaaaattgaacattactaatttgaatggaaaacacatggtgtgagtccaaagaaggtgttttcctgaagaactgtctattttctcagtcatttttaacctctagagtcactgatacacagaatataatcttatttatacctcagtttgcatatttttttactatttagaatgtagccctttttgtactgatataatttagttccacaaatggtgggtacaaaaagtcaagtttgtggcttatggattcatataggccagagttgcaaagatcttttccagagtatgcaactctgacgttgatcccagagagcagcttcagtgacaaacatatcctttcaagacagaaagagacaggagacatgagtctttgccggaggaaaagcagctcaagaacacatgtgcagtcactggtgtcaccctggataggcaagggataactcttctaacacaaaataagtgttttatgtttggaataaagtcaaccttgtttctactgttttatac

SEQ ID NO: 15963 - DNA, 782 bp, Homo Sapiens
  misc_feature (116)..(116): n is a, c, g, or t
  misc_feature (121)..(121): n is a, c, g, or t
cgcgcaaccctcccctggaaaggggttaaaggccacacatcaaggaagtcggtaccagaggatcgggggccacaaacggcgcaaccgccatcgaaggtgctctgcgagaacttcanaaagnaaattgcccacgaccttgcgctatgtgcggcgcttgaactcttcgagaagcccgactatgactactgcggaagctcttcaccgacctcttcgaccgcagtggcttcgtgttcgactatgagtacgactgggccgggaagcccctgccgacccccatcggcaccgtccacaccgacctgccctcccagcctcagctccgggacaaaacccagccgcacagcaaaaaccaggcgttgaactccaccaacggggagctgaatgcggacgaccccacggccggccactccaacgccccgatcacagcgcctgcagaggtggaggtggccgatgaaaccaaatgctgctgtttcttcaagaggagaaagagaaaatcgctgcagcgacacaagtgaccctgggcgcgtgcagccccctgaatcttctccgtgcagccccttggggcgcgaccttgtgcgaggccctcggggcccacccacagcggcccagggccagaccctggctggaagccagaacgcagactgcaggggccgcgcctggctcaggcggccccacccccgggacgtggggtcacttccttcatgtaagactttggccgaaatttctacacctgtgtctagtcctcccctccaagagcattaactatttaaaacaaggaaaagagg

SEQ ID NO: 15964 - DNA, 529 bp, Homo Sapiens
gtggctgaagccggctccccaaccaaaatgctgcaccaaagctcgggcgccgcgggcacggctgctgcagtctcttcccagcctggccctggcaaggggcgggtgggcgctgccaggcgggtgcttctcgacgcacttgctcccggaggctgcgccccggcgcctggaacccgaggtgggaggaccggttggtgtcaccctgctcggccctcagccctgccgcgtggggcgcgtgggcacggagcttcctgcctctctgctccgacacccggcaagcagccggagacaaaacgccttaaagcccccggcccagccctgcaggtatattgcaggggcctgggggcggccctggactggcgggcggttccccagtggggtgccctggaggctgccgggcagagtggagcagcttggggccgtgcccagggcggtggctgtgagtctagtttttgctttaccaagtgtacagaaatggcatttacgtttctctgatgctcccttgaagccatagaatttaggggcttttttt

SEQ ID NO: 15965 - DNA, 514 bp, Homo Sapiens
tgtattggtggtgctggcttggtccagttcatcctccgacttggatccgtcacgttggtcctgacggtactgctgcaggctattgaggagcaccgcctcaatctgctcctggcaagctttgagacaatcctagaacaatggtccagaccagagttgttagtaagaggaacaggacatagagcatcctacggagaaaacatgcgtaatttagcttgcataagtctgtgctagtttccagtagaaataaatgtgaagtaaaggagggatgttcttaaagtgccaaggaacctcactactccaggtggggtccatggactggcagcatcagcatcacctgcgagcttgttggaaccgcagaatctcagtcaacccaggccgagctattcagaacctgccttttagtggagcccaggtgattggcattctgagaagcactggcctaaatgatggtcacttatggatgcctggtaatcaaggggccaaccagatgctttctgcctggggtattaggcac

SEQ ID NO: 15966 - DNA, 1097 bp, Homo Sapiens
ccacgcgtccgaggagggagaggggccgccgggctggccatggagctgctgtgccacgaggtggacccggtccgcagggccgtgcgggaccgcaacctgctccgagacgaccgcgtcctgcagaacctgctcaccatcgaggagcgctaccttccgcagtgctcctacttcaagtgcgtgcagaaggacatccaaccctacatgcgcagaatggtggccacctggatgctggaggtctgtgaggaacagaagtgcgaagaagaggtcttccctctggccatgaattacctggaccgtttcttggctggggtcccgactccgaagtcccatctgcaactcctgggtgctgtctgcatgttcctggcctccaaactcaaagagacaagcccgctgaccgcggagaagctgtgcatttacaccgacaactccatcaagcctcaggagctgctggagtgggaactggtggtgctggggaagttgaagtggaacctggcagctgtcactcctcatgacttcattgagcacatcttgcgcaagctgccccagcagcgggagaagctgtctctgatccgcaagcatgctcagaccttcattgctctgtgtgccacggactttaagtttgccatgtacccaccgtcgatgatcgcaactggaagtgtgggagcagccatctgtgggctccagcaggatgaggaagtgagctcgctcacttgtgatgccctgactgagctgctggctaagatcaccaacacagacgtggattgtctcaaagcttgccaggagcagattgaggcggtgctcctcaatagcctgcagcagtaccgtcaggaccaacgtgacggatccaagtcggaggatgaactggaccaagccagcacccctacagacgtgcgggatatcgacctgtgaggatgccagttgggccgaaagagagagacgcgtccataatctggtctcttcttctttctggttgtttttgttctttgtgttttagggtgaaacttaaaaaaaaccattctgcccccacctagatcatatttaaagataatttagaagtgagagcagaaggtcgacgcagagcagaaggtcggcggggt

SEQ ID NO: 15967 - DNA, 698 bp, Homo Sapiens
  misc_feature (104)..(104): n is a, c, g, or t
  misc_feature (108)..(108): n is a, c, g, or t
  misc_feature (136)..(136): n is a, c, g, or t
ctctgcccctgggtggctggtggctgggcctcagggtgggcaacgttaggggtttggcgaaagccgccccatgggattgagggacggggctgcactccaaccgnctgnacctgctcttcccccacccctgtgggancctcatcttcacgtgccatgtgtgctgaaagcccagggcccagcagggggcaatggcacctgttgacggaaaaggccgaggtgcttaccagtggaccttctgccccgcccctcccctgtcacttgtcgggcatccagggccccgacctgtgcctagccgccagggtgacagaaggcagaactgaagcggggtctgggccacgggccaggccactgccttttgtcctcagtgaccatacattcctgctctcggacttgaactctactgtaactgttttcttgaaatgaagctgtacaggacgattcactgccatgccagtcaggcgggcttgccatgttctgtgaatctcgagtgagcggtgccacccgcccccatacctccgccaccggccgctgtcggggatgccacagcctgccacggtcgcagccagacgtgagcttggcattgaagttgcaaagcggcccctggccgggctcgccgtcgctgtccagggccgtgtccggtgctgtggctgtaaagctgtaggaccctttttaataaatagagaattattaataaaaaa

SEQ ID NO: 15968 - DNA, 652 bp, Homo Sapiens
ccttatatccgccacctctccctcagagacccccgccccggctccctccacaccagccgggtttcatcctccagtgagcgccggcgcggtccttcccgggagacttcttccacctggcgtgttgtgctctgctcacgggaaggaggctggaggtccgctctgtgccaagggctctggggccctgggccagcgtgtctgtctgattttagaactgtaggtcagtggtgagtagtaggagcccaggctttgggcatcaaggcagttgtgtgtgccgggttacagcctgacacctgtgcgttgcatcggtttgcattatccgtgtgatttctaagtatcttagcgttgatgaactcatgtttgggaagaaataggcctctcccccagtcccatttagaatcgtggtccttctgttgcagctttatttaatgagcatggttcatgatacttattttattttcgaaagacagtcctatgtgtctccgcaccggccgctgtcggggatgccacagccttccacggtcgcagccagacgtgagcttggcattgaagttgcaaaagcgcccctggccgggctcgccgtcgctgtccagggccgtgtccggtgctgtggctgtaaagctgtaggaccctttttaataaatagagaggtatt

SEQ ID NO: 15969 - DNA, 461 bp, Homo Sapiens
ttcctcagccctctgtcatatggctgttttgcaaacctgtggagtctgttactgttctttctgcaaggactcacctccttgagccttggtttttgttgtagggattaaatgagataatatgagtggcagctcttcatgagtcctgcagtgctaagcaaatgtcagaaattggtgtattagactatttatctttgatcttctgaatggattgctgtcatggacacggacacggatcttcatctggttcattgtatttatatgtgagggatggatggctgcggggctccaagtaagttattgggatgtttttatattccaggtgtgctgtacattcttattttattttcacaatagctctgtgatgtaagtgctatctccatgagaaaattcataaagggtgttttgttcctttgaaatgtataatgtaaagacattaaatctcctcatttaaagaaaaaaaa

SEQ ID NO: 15970 - DNA, 854 bp, Homo Sapiens
  misc_feature (521)..(547): n is a, c, g, or t
gccatgtggtgaagaactcaagggtggggataaagtgctgatgacctgtgttggcattggtttctccaaccttagcaagaccctcaagtgataaccatcacaagataaggccccaatgcctacagacaaagcagaagctgccacggacaccaatgggaccaagtccaaatggattaatccaggacagaatagccacttgcttaattttctgtgaagaaatatcaatatacaaataaaagacatccctgtagcatatggtttccaagctgtttctacaagtggcattgccattgcccaggaggggcccagtcaccatgagagctcccttgccttacctggaggaagaatgtgccttcaggccacagtcgtgctgctagaacagtctcatagctgcagttcagctgtgcttcctcagcctactatcataggcttcctcagccctctgtcatatggctgttttccaaacctgtggagtctgttactgttctttctgcaaggactcacctccttgagcctggttnnnnnnnnnnnnnnnnnnnnnnnnnnntgagtggcagctcttcatgagtcctgcagtgctaagcaaatgtcagaaattggtgtattagactatttatctttgatcttctgaatggattgctgtcatggacacggacacggatcttcatctggttcattgtatttatatgtgagggatggatggctgcggggctccaagtaagttatcgggatgttttttatattccaggtgtgctgtacattcttattttattttcacaatagctctgtgatgtaaatgctatctccatgagaaaattcataaagggtgtttgttcctttgaaatgtataatgt

SEQ ID NO: 15971 - DNA, 520 bp, Homo Sapiens
  misc_feature (370)..(370): n is a, c, g, or t
  misc_feature (496)..(496): n is a, c, g, or t
agcggccgctcgcgatctagaactagcacacccaggtgtgccctctctggagctaggttccgagagctagcaccctgagaagaccaggcagaagctgggtttctatggcccagcagcccagaggtcttatggtatcacttctgctgtggccacaggcatgctcggtttccaggagaggaaacacagaccccacctctcagtagggaggagtctcaatgccatgtttcaagaatagcacggaggactggaggtcttgttgcagctgtcttagaaactagaactagccacacaggtttctccctttgtaaactatctatccttctgtatgaatttcgcctttgatggatattgctgtcccatggagttgtcnaactggtgtgatatcttgagagttgcgaggaaatggagtatcagtcatgaggggggttgggtctggagacttatcaatggggttcagctccagtctctcatgatggatccagagatcctgaggttncacatcttttgaattccctttgta

SEQ ID NO: 15972 - DNA, 905 bp, Homo Sapiens
gaattagttccgacttctccacccaaggatgtgactgttgtgagtaaagaggggaaacctaaggccataattgtgaattggcagcctccctccgaagccaatggcaaaattacaggttacatcatatattacagtacagatgtgaatgcagagatacatgactgggttattgagcctgttgtgggaaacagactgactcaccagatacaagagttaactcttgacacaccatactacttcaaaatccaggcacggaactcaaagggcatgggacccatgtctgaagctgtccaattcagaacacctaaagcctcagggtctggagggaaaggaagccggctgccagacctaggatccgactacaaacctccaatgagcggcagtaacagccctcatgggagccccacctctcctctggacagtaatatgctgctggtcataattgtttctgttggcgtcatcaccatcgtggtggttgtgattatcgctgtcttttgtacccgtcgtaccacctctcaccagaaaaagaaacgagctgcctgcaaatcagtgaatggctctcataagtacaaagggaattccaaagatgtgaaacctccagatctctggatccatcatgagagactggagctgaaacccattgataagtctccagacccaaaccccatcatgactgatactccaattcctcgcaactctcaagatatcacaccagttgacaactccatggacagcaatatccatcaaaggcgaaattcatacagagggcatgagtcagaggacagcatgtctacactggctggaaggcgaggaatgagaccaaaaatgatgatgccctttgactcccagccactccagcctgtgattagtgcccatcctattccacttccctcaatacacatcag

SEQ ID NO: 15973 - DNA, 795 bp, Homo Sapiens
tgctctgaggatccccctggcttgctcaggtctcggagtgtcaagtcctgaagtttctgcaccgactgagccagcttatcctctggcaagtcaggcaggtccagaacaaccagctccaccccgatctcctctaccattcgccgcttcctggcgggcttctgcttcttctctccctctggggctggagcgacgccctcaggccctgcctctgccttctcacttggtttctgggcctcagacttgtccccattttctttttctgtggccttttctccctcaggggttgcatctcccttaggttcagggggtgggggctgagagccatcctccactggggcctcagcttcctccttgagctccacctgctccccaggctcgtccttgctcccctctgcagggctctcctcttcctcctggacagtatcagtaccattctccttggcatctggtgtggtaccgcctccaaacaggctggaaatggtgttgccaagtttggtgagagtagattcctcttctgcgctgtcctctaccagtgtctcaaatacagactccaccctgtctagactgagcacgccactctcatccaggttgaagtgagccttgatgcccttggactcgtagtcaggatacttcttgaagctgtcacccaccccttttagcttcactgtggtcagattctgggagccaaatacccgaagatcttcaggccccaggaagcccaggtcgccctagttgatgtggaaattgaaatcatggctgtagcggttaaatatgatgacgtgcgttgaggaagat

SEQ ID NO: 15974 - DNA, 448 bp, Homo Sapiens
tgtcaagtctcctcaggtaaagtaggcttggctccctgaccaataatcggtcttccactctcccaagttcctagtaagattcacttatgaagagaagaaacggtctcaagtgacgtgtgaccactacgcttgaacgtctgggaaccttcaatgtagttactgagaccatgaaccacaaaaataggtttgagtgaggtgtgagctagacctttctggaggctgaaagcattcacacacacacccctctgctagttacatggacacagacctgagcaagccaggcctggcttgctcaggtctagacagggtggagtctgtatttgagacactggtagaggacagcgcagaagaggaatctactctcaccaaacttggcaacaccatttccagcctgtttggaggcggtaccacaccagatgccaaggagaatggtactgatactgtccag

SEQ ID NO: 15975 - DNA, 495 bp, Homo Sapiens
cacttcacccaccgcaattcatttagtagcaggcaaaggggcagttccggcacggctttctcaggcctatgccggagcctcaagggttggagagcggtaagtcaggcagtgctcggggagttgcagcaggacatcaccaggagggcgaagcggccacgggaggggggccccgggacattgcgcaacaaggaggctgcaggggctcggcctgcgggcgccggtcccacgaggcactgcggcccagggtctggtgcggaaagggcccacagtggacttggtgacgctgtatgccctcaccgctcagcccctggggctggcttggcagacagtacagcatccaggggagtcaagggcatggggcctagtctggaagctccgaccgacatcacggagcagccttcaagcattccattacgccccatctcgctctgtgcccctccccaccagggcttcagcaggagccctggactcatcatcaataaacactgtttcagc

SEQ ID NO: 15976 - DNA, 1174 bp, Homo Sapiens
aacgggtgatgcggttggggcggagtgaatgagctctcaggagggaggatggtgcaggcaggggtgaggagcgcagcgggcggcgagcgggaggcactggcctccagagcccgtggccaaggcgggcctcgcgggcggcgacggagccgggatcggtgcctcagcgttcgggctggagacgaggccaggtctccagctggggtggacgtgcccaccagctgccgaaggccaagacgccaggtccggtggacgtgacaagcaggacatgacatggtccggtgtgacggcgaggacagaggaggcgcgtccggccttcctgaacaccttaggctggtggggctgcggcaagaagcgggtctgtttctttacttcctccacggagtcggcacactatggctgccctctgggctcccagaacccacaacatgaaagaaatggtgctacccagctcaagcctgggcctttgaatccggacacaaaaccctctagcttggaaatgaatatgctgcactttacaaccactgcactacctgactcaggaatcggctctggaagctagaggaaccagacctcatcagcccaacatcaaagacaccatcggaacagcagcgcccgcagcacccaccccgcaccggcgactccatcttcatggccaccccctgcggcgggacggttgaccaccagccaccacatcatcccagagctgagctcctccagcgggatgacgccgtccccaccacctccctcttcttctttttcatccttctgtctctttgtttctgagctttcctgtctttccttttttctgagagattcaaagcctccacgactctgtttcccccgtcccttctgaatttaatttgcactaagtcatttgcactggttggagttgtggagacggccttgagtctcagtacgagtgtgcgtgagtgtgagccaccttggcaagtgcctgcgcagggcccggccgccctccatctgggccgggtgactgggcgccggctgtgtgcccgaggcctcaccctgccctcgcctagtctggaagctccgaccgacatcacggagcagccttcaagcattccattacgccccatctcgctctgtgcccctccccaccagggcttcagcaggagccctggactcatcatcaataaacactgttacagcaaaaaaa

SEQ ID NO: 15977 - DNA, 680 bp, Homo Sapiens
tgaacttctacaataatgacatttcctgcaccaacaaggccaacctcgtcccaagtggccgaccatctggatcacatcaaggaggtggcaggagccagagccgtgggttttggtggggactttgatggtgttccaagggtccctgaggggctggaggacgtctccaagtatccagacctgatcgctgagctgctcaggaggaactggacggaggcggaggtcaagggcgcactggctgacaacctgctgagggtcttcgaggctgtggaacaggccagcaacctcacacaggctcccgaggaggagcccatcccgctggaccagctgggtggctcctgcaggacccattacggctactcctctggggcttccagcctccatcgccactgggggctcctgctggcctccctcgctcccctggtcctctgtctgtctctcctgtgaaacctgggagaccagagtcccctttagggttcccggagctccgggaagacccgcccatcccaggactccagatgccaggagccctgctgcccacatgcaaggaccagcatctcctgagaggacgcctgggcttacctggggggcaggatgcctggggacagttcaggacacacacacagtaggcccgcaataaaagcaacaccccttcacatcctggggtacgtgtcatcggcaaa

SEQ ID NO: 15978 - DNA, 1055 bp, Homo Sapiens
cctctggtgcctctcctggcaggcagagtggctcctcacagcctgaagctcatccttctgcacgggccagccaggccagcacagaggcaccagtgcagcagtgcacacaggtccccggggaccccaccatgtggagcggatggtggctgtggccccttgtggccgtctgcactgcagacttctttcgggacgaggcagagaggatcatgagggactcccctgtcattgatgggcacaatgacctcccctggcagctgctggatatgttcaacaaccggctgcaggacgagagggccaacctgaccaccttggccggcacacacaccaacatccccaagctgagggccggctttgtgggaggccagttctggtccgtgtacacgccctgcgacacccagaacaaagacgccgtgcggaggacgctggagcagatggacgtggtccaccgcatgtgccggatgtacccggagaccttcctgtatgtcaccagcagtgcaggcattcggcaggccttccgggaagggaaggtggccagcctgatcggcgtggagggcggccactccattgacagcagtttgggcgtcctgcgggcactctatcagctgggcatgcggtacctgaccctcacccacagctgcaacacgccctgggctgacaactggctggtggacacgggagacagcgagccccagagccaaggcttgtcaccctttgggcagcgtgtggtgaaggagctgaaccgtctgggggtcctcatcgacttggctcacgtgtctgtggccaccatgaaggccaccctgcagctgtccagagccccggtcatcttcagccactcctcggctacagcgtgtgcgcaagccggcgcaacgtgcctgacgacgtcctgaggctggtgaaacagacagacagcctggtgatggtgaacttctacaacaattacatttcctgcaccaacatctcctgagaggacgcctgggcttacctggggggcaggatgcctggggacagttcaggacacacacacagtaggcccgcaataaaagcaacaccccttc

SEQ ID NO: 15979 - DNA, 480 bp, Homo Sapiens
ggaagatttgaccggcaggcttctgcggagggctgcttctacaacgctgactacctggcggcccgagcccggctggcaggtgaactggcaggccaggaagaggaggaagccctggaggggctggaggtgatggatgttttcctccggttctcagggctccacctctttcgggccgtagagccagggctggtgcagaagttctccctgcgagactgcagcccacggctcagtgaagaactctaccacccctgccgcctcagcaacctggaggggctagggggccgtgcccagctggctatggctctctttgagcaggagcaggccaatagcacttagcccgcctgggggccctaacctcattacctttcctttgtctgcctcagccccaggaagggcaaggcaagatggtggacagatagagaattgttgctgtattttttaaatatgaaaatgttattaaacatgtcttctgccaaaaaa

SEQ ID NO: 15980 - DNA, 480 bp, Homo Sapiens
taccccatgtgctgtagccaagcgcttcccctcatcttagggctgtctctggggtgcagccttgagcctcctgcgggtttcctggatccagggggagggagaagacccctgtgtcgaggctgtaggggagcgaggagggccacagaatccagattccagagctcggctagaccaaagtgatgaagacttcaaaccccggattgtcccctactacagggaccccaacaagccctacaagaaggtgctcaggactcggtacatccagacagagctgggctcccgtgagcggttgctggtggctgtcctgacctcccgagctacacagtccacatgggcacgtggctgtgaaccgtacgctggcccatcacttccctcggttactctacttcactgttcccacaaagcctctatcctgctaggaaccctacaaagaaaacagctacaaaattaaataaagtctcccgggtatgaacaacagtg

SEQ ID NO: 15981 - DNA, 802 bp, Homo Sapiens
  misc_feature (73)..(73): n is a, c, g, or t
  misc_feature (78)..(78): n is a, c, g, or t
agaaggccctgaggagttgggaggaagggagaacaatgtgcaggcaaagcaaggaaacagccagctcaggtcnccgcnccaggggcccagaaggataaaggccgtgcagtaaagggaacatacggttcttctctttggtcaggcaaaggcccgaatatgggcctgttaggtgaaagggctgaagggcacaggctctgcccttggaccctagctttaggctcatcacattgaggcggtgatggagcgagacgaaggcaggaagacagagcaggcagtggatacctgcttcaaggcagagtttgagcagattgtcctggggaagcgggtcatccggaaaacggaccttaacaagaagctggtgcaggagctgttgctgtgttctgcagagctgagcgagttcaccacagtggtggggaacaccatgtgcaccttggacttctatgaagggcaaggccgtctggatggggctctctgctcctacacggagaaggacaagcaggcgtatctggaggcagcctatgcagccggcgtccgcaatatcgagatggagtcctcggtgtttgccgccatgtgcagcgcctgcggcctccaagcggccgtggtgtgtgtcaccctcctgaaccgcctggaaggggaccagatcagcagccctcgcaatgtgctcagcgagtaccagcagaggccgcagcggctggtgagctacttcatcaagaagaaactgagcaaggcctgagcgctgccctgcacctccgcagacctgctgtgatgacttgccattaaaagcattgtccaaaaaaaacaa

SEQ ID NO: 15982 - DNA, 450 bp, Homo Sapiens
agcgatattctgttaggtgaaagggctgaagggcacaggctctgcccttggaccctagctttaggctcatcacattgaggcggtgatggagcgagacgaaggcaggaagacagagcagtcaggctaggactcgccagctcctaggagctgcccttgtccttgttgtccatcaggtcataccaccgggctacaccctgggaaaggtctgtctcagctaggtccagctgcaccttccccagcagctcacgctctcttgacatgaaggaggaattagacttgacagagacatccagctttcgtctctgggcctcatccagggggagttcccactcaaaccgttcatttaaattcaggactcagggtcctcttcttctgtgaggtcctcctcttggtgcctcggttcttgtctggcagtaagcaacagtgacacatagggatcaggaggatccg

SEQ ID NO: 15983 - DNA, 820 bp, Homo Sapiens
  misc_feature (168)..(168): n is a, c, g, or t
  misc_feature (498)..(498): n is a, c, g, or t
gattcacctcgcaagtggttccctcattcgagtgctccggcgcacagacccgcgccccgccgtccgcgagcctcccgagagccgtcccttcgtccggccctggagcattgcgtgttgtcgccggtgtcgcagtgcgaggaatggcgccgcgggtgtagcggctcgtcntgcgcaggccgagtgggcccagagaagcgaggaactccgcagctcgtcgacacgtctcgtctcctgtcccaattcagggcttggtgaggtgactcgcggtcgcgggtgactcgccgggcaggacactgcctggaacgcctggagcgcctcccactgcagacgtctgtccgcctccagccgctctcctctgacgggtcctgcctcagttggcggaatggcggccacgggagccaatgcgagaaagctgaaagtcacaagtctggagcccggcactgtggtcataacagagcaggcagtggatacctgcttcaaggcagagttgagcagatngtcctggggaagcgggtcatccggaaaacggaccttaacaagaagctggtgcaggagctgttgctgtgttctgcagagctgagcgagttcaccacagtggtggggaacaccatgtgcaccttggacttctatgaagggcaaggccgtctggatggggctctctgctcctacacggagaaggacaagcaggcgtatctggaggcagcctatgcagccggcgtcgcaatatcgagatggagtcctcggtgtttgccgccatgtgcagcgcctgcggctccaaggcggcgtggtgtgtgtcaacctcctgaaccgctggaagggc

SEQ ID NO: 15984 - DNA, 650 bp, Homo Sapiens
cctctgccggatcggtgtcacaaggctccaaggcatatggctcccactgctatgcttggttatgtcacccacaatcctgcacagatgcagatctgccctgcagaagcggccttctgaaaacctggtgtctgtgctcagtggggctgagggatccttcgtgtcctccctggtgaagagcattggtaacagctactcatacgtctgggattgggctccatgaccccacacagggcaccgagcccaatggagaaggttgggagtggagtagcagtgatgtgatgaattactttgcatgggagagaaatccctccaccatctcaagccccggccactgtgcgagcctgtcgagaagcacagcatttctgaggtggaaagattataactgtaatgtgaggttaccctatgtctgcaagttcactgactagtgcaggagggaagtcagcagcctgtgtttggtgtgcaactcatcatgggcatgagaccagtgtgaggactcaccctggaagagaatattcgcttaattcccccaacctgaccacctcattcttatctttcttctgtttcttcctccccgctgtcatttcagtctcttcattttgtcatacggcctaaggctttaaagagcaataaaatttttagtctgcaaaaaa

SEQ ID NO: 15985 - DNA, 761 bp, Homo Sapiens
ccacgcgtccggctgcctcccatggccctgcccagtgtgtcctggatgctgctttcctgcctcattctcctgtgtcaggttcaaggtgaagaaacccagaaggaactgccctctccacggatcagctgtcccaaaggctccaaggcctatggctccccctgctatgccttgtttttgtcaccaaaatcctggatggatgcagatctggcttgccagaagcggccctctggaaaactggtgtctgtgctcagtggggctgagggatccttcgtgtcctccctggtgaggagcattagtaacagctactcatacatctggattgggctccatgaccccacacagggctctgagcctgatggagatggatgggagtggagtagcactgatgtgatgaattactttgcatgggagaaaaatccctccaccatcttaaaccctggccactgtgggagcctgtcaagaagcacaggatttctgaagtggaaagattataactgtgatgcaaagttaccctatgtctgcaagttcaaggactagggcaggtgggaagtcagcagcctcagcttggcgtgcagctcatcatggacatgagaccagtgtgaagactcaccctggaagagaatattctccccaaactgccctacctgactaccttgtcatgatcctccttctttttcctttttcttcaccttcatttcaggcttttctctgtcttccatgtcttgagatctcagagaataataataaaaatgttactttat

SEQ ID NO: 15986 - DNA, 1299 bp, Homo Sapiens
ctcggggttggcgggggtagggggacgagggagaagctttaagggtcaagcctgagcatctgggacacgagctgggagctaagcctcatcggaagaagccgggtaggctggcctgggaaggttcttggaggcagcagccctctagagtgtgaggaaaatgttgggattgcaggtgcgctcccctggaggccccagggcccctgactctgaaggaggtggaggagctggagcagctgacccagcagctaatgcaggacatggagcatcctcagaggcagaatgtggctgtcaacgaactctgcggccgatgccatcaacccctggcccgggcgcagccagccgtccgcgctctagggcagctgttccacatcgcctgcttcacctgccaccagtgtgcgcagcagctccagggccagcagttctacagtctggagggggcgccgtactgcgcagggctgttacactgacaccctggacgacagtgtaacacctgcggggagcccatcactgaccgcatgctgagggccacgggcaaggcctatcacccgcactgcttcacctgtgtggtctgcgcccgccccctggagggcacctccttcatcgtggaccaggccaaccggccccactgtgtccccgactaccacaagcagtacgccccgaggtgctccgtctgctctgagcccatcatgcctgagcctggccgagatgagactgtgcgagtggtcgccctggacaagaacttccacatgaagtgttacaagtgtgaggactgcgggaagcccctgtcgattgaggcagatgacaatggctgcttccccctggacggtcacgtgctctgtcggaagtgccacactgctagagcccagacctgagtgaggacaggccctcttcagaccgcagtccatgccccattgtggaccacccacactgagaccacctgcccccacctcagttattgttttgatgtctagcccctcccatttccaacccctccctagcatcccaggtgccctgacccaggacccaacatggtctagggatgcaggatccccgccctggggtctggtcctcgcccatcctgcagggattgcccaccgtcttccagacaccccacctgaggggggcaccaggtttagtgctgctgctttcactgctgcacccgcgccctcggccggccccccgagcagcctttgtactctgcttgcggagggctgggagaccctccaggacattcccaccctcccccatgctgccaagttgtagctatagctacaaataaaaaaaaccttgttttccaga

SEQ ID NO: 15987 - DNA, 300 bp, Homo Sapiens
tctgaggatcctttagactgcgagaagagactgtgcgagtggttgccctggacaagaacttccacatgaagtgttacaagtgtgaggactgcgggaagcccctgtcgattgaggcagatgacaatggctgcttccccctggacggtcacgtgctctgtcggaagtgccacactgctagagcccagacctgagagaggacaggccctcttcagaccgcagtccatgccccattgtggaccacccacactgagaccaactgcccccgggccgccccggttccttctcttctttcatctccct

SEQ ID NO: 15988 - DNA, 661 bp, Homo Sapiens
agtgaaggagagtgaaaaagctcctcaatgttagggtatgaggctgttctcagcttggcaggtcattaaaagaccagcgccatgactcttgggcatggtcatggccaggcgctgggtggctactggcgaccaagccagagcagacaaactttctgaacattccgaggtcaacccatccgttgaactcagcccgacaaggtcctggagcagtgggacagtgagcctcgaccaacctagtgacagccttgattctacctgggaaggagagaccgatggcccccagcccactgccctgaaagaaaccttgccagagggccccagacaccacctcctaagcccagatggcagaactggaggcagtgttgctcgggcaacccccatggaattccaggactcctcagctcccccagcccagagtccgcagcatgccacagatagatggaggagagaaacgaccagattcttctgccctcagcccaaggaacacatctggggcacggtctgcggccatgaggccaggccgcctcccgcacccctaccccgtggcagcagcatacctctgcatttctggaatgtgtgtgcatcaatgatgtttgtatatttgaggcatttaaaaatctattttcgttacgagggcaaatgaagaatgaatattgatctt

SEQ ID NO: 15989 - DNA, 481 bp, Homo Sapiens
tacggtttctggagcaaacctgtcccccacctgtgaccagtcactctggggcaagcatcactgggaagggcatagccggagacctttctcctagtgactggtagtcagtggggcattttaggatgtcagggccccagggtgacatgtgtccagcttttctatggcagcagaggcctttccctcagacaagctacaaagtgcccaggatgccatccaccatggtccccttcagtacctcacgcatggtccccagcttctcctaggatcccagtggcatttatcagtggccagctacctgccaggcccgggctggggcacggtctgcggccatgaggccaggccgcctcccgcacccctaccccgtggcagcagcatacctctgcatttctggaatgtgtgtgcatcaatgatgtttgtatatttgaggcatttaaaaatctattttcgttacgagggcaaatgaagaatgaatattgatctt

SEQ ID NO: 15990 - DNA, 1775 bp, Homo Sapiens
tggctggtactggtcgcgagtgtatggatgagaaagggaggagagacagaaggaaccggcgacagtggtctcagggccgctccggggggcctcaagaaccggaggcagccccggaggctgccgcgggcggacacgccagaggaggaggccggggaatggccgcggtgtggcagcaagtcttagcagtggacgcgaggtacaacgcgtaccgcacaccaacgtttccacagtttcggacgcagtatatccgccggcgcagccagctgctgcgggagaatgccaaggctgggcaccccccagcgctgcgtcggcagtacctgaggcttcgggggcagctgctgggccagcgctacgggcccctctccgagccaggcagtgctcgtgcctatagcaacagcatcgtccgcagtagccgcactactcttgaccgcatggaggactttgaggatgatcctcgggccctgggggcccgtgggcaccgtcgttctgtcagcagaggctcctaccagctgcaggcgcagatgaaccgtgccgtctatgaggacaggccccctggcagcgtggtgcccacgtcagcagcagaggcaagtcgggccatggccggggacacgtcactgagcgagaactatgcctttgcgggcatgtatcatgtttttgaccagcacgtggatgaggcagtcccaagggtgcgcttcgccaatgatgaccgacaccgcctggcctgctgctcactcgacggcagcatctccctgtgccagctggtgcctgccccacccacagttgcttcgcgtgctacggggccacacccgtggtgtctccgacttcgcctggtccctctccaatgacatcctcgtgtccacctcactggattgccaccatgcgcatctgggcctctgaggatggtcgctgcatccgagagatccctgaccccgatagcgctgaactgctctgctgcaccttccagcctgtcaacaacaacctcactgtggtggggaacgccaagcacaacgtgcatgtcatgaacatctccacaggcaagaaagtgaaggggggctccagcaagctgacaggccgtgtcccttgctctgtcctttgatgcccctggccggctgctctgggcgggtgatgaccgtggcagtgtcttctctttcctctttgatatggccacagggaagctgaccaaagccaagcgtttggtggtgcatgaggggagccctgtgaccagcatcttagcccggtcctgggtcagccgcgaggcccgggatccctcactgctcatcaatgcttgcctcaacaagttgctgctctacagggtggtagacaacgaggggaccctgcagctgaagagaagcttccccatcgagcagagctcacatcctgtgcgcagcatcttctgtcccctcatgtccttccgccagggggcctgcgtggtgacgggcagtgaggacatgtgcgtgcacttctttgatgtggagcgggcggccaaggctgctgtcaacaagctgcagggccacagtgcacctgtgcttgatgtcagcttcaactgcgacgagagcctactggcctccagtgacgccagcggcatggtcatcgtctggaggcgggagcagaagtagggtcctgtcggccctgctgctgtcctccatcccacccctcttactccagcctcgtgttgtaaataaagtttcggtggtcatgctgagggccggctcccagctctgccggggacggacagggcagagggcagcgggcagctccaggaacacggtgaaaaa

SEQ ID NO: 15991 - DNA, 1007 bp, Homo Sapiens
aaggaaccggcgacagtggtctcagggccgctccggggggcctcaagaaccggaggcagccccggaggtggtccccgtatcccgggctatgctcttggatctgagaagggaaggcggagggcggcggggacaagatgggtggagaatgtcaagcaaggaatgctaggcgggggaggggcgttgctatggcgactggggaggggcggtgtctgttctgaatcgctgtgtgtcacccgggcgctgcccaggaagggcagggctggggtgatgaccatggtaacacccgggtgggagttcgtggacatctccggcgcggagggactcgatgtctatggcaatggtcgcctggtggaagggacggaactagatcccttcgctcgggacgctcacattccaggcccttgtcctgcaggctgccgcgggcggacacgccagaggcaggaggccggggaatggccgcggtgtggcagcaagtcttagcagtggacgcgaggtacaacgcgtaccgcacaccaacgtttccacagtttcggacgcagtatatcctgccggcgcagccagctgctgcgggagaatgccaaggctgggcaccccccagcgctgcgtcggcagtacctgaggcttcgggggcagctgctgggccagcgctacgggcccctctccgagccaggcagtgctcgtgcctatagcaacagcatcgtccgcagtagccgcactactcttgaccgcatggaggactttgaggatgatcctcgggccctgggggcccgtgggcaccgtcgttctgtcagcagaggctcctacccagctgcaggcgcagatgaaccgtgccgtctatgaggacaggccccctggcagcgtggtgccccacgtcagcagcagaggcaagtcgggccatggccggggacacgtcactgagcgagaactatgcctttgcgggcatgtatcatgttttgaccagcacgtggatgaggcagtcccaagggtgcgcttcgccaatgatgacc

SEQ ID NO: 15992 - DNA, 475 bp, Homo Sapiens
agattagctcattgaaagtgggaggggcattttcaaattctgcctaccacaggcaataactgcccatctcagctgtaggtggaatttttacccagaaaagataggccctagaagcctcatttcttttctccatggaaaaggacagccctctgctgcagcgttcaacttgtgtgtttactgacagagtgaactacagaaatagcttttcttcctaaaggggattgttctacattttgaagttattttttaataaaattgaattatgttgtgtattgtgcttcttaataggaaatgcattattggactgtttttgtaacatcctgtttattgcaaatagctagtatcgttcaaaaactgtataaaatacttttgtacatattagcaatgtctaatttgtatacacttcagttaaatttccctaaaacttgaaaggggaccttgtagaaattaaaatatatacttagtctaaaaaaaa

SEQ ID NO: 15993 - DNA, 585 bp, Homo Sapiens
  misc_feature (152)..(220): n is a, c, g, or t
ctgagcagtcagaacgctctgtcagtaaacacacaagattcaacgctgcgcagagggctgtccttttccatggagaaaagaaatgaggcttctagggcctatcttttctgggtaaaaattccacctacagctgagatgggcagttattgccnnnnnnnnnnnnnnnnnnnnnnnnnnnnnnnnnnnnnnnnnnnnnnnnnnnnnnnnnnnnnnnnnnnnnatgagatgagacagtactcctgcaattatgttctatcgcacaatcaaccttaaaatatatctgtgggcttgagctaatcatatgcccctaaaacaggaggacgggagagagatatgaagcatgagaaagagcaggaaggctggtttgaagctggaggggaccacataagaaggaatgcaggcagccttgaggtgagagaggggcctccagctgagagccagcaaagaactgaattccgccaacaacctgaatgaacttagaagcagattcttccccagagcctccatgaaggaatgttgtcctgccaacccttatttcagcctttaagagctcggagcagagaatccgagccacactgtgccaga

SEQ ID NO: 15994 - DNA, 578 bp, Homo Sapiens
  misc_feature (530)..(530): n is a, c, g, or t
ggctaccccaaaacgatctgcttggtcacccgattgacccgtgcctttatcaccccatgctggttcccatggtgtttatgaaaccatatgcaatggcgttcccatggtgattgatgcccttgtttggtgatcagatggaccaatgcaaagccgcatggagactaagggagctggagtgaccctgaatgttctggaaatgacttctgaagatttagaaaatgctctaaaagcagtcatcaatgacaaaagaaagaagcagcagtcaggaagaccagatgtgaagagctggagcatgttcagatgagaggagacggaacacggggacacaccagcttgagcaagggacaacaggggaggactgatgactgacttcccacctttgaggtgctaatgtgtgtgtggtggcactggataaaagatcaatgttggctaggcaccatggcacacgcctgtagtcccagccactctggaggctaaggcgggaggattgcttgagcccagaagttggaggctgctatgagccgtgatcnatgccactgcactccagcaacctgggcaacagagtgagaccctgtctc

SEQ ID NO: 15995 - DNA, 1110 bp, Homo Sapiens
  misc_feature (142)..(142): n is a, c, g, or t
  misc_feature (995)..(1056): n is a, c, g, or t
ggaattctcgggatagttgagaaacctgaagctcaggagaggagtcactcccctggcagatgggtggctgggccagaagcagataccaggctttctgactcctgctctaggattctcaccacgtactggctagacttatacnttctcaaatcttaatttcctaaaggccggtcatgcccaacatggtcttcattggaggtatcaactgtaagaagaggaaagacttgtctcaggaatttgaagcctacattaatgcttctggagaacatggaattgtggttttctctttgggatcaatggtctcagaaattccagagaagaaagctatggcaattgctgatgctttgggcaaaatccctcagacagtcctgtggcggtacactggaacccgaccatcgaatcttgcgaacaacacgatacttgttaagtggctaccccaaaacgatctgcttggtcacccgatgacccgtgcctttatcacccatgctggttcccatggtgtttatgaaagcatatgcaatggcgttcccatggtgatgatgcccttgtttggtgatcagatggacaatgcaaagcgcatggagactaagggagctggagtgaccctgaatgttctggaaatgactttctgaagatttagaaaatgctctaaaagcagtcatcaatgacaaaagttacaaggagaacatcatgcgcctctccagccttcacaaggaccgccccggtggagccgctggacctggccgtgttctgggtggaagtttgtgatgaggcacaagggcgcgccacacctgcgccccgcaagccacgacctcacctggtaccagtaccattccttgaaccgggatgggtttcccccttggccgtctggcttaaaggggccttcatcccccttaaaatggtgggccttatggcaaccggaattgcttggggaaaaaaagggcggatttagaaaaacccccaaatccaagaaccctttgaaaaatgggtggggnnnnnnnnnnnnnnnnnnnnnnnnnnnnnnnnnnnnnnnnnnnnnnnnnnnnnnnnnnnnnnccgggggtaaaatcccttttaatcctcaatttaagggaaaaaatttggccaaaa

SEQ ID NO: 15996 - DNA, 870 bp, Homo Sapiens
  misc_feature (480)..(493): n is a, c, g, or t
atttacagcaggacgctttcagcagcagtctcttgggattttatctaagatgtttgaggatgagagggcaagaactataaacactcattaattctagtagtctccccatggccagacaatggcgattgttatttaatgagcttttcctttcaatggaattcagctctcacattagtatgatttcatttgatgtttcaaatagcaaagatgccgggagccactgagcccagccaagacttcagttgttgactgctttggaggcacaaacccatgcaagcgttagttccaaagttcagtgtgtacccttaaatgaacaatgaagcaggtaaaattacccttgaaaaaaatcccttggaccacccataaatgacagtgactttttcaatatggactcatcatagccagttttccttttgaagttggaactgatcacccttttgtcatctgtaccagatcagtagttggcttgtgttacatttnnnnnnnnnnnnnncgtgttttaaaccagtgcatataaattgtatgttaaatgtaagtaactttaagttgacttatctcttcacagtaatcaagcctcacgtaattcatgcttcttaaattcagccagccccccctctctgaaattttattatgtaaataatttgtgttccctgatcactcgtttaagttcttagttgtatgtcatctcttctctagcaggaattggcaaacttttttgtaaaggggtagaaagtgaagattttaggctttgcaggccatatagcctctgctgcaaatgctcagccctgctgttgtaatgtaaaagctgccacagacactacatgaacacgaatgagtgtggctggtgttccaataaaactttatttacac

SEQ ID NO: 15997 - DNA, 716 bp, Homo Sapiens
atgatgagtccatattgaaaaagtcactgtcatttatgggtggtccattggatttttttcaagggtaattttacctgcttcattgttcatttaagggtacacactgaactttggaactaacgcttgcatgggtttgtgcctccaaagcagtcaacactgaagtcttggctgggctcagtggctcctgcctgtaattacaagaaaatcagcccagcttcaagcagaaaatgccaaggaccagggctggggagcagatttcacgtaagaacatccagacactaagaaaacaccaaggaatactgtataagagacattgcagtcacgttgtgggagctgccactgagatgcagagtgtgggtctgcttggagaaaaggctctcacattccaagccgctgtccttacgtgtaaaagctttgaggtgcaccctcttccacactagctgatgtaggagttagaggtagtaaacgtgtgcatacaaaactcaaacctgttttgaaaagcccaccgtagaaagcatgcttaaaagatggaattcggctgtatgccagaaaatcagtagcattatggaaggaaattgaactagaagtttaaaaaacagccaacatgcaggcccttccccacagtagaagggagcctgggtattgtgcaatctcacacccactgaaaaaatgccacgcatgcctctaaatgctctgagaaagaatgctttgcacta

SEQ ID NO: 15998 - DNA, 546 bp, Homo Sapiens
cgtgaatggttgttttctacttgggatttctttcctgctttaggagatctattgggaaactgattataaccactcgggcaccatcgatgcccaagagataaggacagccctcaggaaggcaggtttcaccctcaacagccaggtgcagcagaccattgccctgcggtatgcgtgcagcaagcttggcatcaactttgacagcttcgtggcttgtatgatccgcctggagaccctcttcaaactattcagccttctggacgaagacaaggatggcatggttcagctctctctggccgagtggctgtgctgcgtgttggtctgacccggggtttcggacatcagtgacactccctgccccactgcttgcttcttgtcaccccttctctacaattttgtgaacatttatgctccagtggcattcactggttgttcatacctttcttgccctgggtctatttcagcagcactgagctatgagctatgtaagccgacccggtgggcccagtggagggaaagcaatcaattaaagttgtgagccaaaaaaaa

SEQ ID NO: 15999 - DNA, 467 bp, Homo Sapiens
  misc_feature (314)..(314): n is a, c, g, or t
ggtgactcatagaggatccctggcgatgtcgcgtgcatgtgaggcaggagagcatcaatggtgaaagcacaccagcccctgagaagccaagacacaatcttgtccctttcctttgcagtggctatgctgcgtgtaagtctgacccggggtatcggacatcagtgacactccctgccccactgcttgcttcttgtcaccccttctctacaattttgtaaacatttatgctcccagtggcattcactggtttgttcacacctttcttgccctgggtctatttcagcagcactgagctatgagccatgtaagccgancccggtgggcacagtggagggaaagcaatcaattaaagttgtgagccagaatggtttccacctttctctcgtgatatgctatctgggctgtatcctgggctttttatgctttgggaaagaagatgttctcgggacatggcacgcgaatcgcca

SEQ ID NO: 16000 - DNA, 493 bp, Homo Sapiens
  misc_feature (157)..(157): n is a, c, g, or t
  misc_feature (168)..(168): n is a, c, g, or t
  misc_feature (174)..(174): n is a, c, g, or t
  misc_feature (177)..(177): n is a, c, g, or t
  misc_feature (180)..(180): n is a, c, g, or t
  misc_feature (183)..(183): n is a, c, g, or t
  misc_feature (186)..(186): n is a, c, g, or t
ctccttgggggcatttgagtcgcagggcaccacaggttctcatttcagtacagaccccaaagacctgaggtgagaggtcccaagcacgtgtgactgtctcaggcagcagaagtaacccgagccggcctcaggcttccccagaggagaagcaggagcngccagcggccncggagnagnagnagnagnaggaggaggaggaggaggggtctggtgagggcaccacgataagtcctgtaaacttggcacctttcccggaggcagagttttgggccattctcacctctgttccaggcaccatccgtagtggttctctgtctgtagcttccgctcgtctgtgtgggtgatgattaaagcattctcattgcacagttctgtttttaaatacagagtctgatgcctcctatttgtaacaatgggtgtagctcccctgcccatcttggaggtgcatggcccatcagggatctttaaagtgggagcaggaaaggctgctaaa

SEQ ID NO: 16001 - DNA, 345 bp, Homo Sapiens
  misc_feature (273)..(300): n is a, c, g, or t
ttagacagcggacccccggcctggtgtggtaccaagctccggacgctggatgttgacctggacgaaggtgtactgccttaacgactttgaagaagatgacacaggtgaccacatttctctcccacgcctagctacctccactccagttcagcacccagagacctcaggtgagaggtcccaagcacgtgtgactgtctcaggcagcagaagttacccgagccggcctcaggcttccccagaggagatgcaggagccgccagcggccacggagannnnnnnnnnnnnnnnnnnnnnnnnnnnggggggtccgggctggttttgaggggtaccggggctcgaatttcg

SEQ ID NO: 16002 - DNA, 464 bp, Homo Sapiens
aaccattgtccacaaaactgatgttcttttggggttttatgtacagacttgtccaatcatgtgtgtggttcctgcgagttgctgatgactccgcattgaagctctctgagttctttgattttaagttgggtttatggaattttttcaaatgttggaaggcgtgtggttcttcctgccctccctccccttttggaaatatgaaagcaaatgtttagaagaattccttttgaaaagctgtgtcgtgttccctgtgaaactgagcaggtgtgtgttggcgcgctaagtgccacatgcttgtgtgtagaggaggaggtggccctgccggctccgcgctgctgtgcctgtgatccctacctgctccccgctcctgttgccagcagcactcactgcactcctttgtcatatactctgcatcactgtcatactcacaacttcgtgaataaagttgtgtgctttattcgtaa

SEQ ID NO: 16003 - DNA, 536 bp, Homo Sapiens
  misc_feature (24)..(24): n is a, c, g, or t
gcatgatgcagctgccttggcagnccagagcaagtcctcagaagatatcatcaagttttccaagttcccagcagcccaggcaccagaccccagcgagacaccaaagattgagacggaccactggcctggtcccccctcatttgctgtcgtaggacctgacatgaaacgcagatctagtggcagagaggaagatgatgaggaacttctgagacgtcggcagcttcaagaagagcaattaatgaagcttaactcaggcctgggacagttgatcttgaaagcaaatgtttagaagaattccttttgaaaagctgtgtcgtgttccctgtgaaactgagcaggtgtgtgttggcgcgctaagtgccacatgcttgtgtgtagaggaggaggtggccctgccggctccgcgctgctgtgcctgtgatccctacctgctccccgctcctgttgccagcagcactcactgcactcctttgtcatatactctgcatcactgtcatactcacaacttcgtgaataaagttgtgtgctttattcgt

SEQ ID NO: 16004 - DNA, 1013 bp, Homo Sapiens
  misc_feature (222)..(578): n is a, c, g, or t
  misc_feature (887)..(901): n is a, c, g, or t
  misc_feature (906)..(951): n is a, c, g, or t
  misc_feature (960)..(962): n is a, c, g, or t
  misc_feature (984)..(984): n is a, c, g, or t
  misc_feature (993)..(993): n is a, c, g, or t
tggtgggtgcgccgtgctctgcgccctctgccccgctctctgtgtgctgtgctgccggctgccgtgcgctttccgcgtgtcggttggcgcgcggtgggggcgtggtgttctgctgcgtggtgtgtcctggcgtgccgtgcttctgtgcctgcgtcggtgcggcgctgcggcgcgcgtgccgcctgctgccgcggctgtgtgcggccgctcgtggctgcgccnnnnnnnnnnnnnnnnnnnnnnnnnnnnnnnnnnnnnnnnnnnnnnnnnnnnnnnnnnnnnnnnnnnnnnnnnnnnnnnnnnnnnnnnnnnnnnnnnnnnnnnnnnnnnnnnnnnnnnnnnnnnnnnnnnnnnnnnnnnnnnnnnnnnnnnnnnnnnnnnnnnnnnnnnnnnnnnnnnnnnnnnnnnnnnnnnnnnnnnnnnnnnnnnnnnnnnnnnnnnnnnnnnnnnnnnnnnnnnnnnnnnnnnnnnnnnnnnnnnnnnnnnnnnnnnnnnnnnnnnnnnnnnnnnnnnnnnnnnnnnnnnnnnnnnnnnnnnnnnnnnnnnnnnnnnnnnnnnnnnnnnnnnnnnnnnnnnnnccacgcgtccggaagaaccacacgccttccaacatttgaaaatatgaaagcaaatgtttagaagaattccttttgaaaagctgtgtcgtgttccctgtgaaactgagcaggtgtgtgttggcgcgctaagtgccacatgcttgtgtgtagaggaggaggtggccctgccggctccgcgctgctgtgcctgtgatccctacctgctccccgctcctgttgccagcagcactcactgcactcctttgtcatatactctgcatcactgtaatactcacaacttcgtgaataaagttgtgtgctttattcgtnnnnnnnnnnnnnnngggcnnnnnnnnnnnnnnnnnnnnnnnnnnnnnnnnnnnnnnnnnnnnnngccttttcnnnttgggtatccacacaacgtggntgggcctanttagtgagtcgtatattagg

SEQ ID NO: 16005 - DNA, 878 bp, Homo Sapiens
  misc_feature (700)..(725): n is a, c, g, or t
tttcgccccacacctctccgatatattcggacaaccactggtcatttttgtttaccgacgtcaccatgtcctatttcctctctcaacgtcaaacgttgtctccacaaaatcaactatatctttattatctgtgctaattataagtggtaattagaattacgaccctgaccggaaggtggttgagacggaagatccctacaaattccccgtgcgcatggcatccagttgttcgagaccagcgcaaaggagaatgtcaacgtggaagagatgttcaactgcatcacggatctggtcctccgagcaaagaaagacaacctgcaataacagcatcagcaacaacaaaacgatgtggatcgttctgcagggctgaccagcagccagcctcatcttgtcgggtgcgtgtgcgtcaggagcagaagcggtgtctccgtccttgtgactgtcctggtatccacgggccctgaggatgcacggtgcctggggctcctgtgccggtgggcggggggcatgctggcctctgagcgatcaggcgaggccagcgagggtgtgcttgcaaattcaagcaataagaggggggttcctgggggcttccagcccaggctagaagcccccatggcttctggcagctggacatcagccccaggtattggggtgattttggtcatgacagtgtgcctgtcccactgttacacgcatgaannnnnnnnnnnnnnnnnnnnnnnnnnctcagggctggaccgacgtcctagtggacctgatgtgaaattcctgtcaaacaaacaccacttttcaatggtttgctaggagtatttctgtattgaaagtttctaattatgctttttaaaaaaatactaaaaataaaggttcaagctgccaaa

SEQ ID NO: 16006 - DNA, 1030 bp, Homo Sapiens
  misc_feature (839)..(839): n is a, c, g, or t
  misc_feature (872)..(873): n is a, c, g, or t
aatttccgggatatcatcggcgacagcggtgtgggcaagagcagtttactgttgcgttttgcagacaacactttctcaggcagctacatcaccacgatcggagtggatttcaagatccggaccgtggagatcaacggggagaaggtgaagctgcagatctgggacacagcggggcaggagcgcttccgcaccatcacctccacgtattatcgggggacccacggggtcattgtggtttacgacgtcaccagtgccgagtcctttgtcaacgtcaagcggtggcttcacgaaatcaaccagaactgtgatgatgtgtgccgaatattagtgggtaataagaatgacgaccctgagcggaaggtggtggagacggaagatgcctacaaattcgccgggcagatgggcatccagttgttcgagaccagcgccaaggagaatgtcaacgtggaagagatgttcaactgcatcacggagctggtcctccgagcaaagaaagacaacctggcaaaacagcagcagcaacaacagaacgatgtggtgaagctcacgaagaacagtaaacgaaagaaacgctgctgctaatggcacccagtccactgcagagactgcactgcggtccctcccccagcccggacacctcattcccctcccactacagggatcaagtgacctgggaagaaccgagttcaacaccaggatgtgtttccttagatttcctttcctaggcgatttccagggagagccctgattggacaatcacatcacagatcacactgcagtttccatgttagcactgtggatgggtttttaatcaataaaaactgggggtttcttctccnaacaaaaaaacaaaccccccccaacctccctanntctttccgccctcccggcctattttctcgggggtcccccctaacctgtaccccccctttcttccgcccaccagggtgcccccatcccagcgcccgcgctgccatgcccctcgcaatcccttttccctcggttgccccacccccctatcatgggcgaa

SEQ ID NO: 16007 - DNA, 579 bp, Homo Sapiens
atggcgaccgccacggagcaggagcggagatctgcgggaaaggtgggtgagaaactctgcgagaagatcatcaacatcgtggaggtgatgaatcggcatgagtacttgcccaagatgcccacacagtcggaggtggataacgtgtttgacacaggcttgcgggacgtgcagccctacctgtacaagatctccttccagatcactgatgccctgggcacctcagtcaccaccaccatgcgcaggctcatcaaagacacccttgccctctgagcgtcgctggatctctgggagctccttgatggctcccagaccttggcttttgggaattgcacttttgggcctttgggctctggaacctgctctgggtcattggtgagacttggaaggggcagcccccgctggcttcttggttttgtggttgccagcctcaggtcatccttttaatctttgctgacggttcagtcctgcctctactgtctctccatagccctggtggggtcccccttctttctccactgtacagaagagccaccactgggatggggaataaagttgagaacatgagtttgggctgaaaaa

SEQ ID NO: 16008 - DNA, 299 bp, Homo Sapiens
agacacccttgccctctgagcgtcgctggatctctgggagctccttgatggctcccagaccttggcttttgggaattgcacttttgggcctttgggctctggaacctgctctgggtcattggtgagacttggaaggggcagcccccgctggcttcttggttttgtggttgccagcctttgctgacggttcagtcctgcctctactgtctctccatagccctggtggggtcccccttctttctccactgtacagaagagccaccactgggatggggaataaagtaaaaaacatgaaaaaa

SEQ ID NO: 16009 - DNA, 824 bp, Homo Sapiens
  misc_feature (663)..(702): n is a, c, g, or t
cacagggatgagagttacctcggcgagttgtttaccttggaaaagctgttgacatctcataaacgctgggtatgaagacagtgcagtaaatgccatctgctatggggccaagattatgcttccaggtgttcttcgatatgaggacggcattgaggtcaatcaggagattgtggttatcaccacaaaaggagaagcaatctgcatggctattgcattaatgaccacagcggtcatctctacctgcgaccatggtatagtagccaagatcaagagagtgatcatggagagagacacttaccctcggaagtggggtttaggtccaaaggcaagtcagaagaagctgatgatcaagcagggccttctggacaagcatgggaagcccacagacagcacacctgcccacctggaagcaggagtatgttgactacagtgagtctgccaaaaaagaggtggttgctgaagtggtaaaagccccgcaggtagttgccgaagcagcaaaaactgcgaagcggaagcgagagagtgagagtgaaagtgacgagactcctccagcagctcctcagttgatcaagaaggaaaagaagaagagtaagaaggacaagaaggccaaagctggtctggagagcgggcccgagcctggagatggggacagtgataccaccnnnnnnnnnnnnnnnnnnnnnnnnnnnnnnnnnnnnnnnntggtttctgagtagtgaaggccacttgaagctgtaggagaaactaaagccttattgagagacattttatagatccttttgttgctgagagagtggaacatagtcctagacaggtgagagttt

SEQ ID NO: 16010 - DNA, 885 bp, Homo Sapiens
ttcacatttcaaataggacataaaggtccctagatttttaatcaaaatattttacaatttttgctctgctagcatgagatcaacaagaaaacccaacaggaatacataaaaaacttaacaagttgactttaataagtaaaaattacaacattcttctcccagcaatgaacaatttcattttttaaaagtaaacgaggcctaaaacaagagggcacaggaacaagtagtcagatggatttaggtgagcactgtacacaagctttgaggaagtgcaaaggactgacctctaggccagaacaagatggaaaactaccaggcccatcaggcctataacccagacaccagcatggacaaaactcagttatactgaattcagagacaaaattcagtgacactcttctaccacttatttagggttctacagcatttcactgagcagacttagattttgtattagtttatacaaaccttttaaacagaggggatttaaaaaatgcaaactaggactacgatgttaagacaaccactagcagacagctgcggacagtttactgggtctgaaggtgaggcttcccaactcaaacagagaagtcattgggataaactctgcctctttcatctttcaccacccatatccttaaaacaggacaagatgggatgaccacaccaggtaacatcaccgaggtctcaaagtagcagctaaaatgtgccagaactcttcaccctgtctaggacctatgttccactctctcagcaacaaaaggatctataacatgttttctcaataaggctttagtttctcctccagcttcaagtggccttcactactcagaaaccaattctacctcttttgctttcttcttcttcttccggtggtgtattccg

SEQ ID NO: 16011 - DNA, 933 bp, Homo Sapiens
atgatggaggtccaggggggacacagcctgggacagacctgcgtgctgatcgtgatcttcacagtgctcctgcagtctctctgtgtggctgtaacttacgtgtactttaccaacgagctgaagcagatgcaggacaagtactccaaaagtggcattgcttgtttcttaaaagaagatgacagttattgggaccccaatgacgaagagagtatgaacagcccctgctggcaagtcaagtggcaactccgtcagctcgttagaaagatgattttgagaacctctgaggaaaccatttctacagttcaagaaaagcaacaaaatatttctcccctagtgagagaaagaggtcctcagagagtagcagctcacataactgggaccagaggaagaagcaacacattgtcttctccaaactccaagaatgaaaaggctctgggccgcaaaataaactcctgggaatcatcaaggagtgggcattcattcctgagcaacttgcacttgaggaatggtgaactggtcatccatgaaaaagggttttactacatctattcccaaacatactttcgatttcaggaggaaataaaagaaaacacaaagaacgacaaacaaatggtccaatatatttacaaatacacaagttatcctgaccctatattgttgatgaaaagtgctagaaatagttgttggtctaaagatgcagaatatggactctattccatctatcaagggggaatatttgagcttaaggaaaatgacagaatttttgtttctgtaacaaatgagcacttgatagacatggaccatgaagccagttttttcggggcctttttagttggctaactgacctggaaagaaaaagcaataacctcaaagtgactattcagttttcaggatgatacactatgaagatgtttcaaaaaatctgaccaaaac

SEQ ID NO: 16012 - DNA, 564 bp, Homo Sapiens
atctgtttgttggtaccactctgtttatttctgtatgtaattcaaggtggaaatttgccaatacgtagttatttgcacactttaactcagcaggattattacacagctacagctatttctttatttatattttgggaaaagggatagaatcttcactttgttgtatcttcactttgtttctctttggaccctacccgtgagacactaataaattataatccatgttactgcttattctttccgtgtaaagtacttttcaagttgatcataagctgaggtaggttgatcataatatcaaaatgttatttttatgaaaactcatagaatcaactttggaagcccagtatgcttacaatggctgattgacaacacctatgaagagcaaggtattggagaactagtttggcaagtgttgatgaccctttatcatttctcttttagaaaagcaacaaaatatttctcccctagtgagagaaagaggtcctcagagagtagcagctcacataactgggaccagaggaagaagcaacacattgtcttctccaagtaagagaaacaacaaat

SEQ ID NO: 16013 - DNA, 481 bp, Homo Sapiens
  misc_feature (412)..(412): n is a, c, g, or t
  misc_feature (454)..(454): n is a, c, g, or t
tcatgcaccaggcacatttataaagcaacccatccacctggagcccaaaactgggttgacagattccagagaggcaaagtccttgatgaccccacaactcccactgcccctttaacaagggactcttaacaccttatgataacccaaatcctaaacactgttgcctctgccgcctcttccagacacagaaggcatgatcctgctgaacactggcctcgagggaactgtggctgaaaaccccgtgcccattgttcataatccaagtggcaacatcctgacgctggagtcctgcctgcagcagctggccacacatcccggacactggggcatccatttgcaaataggcgagccggcagccctccggccatccctggccttgctggctcatgttggtagaaactgagcacccagnggtggtgggtcagcggacctcagggcggaggcttcccacggngaggcaggaagaaataaaggtctttgg

SEQ ID NO: 16014 - DNA, 1449 bp, Homo Sapiens
  misc_feature (944)..(962): n is a, c, g, or t
  misc_feature (1086)..(1179): n is a, c, g, or t
ggagaaagccaaagacctttatttcttcctgcctccccgtgggaagcctccgccctgaggtccgctgacccaccacccctgggtgctcagtttctaccaacatgagccagcaagtccttgtggtagccctggggtagcctgtagtagactcgggtcctgtccacagccctagctgccagcaatgctgtcctcacagaggcatagtcgcccccagctgggttgtgctccactgtgacggtggcccggggggaggatgccagcagcctgcctatggctccagctgtgctgtggcccagcagcatggcctgcatctggaaggacacaggttgccagagccctggcacaactctagcatatctgtgagcagctgttccctgtagccactgcccagcacctcctcaggccagcctggtgccacagtcacgtgggggaagacctcagccacagctgtaagcagctctctgccagccacatggccggggaccgaaaaactcccgtgggagattttggccccaacccacacaggccaatgcaagaggccaaggctggagaggcgtgccagcaaggccagggatggccggagggctgcgggctccactatttgcaaatggatgccccagtgtccgggatgtgtggccagctgctgcaggcaggactccagcgtcaggatgttgccacttggagtatgaacaatgggcacggggttttcagccacagttccctcgaggccagtgttcagcaggatcatgccttctgtgtctggaagaggcggcagaggcaacagtgtttaggatttgggttatcataaggtgttaagagtcccttgttaaaggggcagtgggagttatggggtcatcaaggaccttgcctctctggaatctgtcaacccagttttgggctccaggtggatgggttgctttataaatgtgcctggtgcatgaagnnnnnnnnnnnnnnnnnnncgcagaagaagtaaagaagatagaataagaaaaaaatagagaagggggagctgggagataagaaaatatacaaacaagagggggagaaagcaaataagaagggaggaacgaggagtaggacggnnnnnnnnnnnnnnnnnnnnnnnnnnnnnnnnnnnnnnnnnnnnnnnnnnnnnnnnnnnnnnnnnnnnnnnnnnnnnnnnnnnnnnnnnnnnnncagcagaagcggggggaggccaggcagagggaggaccacacaccagcacacacgagggcgaagcaaaaacacagagtgtagtgagcaccatacaaccataagtgaaagatgtagaaacaatagccggaggaaaactggtaaagtaagcaagaccggataaaagcatgagaaaacaacaagcgaacaggcgacagcgacacgaagaagggtagaaaaacagtcgtcatcaacgacgatggattgatgaaagaaaaagaatctaacaccagg

SEQ ID NO: 16015 - DNA, 544 bp, Homo Sapiens
atcttctactatctggagggcacaagggccaagtatctggcagcaagggccgtaaagagcgagtcatggcgaatccacaccaagtacaggatgtggtccagaaggcaataggagcccaagtccatcactgacgagttgaaacagggcacctacatctactttgacttacgagaagtggggccagcggaagaaggaaggcttcacctttgagtaccgctacctggaggaccgggacctacagtgacaccggcccctccctctacccacccccttcccccgcatgctgatccccctgcccaggtgagggccctgccctggaagactggagggaggccccaagccacggggcatccccctctcccaggaagcagggagggggccgggaggttttcctctcagccccaccctgggggcccgggggcgagggctgccccctcctcccctccccagtgagggacattttttggtaaacctattttcattttggaaaatatttatgaataaatagttttatatgacggctggcagcagcggcctctcctgt

SEQ ID NO: 16016 - DNA, 705 bp, Homo Sapiens
gagcagtttgaagatatttggcagaagctccacaatgcagccaacgcgaaccagaaagaaaagtatgaggctgacctaaagaaggagattaagaagctacaacggctgagggaccaaatcaagacatgggtagcgtccaacgagatcaaggacaagaggcagcttatagacaacagcaagctcattgagaagacaaatggaacggttcaaagttgtggaacgaaaaaccaaaaccaaagcttacagcaaagagggcctgggcctggcccagaaggtagatcctgcccagaaggagaaggaagaggttggccagtggctcacgaataccatcgacacgctcaacatgcaggtggaccagtttgagagtgaagtggagtcactgtcagtgcagccacatggaggatgagatcttcaaccagtccagcagcacgcccacctcaaccacctccagctctcccatcccgcccagcccagccaactgtaccacggaaaactctgaagatgataagaagaggggacgttccacagacagtgaagtcagccagtctccagccaaaaacggctccaagcctgtccacagcaaccagcaccctcagtccccagctgtgccgcccacctacccctcattccctccccagtgagggacattttttggtaaacctattttcattttggaaaatatttatgaataaatagttttagatg

SEQ ID NO: 16017 - DNA, 469 bp, Homo Sapiens
atcgaacggtacaaagttgtggaacgagagaccaaaaccaaagcttacagcaaagagggcctgggcctggcccagaaggtagatcctgcccagaaggagaaggaagaggttggccagtggctcacgaataccatcgacacgctcaacatgcaggtggaccagtttgagagtgaagtggagtcactgtcagtgcagaccacgcaagaagaagggcgacaaggataagcaggaccggactgagggcttgaagcggcacatcgagaagcaacgctaccacgtgcgcatgctagagaacatcctgcggcatgcaggaacaatgacttccattcctcgttgacgccatccgcaagatcaaggacggacgttgagtactattgttgactcatcccaggaccccgacttcgagggagaacgagtttctctaagatgacctggacctcgaggacattccacaggcgctggtcgccaa

SEQ ID NO: 16018 - DNA, 1377 bp, Homo Sapiens
  misc_feature (257)..(481): n is a, c, g, or t
gccatcctagcatccagaggctgggccttcgttctcccaggcacagttccattttgactccactgtcaatgaattgatagcagagctcagtatccaaatgcatgttttaaaacaggtttttacatttgatttcccatttctcatatttaggtaaaacattgtcctataaattggggttgccacctgatagctctttttatgtggccaggtgcctccataaaattagatgcttgagatatcagatataccagctgtcnnnnnnnnnnnnnnnnnnnnnnnnnnnnnnnnnnnnnnnnnnnnnnnnnnnnnnnnnnnnnnnnnnnnnnnnnnnnnnnnnnnnnnnnnnnnnnnnnnnnnnnnnnnnnnnnnnnnnnnnnnnnnnnnnnnnnnnnnnnnnnnnnnnnnnnnnnnnnnnnnnnnnnnnnnnnnnnnnnnnnnnnnnnnnnnnnnnnnnnnnnnnnnnnnnnnnnnnnnnnnnnnntgtgagccaccatggtcagccttccatatgaatttctaaaaaagggattacaggtgtcagccaccgcggtcagccttccatataatttctaaaaaagactagggaaacacaccaaaaggccacagtagaaattttactataagtatcacctgagtatagcaacactagatttatttttaatgtgcatattgatgacttactcatacctctctgagcctatttcctgcagaatggtagtaacaatgcctaacttttaaaaaatacatgcgctaaactaccagcacctacctagcacatggtaggtacacaaacaaaagtccttcttcacagccccagcccctactctcaccttaggacaggtgacaagtctacaggtgtgtttacccggtccttccatcatatttctctcaggcaccctccccagtcacaaccatgatattggaaagaaggttctataggaatactctactcacagtttccctcttctagttctttgatgatttggtcacaggcgttcacttcatttctcaacatcctttcctgcttattttgtgagatcagtacagtcaggcaactgctggtgtaagaagtaatgttctaaaattatcttggcttgaaataaggtgatggacaagaaaaaactggaaagctcaaatgtaagatgggattattagtattatcacatgcaaaaaagcacgaaagaaacagatacgggaaaggccagaatcattttctaacctacaaagggaaaatatttaaaagatggcatctcttgtgttataatcacgacaacaaattaaagtctacccatctttgaatatagacgactttcaaaacctcattcgctataatgtattgcctttagtgaggactgtagaaaagatctgaaacacaaa

SEQ ID NO: 16019 - DNA, 999 bp, Homo Sapiens
  misc_feature (171)..(180): n is a, c, g, or t
ggtgtgaaaaccacccccagctacccttaatgccccagggaacacttactattctcagagttatgttgtatcaaaaacatcttgcatttttaggttctgggagtaaatttgaaacctgtattcagttcacgtctaactaagtttcaaaagctgcaccaaatctactaagcnnnnnnnnnnaatactcttcactgcatgctctgtctatatgcatgcgtttgaataataaatattaaatatgggggacgcacagaaccataaaattaaaaatgaaaccaaactgaacattaaacaatagtacatggtagctggagaaatgaataagggcaaaaaataaatttgaggtaacaatagtggcccaacaccactgatctgaaatatctgtaaaaattcaactaagtgtttggagattcaagtaacaaaccatctgctccaacttggtcagacttcccagagtccctgctgagtttcagtccatgagccggcactcacatagctccttgtaaatcctcttccgcactcggggcatgtcttcttgtgaaaactggaaaggctgctctaaggcgaggcacttgcagtactggagcacaaagactccacagtcactgtcgtttttctgttgtggaatacactgaagggaaaaacaaaatagtcattaaaacaagatccattacttctcttcagataagaaaaactcctttatggaaaaatgcgcaaaagataggaaacttttctctctccaggacagctggtatatctgatatctcaagcatctaattttatggaggcacctggccacataaaaagagctatcaggtggcaaccccaatttataggacaatgttttacctaaatatgagaaatgggaaatcaaatgtaaaaacctgttttaaaacatgcatttggatactgagctctgctatcaattcattgacagtggagtcaaaatggaactgtgcctgggagaacaaaggcccagcctctggatgctaggatggc

SEQ ID NO: 16020 - DNA, 789 bp, Homo Sapiens
  misc_feature (717)..(717): n is a, c, g, or t
tttgaacttttatgatgtgttttatggtttacaaaccacttaaagctcaccatttcttttgattcttacaagaactttctttatggaaggaaacattatcctcttttcatctcctagataaaaaggtaaattatttagcatataaatgattttcccaaggctaattcggacgagacagtagagctgggatttggatctagttttctctgagtcaaattcctctgatctttcttgaaagtcactttcattttgtcccaacacatctgagcagacaccagtggtttcagaacacgtgccatgtcttcttactttccttgcccctttctttcttaacaatattacacctgaggaacagcgcagaggcggtgactgactggggaaatggtgatacccattctaaacttcaggctcagcttctcattgtttgggggccctgaaggtaaatttttgcataagggaagtgaaaaaaataaacagctcaatcctggccaactgttctccgaggcatgcccgctttcctattgagaaaggcataaaggcttcccttttcttaaactgtccattctccagaaaatggtccggattgaatgtgtcaggggtggcccactctgtggggtccctgtgcagcgccgtcaaattggtcaggatcatggtacccttgggcaggtggtacccagccaaagtggtatcaactgtcacttccctgggaacgttcanggggatgatgttgcccattctctgcacctcatggatgacagcattggtgttggggataacatagggtaccga

SEQ ID NO: 16021 - DNA, 1442 bp, Homo Sapiens
  misc_feature (975)..(975): n is a, c, g, or t
gattatgcccaacacatctgagcagacaccagtggtttcagaacacgtgccatgtcttcttactttccttacccctttctttcttaacaatattacacctgaggaacagcgcagaggcggtgactgactggggaaatggtgatacccattctaaacttcaggctcagcttctcattgtttgggggcctgaaggtaaatttttgcataagggaagtgaagaaaataaacagctcagtcctggccaactgttctccgaggcatgcccgctttcctattgagaaaggcataaaggcttcccttttcttaaactgtccattctccagaaaatggtccggattgaatgtgtcaggggtggcccactctgtggggtccctgtgcagcgccgtcaaattggtcaggatcatggtacccttggatttctgggtagagggccatataaagcagagcccatcgcagagttgtggaagttgtctcggttccggcaaagaagaggtccagggtgctgcagatgaggttttcttcatggaaacttgaagtaggattgcctgtgtgctttgacatttctttaaggtaagcatcaataaagtctcttgtttctgcaggattccaatcctttctgtgtttgtcaatcatatgagaaacaaacaatttcagttttttccagttgctgaagagagtttggttggggtccaggcaggaaagttcagttatccatggaaagacattgtagagctggcatgtctttgaagcctccaagtatgtgactttcatctagtaacttcagcagctgctgaaaccaactatcctggtactcaaagcgttctccgaaggtgatggagcaaatgatattggaaactgcattgttgatcttgaaatgagggtcaaaaggctgtccgttctcctcttttattgcttcagtgaggtgttgggcctcctcctgaatgcgttcctctaagctcttctttcctaaaccanagttccttagtgctgtcagagtgaaccttctttgctccttccatgcctggccacttgacataatcaatccatttttcttaaagatatgttctcgcataggggtcacggggcggttcccaaagttttggtccatgtggataagggcttctttgattaagggcaagccagtaataagaactgcagatatgtcaccaagctccaagctaaaaaggttcccatatttcttcacaaacagctgaacctccaggtgcgactgctcgaagtccacaaggaagaagttgccaaggaagggcaggcgccagggccccggcgggtagttctttgggcgccgtcttttgagaaagtcagcagcgagcagaaaggcgacagtgcccagtaggagagtccgaggatggaccactgccccgagggcagccgccagagagcccatcgccgcgagcatggctcagacgtcctcctgctcttct

SEQ ID NO: 16022 - DNA, 398 bp, Homo Sapiens
gcggccgcctgtcaacaggagcccggccaccgcgcgacccggggccatcctggcctgggcttccccttgagggcccgcgacgggctgccgcgcagagggacgcgcgcgggcgcactggcgtccttgcccaagggcgggagcgtcagtgctcggcgctgctccgagtcagaggtggcgcgggacgcccctggttctccgacgccttcgaaagaacagcagctcgcgacctgcggggcattgaagtggcagcgtagccgaggggagcgataggcggagtgggccccccggcctcctggagagcctctcctatctgtttgtttgtctgtctctgcgtctttctctctgcgtgtcaacgtaagactcggtctctggatctctctctctttctgtctcccgcc

SEQ ID NO: 16023 - DNA, 540 bp, Homo Sapiens
cggccgccagcaacaggagcccggccaccgcgcgacccggggccatcctggcctgggcttccccttgagggcccgcgacgggctgccgcgcagagggacgcgcgcgggcgcactggcgtccttgcccaagggcgggagcgtcagtgctcggcgctgctccgagtcagaggtggcgcgggacgcccctggttctccgacgccttcgaaagaacagcagctcgcgacctgcggggcattgaagtggcagcgtagccgaggggagcgataggcggagtgggccccccggcctcctggagagcctgagataaagaggacaaagggggacagagataaaggccaccagggcaccagccggcaggctccagaaacgctgcgtggcagtagccctcaaacgcccggccgggcatggggccagacgccccggatccgggtttgcaaacgccccaggatttgcgtacatatgctcctcccggatataaagccccaaaccacgccacttcttaggaaaaactaaaaccacactaactgtagaactccacc

SEQ ID NO: 16024 - DNA, 876 bp, Homo Sapiens
  misc_feature (145)..(145): n is a, c, g, or t
  misc_feature (242)..(242): n is a, c, g, or t
  misc_feature (262)..(262): n is a, c, g, or t
cctggaggcagcagagcgagccttgcaggctcaggctcaggagctggaggagctgaaccgagagctccgtcagtgcaacctgcagcagttcatccaacagaccggggctgcgctgccaccgcccccacggcctgacaggggcccntcctggcactcaggtcgaagtggttctgggggaaggctggaaggtgaggaccgggcccagcccccactccaaagctgacttcccaacccacaggggnccctctgcccccagccagangaggagtccctcctgggcgctccctctgagtcccatgctggtgcccagcctaggccccgagggtatgtctgtgccccacctccccctggggcaccgggccctcctgtggctgcagccacctcagcctgtgtcctcccgcagtggcccccatgacgcagaactcctggaggtagcagcagctcctgccccagagtggttgtcctctggcagcccagccccaggctctgtgacagcctagtgagggctgcaagaccatcctgcccggaccacagaagggagagttggcgggtcacagagggctcctctgccaggcagtgggaagccctgggtttgggcctcaggaagctggggggtgcagtgggggactgccctagtccttgccaggtcgccagcaccctggagaagcatggggcgtagccagctcggaacttgccaggccccaaaggccacgactgcctgttggggacaggaaatgcatggacagtgtgctcaaactgtgggcatgtgcttgcctgcgggaaaggtccttcactgtgtgtacacagcaagagcatgtgtgtgccacttcccctaccccaacgtgaaaacctcaataaactgcccgaagcagcttg

SEQ ID NO: 16025 - DNA, 754 bp, Homo Sapiens
  misc_feature (272)..(272): n is a, c, g, or t
gcaatagatgcccattgccctcatcaccaattggcatatcctactgagcgcctgcacaagcatcgggctggtcaggagcggcaaagtgcggatgtcaagggcagcctggctctggtgacccgtgccctggaggcagcagagcgagccttgcaggctcaggctcaggagctggaggagctgaaccgagagctccgtcagtgcaacctgcagcagttcatctagcagaccggggctgcgctgccaccgcccccacggcctgacaggggccctcntggcactcagtggcccccatgacgcagaactcctggaggtagcagcagctcctgccccagagtggtgtcctctggcagcccagccccaggctctgtgacagcctagtgagggctgcaagaccatcctgcccggaccacagaaggagagttggcggtcacagagggctcctctgccaggcagtgggaagccctgggtttggcctcaggagctgggggtgcagtgggggactgccctagtccttgccaggtcgccagcaccctggagaagcatggggcgtagccagctcggaacttgccaggccccaaaggccacgactgcctgttggggacaggagatgcatggacagtgtgctcaagctgtgggcatgtgcttgcctgcgggagaggtccttcactgtgtgtacacagcaagagcatgtgtgtgccacttcccctaccccaacgtgaaaacctcaataaactgcccgaattttataaaaaaa

SEQ ID NO: 16026 - DNA, 346 bp, Homo Sapiens
tggcttccatggttctgtagggtagtgagtcggggttgtggctgcagcagagcaggagatgcttgcccgagtgggagcaacccacccccgtgtccccaatgcctcactcctggcttctagtgcagccctttgtagactcacctcgcaagaaggaagatctgcctggagacctgatcccagtccagctttttgaccataggtcatctttgtccccttgctcctttgcatcatgtcaaaaattgcccagtgttcctagttaaatgttcagaggggagaaatagatatattttaaataatgttttgctaatgaaaagagtaaatatttttgtttaaatcagcaaaaaaa

SEQ ID NO: 16027 - DNA, 493 bp, Homo Sapiens
caacccacccccgtgtccccaatgcctcactcctggcttctagtgcagccctttgtagactcacctcgcaagaaggaagatctgcctggagacctgatcccagtccagctttttgaccataggtcatctttgtccccttgctcctttgcatcatgtcataaaatttgaggatatcagctgattattttttcttccaagaatgaaaatcaagcagaattgattcctacacgaaaaaaaagcacacgaatgccaaacctttcctttggtggactggacactaaccagatgagagtaaatttcttatccgtggacgtatgtaagctactgctgctgtgtgctctccacagccatatttattgtattaaacaatcagcactaaaccttcaaaaattgcccagtgttcctagttaaatgttcagaggggagaaatagatatattttaaataatgttttgctaatgaaaagagtaaatatttttgtttaaatcagcaaa

SEQ ID NO: 16028 - DNA, 452 bp, Homo Sapiens
  misc_feature (117)..(173): n is a, c, g, or t
gcggccgcagcagcgccgcctcgtcccccgccgccggccgctcgcccgccgaccaccgcggctacgccagcctgcgcgccgcctcgcccgccccgtccagcgcgccctcgcacgcgnnnnnnnnnnnnnnnnnnnnnnnnnnnnnnnnnnnnnnnnnnnnnnnnnnnnnnnnngacgacgagttcgaagacgacctgctcgacctgaaccccagctcaaactttgagagcatgtccctgggcagcttcagttcgtcgtcggcgctcgaccgggacctggattttaacttcgagcccggctccggctcgcacttcgagttcccggactactgcacgcccgaggtgagcgagatgatctcgggagactggctcgagtccagcatctccaacctggttttcacctactgaagggcgcgcaggcagggagaagggccggggggggtaggagaggag

SEQ ID NO: 16029 - DNA, 559 bp, Homo Sapiens
  misc_feature (477)..(477): n is a, c, g, or t
  misc_feature (524)..(524): n is a, c, g, or t
tcgtcccccgccgccggccgctcgcccgccgaccaccgcggctacgccagcctgcgcgccgcctcgcccgcccgccgagccgaggccatggtgcagcaaaccaacaatgccgagaacacggaagcgctgctggccggcgagagctcggactcgggcgccggcctcgagctgggaatcgcctcctcccccacgcccggctccaccgcctccacgggcggcaaggccgacgacccgagctggtgcaagaccccgagtgggcacatcaagcgacccatgaacgccttcatggtgtggtcgcagatcgagcggcgcaagatcatggagcagtcgcccgacatgcacaacgccgagatctacaaggcggctgggcaaacgctggaagctgctcaaagacagcgacaagatccctttcattcgagaggcggagcggctgcgcctcaagcacatggctgactaccccgactacaagtaccggcnccagaaagaaggtgaagtccgggcacgccaactccagctcctcggcncgccgctcctcccaagccgggggagaagggagaca

SEQ ID NO: 16030 - DNA, 485 bp, Homo Sapiens
ctgggagcggggagccagcggggtgcggcgccggagtgcggggagaaccaccaggcgccggaattggggagcacgtggagggggcagcggctccagccccagaccgccgcgctctgtcactttgcattaagaaagcttccggggaatgcacacggcctggccgccgccttcgtgcagcccgccctgcaggtgcaggaagaaaagaataatcgcacccgtttctcaggtgcttacttcaccatgtccgatccggacatgaggctctgcctgcagtcagcaacttggaatattcagacttcagaccagcatcacagattataaccctccgtaaatcatctgcatcccagctcccatcaaaagccagcctgaaggacccatggacacgtgactccagtgttctcaacaacatcttaagatcaagttggtttgcacaacatttgcatctacttgggacaaagcaagaacaataagggcaaaagagtgaa

SEQ ID NO: 16031 - DNA, 565 bp, Homo Sapiens
tgatggtagaggtggaagactgatttgcattttcaccaggtgagacctggttactcattggttgatgaggaaagagatgatagccagggcggcataaaacggcaatgagctcagtaaacaacccccttcccgtgatcttcgtggcttcccgcccagacgtgtgaccaagatagcaaggagcagtctttaaggcgacacggcagagaggcagaaaaagatgggccttaccggttagttaagaaaaaaagaggacctgttgcctgtccctctagctttgaactacaaagtggaggggaagtttgtctggattttcctgtagaactgagggcaggacatgaggctctgcctgcagtcagcaacttggaatattcagacttcagaccagcatcacagattataaccctccgtaaatcatctgcatcccagctcccatcaaaagccagcctgaaggacccatggacacgtgactccagtgttctcaacaacatcttaagatcaagttggtttgcacaacatttgcatctacttgggacaaagcaagaacaataagggcaaaaaagtgaaa

SEQ ID NO: 16032 - DNA, 669 bp, Homo Sapiens
agaatgaactggagctggcggagaccaaatgcgccttgcaggaggagaagctgcagcaggacgcgctgcagacagcggaggcctgggccatattccaggagcagaccgtagtcctgcaggtgcggccccactcagacgccaaggtgcctcccgcctctcctcccccagacctggggcggtgtgacgggcagcttcgcggagtgcagtacagcaccgagtcgctcatggaggagatggccagggcggaccgagagacgcggctgttcggcggccctcgcgcgctggccatcaggtgagccgggcggtgggacggccacggccccccaagaaacccgcccgagccgccgcccacctgcccgccattgccatcaaggcgctcctgacgctgccgctcctcttcctggggctgtcgctgctctggacggtgctgttggaccccggcgccgtctccgcgtggctctggagcctcacctcggagacgacgctgcgccgcctgcgctacacgctgtccccgctgctggagctgcgcgctaacgggctgctgccaacctaagtgcagcgccccgcgcctggctccaggtggactccagggcaccggctttatttctggtgcactcctctcctgagagtgtagaccaaggtcgcctaataaactcctcaagggatgaa

SEQ ID NO: 16033 - DNA, 423 bp, Homo Sapiens
cggtaccgccttccccctcctcctggaaacgggccggcgccgcgggcgcggaggtagctggatgcggccctctctccccgcaggagacgcggctgttcggcggtcctcgcgcgctggccatcaggcgctgctgacgctgccgctcctcttcctggggctgtcgctgctctggacggtgctgttggaccccggcgccgtctccgcgtggctctggagcctcacctcggagacgacgctgcgccgcctgcgctacacgctgtccccgctgctggagctgcgcgctaacgggctgctgccaacctaagtgcagcgccccgcgcctggctccaggtggactccagggcaccggctttatttctggtgcactcctctcctgagagtgtagaccaaggtcgcctaataaactcctcaagggatgaaaaa

SEQ ID NO: 16034 - DNA, 586 bp, Homo Sapiens
  misc_feature (518)..(518): n is a, c, g, or t
agaagaggcccttcaccagttccgctcaggaaaaagcccaattttagtggctacagcagtacagcaagaggactggacatttcaaatgtgaaacatgttatcaattttgacttgccaagtgatattgaagaatatgtacatcgtattggtcgtacgggacgtgtaggaaaccttggcctggcaacctcattctttaacgagaggaacataaatattactaaggatttgttggatcttcttgttgaagctaaacaagaagtgccgtcttggttagaaaacatggcttatgaacaccactacaagggtagcagtcgtggacgttctaagagtagcagatttagtggagggtttggtgccagagactaccgacaaagtagcggtgccagcagttccagcttcagcagcagccgcgcaagcagcagccgcagtggcggaggtggccacggtagcagcagaggatttggtggaggtggctatggaggcttttacaacagtgatggatatggaggaaattatanctcccaggggttgactggtggggtactgagctgcttgcataagtcacctgccaacaactaatatggac

SEQ ID NO: 16035 - DNA, 467 bp, Homo Sapiens
tgggccgcagatggaccacatggggaacagctcccagggggccccctggctcttcctcacctccgcaatggcccgaggcgtctcggggatattagtgtggactgccctggtgctcacctgccacaagattaatttgcacctgggctcctacaccgtgccacaggagcaacgttacatcatccgcctgctcctcatcgtgcccatatacgccctcgtgggcacgtggagaagggcccacgtgtctccacacgccagccacaggggagccctggccaggcgcccagccaggggagcgtgtgcctgggatgggtcacagaaccagcgggcacctgtgaggctggccagcaccgtggggctgtgggaatcgctcttatttatatttaaacaccttggattttctaccgggtcttggcttctgttcccgcagggcatgagcctgaggagcaggacgcggtgggggtcccagg

SEQ ID NO: 16036 - DNA, 911 bp, Homo Sapiens
tgcttagtgactatgaccgggtatatcaagcaggctggtacggtcggattattccgggatatgtcgaccacgcgtcgagctggggccacgtggacatgagaatgaccagctaggcttccctggaggccaggcctccctggactgggccaggtgccttcctgccagcaaagatgagtaatgtctcagggatcctggagacagccggcgtccccctggtgtcagtgaactggccgcagcccagccccccaccggctgtgccagctgggccgcagatggaccacatggggaacagctcccagggggccccctggctcttcctcacctccgcactggcccgaggcgtctcggggatcttcgtgtggactgccctggtgctcacctgccaccagatctatctgcacctgcgctcctacaccgtgccacaggagcaacgttacatcatccgcctgctcctcatcgtgcccatctacgccttcgactcctggctcagcctcctcctcctcggagaccaccagtactacgtctacttcgactctgtgcgggactgctacgaagcctttgtcatttacagcttcctgagcctgtgtttccagtacctgggaggcgagggcgccatcatggctgagattcgtggaaagcccatcaagtccagctgcttgtacggcacctgctgcctccggggcatgaactactaccatcggggttcctgcgcttctgtaagcaggcactctgaagtactgcctggtgaaagcccgtcatggaccgtcacacacatcatccctccaggcaatttgggcaataccacgaggggacttcaattgtccggagaggataactcttatgtgacctcatttaacaaggctccgtcagatacggccttctaacgcctgttacttttctaattcacaacg

SEQ ID NO: 16037 - DNA, 638 bp, Homo Sapiens
  misc_feature (28)..(28): n is a, c, g, or t
  misc_feature (92)..(92): n is a, c, g, or t
  misc_feature (94)..(94): n is a, c, g, or t
gtggcctccaacgggggcaagactggcnctgcccctctgcacttctttcatgcagctgtgcagaggaaattacctaatgtcccaaccccccntnagatcttgtaatccgcagcatctccccctttcctgagctggaccagtttctacaggacactatcaagaggtataatctgcagatgttggaagctgagggcagcatgaagcaggccctgggtgaactgcaggcacggcacccccagctggaggctgtccttatgggcacccgccggactgacccctactcctgtagcctctgccctttcagccccactgacccaggctggcccgcattcatgcgcatcaacccactgctggactggacctacagagacatctgggattttctgcgtcagctgtttgtcccatactgtatcctgtatgaccgaggatacacatcactggggagtcgggagaataccgtgcggaacccggccctgaagtgcctgagcccaggaggacaccccacataccgtccagcctatctactggagaacgaagaagaggagcggaactcccgcacatgacctcccaccctaggagggagggaaggacaccgtcctagggtataacctggcaataaaccgtgcctctcactgtga

SEQ ID NO: 16038 - DNA, 411 bp, Homo Sapiens
tagcaagccctccctcagaggccaagggagcagaagagccatggatgggccccttcccaggacagcaggggtagaagtgggaaaggtgagcatttgtgactattctattactctgacctcccaggactggacctacagagacatctgggattttctgcgtcagctgtttgtcccatactgtatcctgtatgaccgaggatacacatcactggggagtcgggagaataccgtgcggaacccggccctgaagtgcctgagcccaggaggacaccccacataccgtccagcctatctactggagaacgaagaagaggagcggaactcccgcacatgacctcccaccctaggagggagggaaggacaccgtcctagggtataacctggcaataaaccgtgcctctcactgtgaaa

SEQ ID NO: 16039 - DNA, 1070 bp, Homo Sapiens
acggagagaggaaacataggctaggtacgagagcctgggtgtttaattcggcacgaggcgggcgtccggaggcgaaggtcccggagcgttcacgagaatccgggtcccggcgagtccggggtccgctcctccagctgcgcccagggcgcacgagccggccagcctcggggagagggcgcgggggcgctgggggttcttacgggaagatgaggaagcccgacagcaagatcgtgctcctgggggacatgaacgtggggaagacgtcgctgctgcagcggtatatggagcggcgcttcccggacacggtcagcacggtgggcggcgccttctacctgaagcagtggcgctcctacaacatctccatctgggacaccgcagggcgggagcagttccacggcctgggatccatgtactgccggggggcggccgccatcatcctcacctatgatgtgaatcaccggcagagcctggtggagctggaggaccggttcctgggcctgacagacacagccagcaaagactgcctcttcgccatcgtggggaacaaagtggacctcactgaggagggggccttggcgggccaggagaaggaagagtgcagtcccaatatggacgctggggaccgtgtctccccaagggcacctaagcaggtgcagctggaggatgcggtggccctttataaaaagatcctcaagtacaagatgctggatgagcaggatgtgccggccgctgagcaaaatgtgctttgagaccagcgccaagaccggctacaatgtggacctcctgtttgagaccctctttgacctggtggtgccaatgatcctacagcagagagctgagagtgccgtcacacacagtggatatatcccagtcataaagccacccaagaggaaaccagatctgggtgtcgtgcctgactttcgaagggccctcctgggactcagaacttgtgcttgttgggaaagggggtctgacccagggcaagctgtgatctgaaaggagcaaggacaaggcaggaattattttccccaatggacccccgagtgaatgttgggtggacatgatggctg

SEQ ID NO: 16040 - DNA, 444 bp, Homo Sapiens
gcggccgccccccggcagtacatggatcccaggccgtggaactgctcccgccctggtgggaagagagggacagaaagagtggttatctctcatctcagaacatagccaccagccacactgcaatggaacgtcccacagggatgtttatttttagggcaacacacacaggatgaaatgcttaaacatagttgatggagaatgtgccacccatgggcaccatccccagagcaggcagcccctcgagaaaacaagctgttgggtgcccagactacatgggaaatagaatccaagaatgttcaggaagaacgggcctcaggcattcacacagccctccctgccttcaagcaccaactccaaaggagtcctggccccagccatggctggagatggaaggaatcaagaactgatgtccagaaaaaagcagcgactgccaaggcccttgct

SEQ ID NO: 16041 - DNA, 232 bp, Homo Sapiens
cctaattgggggtttctctttctgtccggtgtccggactttcctaattggagtttgaggcccctaagctggcatcaaccccaggccacgctcgctctttccttccctcccctccccctctgccttttgtacgccagttctcagaaataaagatcttttgtccgtttttttaacctcggattctgtaattggttcttatagtaacaaataaaaagctgttttcttcaaaaagg

SEQ ID NO: 16042 - DNA, 550 bp, Homo Sapiens
  misc_feature (405)..(427): n is a, c, g, or t
gagcttgtcccctggaaggtgaagctacgctgattgcagtgcggccccctgtccctctacctgcaccctcacatcctgccagcaccaatgagcctattgtcctggagggctgagcacctgtggggaagggaggtgggctgagaggtagagggtggatgcccagggcacccaaacctcccttccctttcgtgtcgaagggagtgaggagtgaattaaggaagagagcaagtgagtgtgtgtccctggaggggttgggcgccctctggtgttaccacctcgagacttgtctcatgcctccatgcttgccgatggaggacagactgcaggaacttggcccatgtgggaacctagcctgttttggggggtaggacccacagatgtcttggacagttttggggggagggnnnnnnnnnnnnnnnnnnnnnnngcctcccgtaaataaactgccttttgtacgccagttctcagaaataaagatcttttgtccgtttttttaacctcggattctgtaattggttcttatagtaacaaataaaaagctgttttcttc

SEQ ID NO: 16043 - DNA, 1320 bp, Homo Sapiens
gagtctcattagactgggttctaggcgggctgctccagctccataaggaagcactcgatgtcgtcatagaggctgttggcgctggacaggcagaggctgaggctgctgctatccagggaagacacaccctcacgctgcgtgccctctaggtgcactcgcctgtcgttagtgccgcgggctggggcccggggctgggggtcgtctctactgcccacccgtacagctccccagcagggagccctgggcctccagcacaggccccagtcaggggaagcccttcttgtccctctccaggagccttggttgggactggatctgccccccatgacgctgtcagcagatggtctgccagggcagctctgttgcaatgcctggagccagggaggtcccccctcgtcaccagctggggcagggagggggcctggggcttggagtccagccatgtgtgtgtgccaggaatggccctggggggccccaccctgtgaggtgggacagctgcgggggcctctgcctcagtctggtccgtgcctgggccttctcgccagcacagctcccggctgagcgcgtacaccttgtgcgggtcggccgggtcccccgagttatctcgcagcatcacgaagcgacgcgtgctgcgcagtgcgcagcggaagttggttttccagccggcgcgctccgcagtctcagcctcggggggcgggccacctcccctgctgctaggcggccacctgccgcgggccacagcccaggccttgaagatgcgcgcgtcggcctcgctcaggtccttgcgcgcgaagtgcttccagggcacgcggaaacaggtgcgggcctcgtccagccactgcagcccctcatagcagccgctgctgatctctccaaggagccactctccgaacagcacgcgtggggctgccctctcaggagccaaggccattgctccttctgcaggggcagttaggtggcggtcaggtgttataacaggggaggtaagggctcctgtcgcagcagacgccaggccgcggccacaggtcgtgtggccaggtgtcacaggtgtccacaggtgtggactgagggcttgtagccaccgacgctgcctcggtatggatctcttggcagagggggctacaggtgtgactgcaggtgtggccggcgcgcacacatgaagtcacaggtgttgaaccagtgtccaggcctggcgggaaggcgcaggccggatcactgggtgccagagccgccgggacgggaagtttcgtctcgcggggaagtcaggagggccggcgctttcactcgtgccgaattaaacacccggcctcgtacctagct

SEQ ID NO: 16044 - DNA, 715 bp, Homo Sapiens
caaggccgcacggtgctgcagaaggtggtgggacacccgagctgcacgttcctatacggccccccagacccagctgtccgggccacagacccccagcaggtagcattccccagccctgccgagctcccggaccagaagcagctgcgctacacggaggaactgctgcggcacgtggcccctgggttgcacctggagcttcgggggccacagctgtgggcccggcgcatgggcaagtgcaaggtgtactgggaggtgggcggacccccaggctccgccagcccctccaccccagcctgcctgctgcctcggaactgtgacacccccatcttcgacttcagagtcttcttccaagagctggtggaattccgggcacggcagcgccgtggctccccacgctataccatctacctgggcttcgggcaggacctgtcagctgggaggcccaaggagaagagcctggtcctggtgaagctggaaccctggctgtgccgagtgcacctagagggcacgcagcgtgagggtgtgtcttccctggatagcagcagcctcagcctctgcctgtccagcgccaacagcctctatgacgacatcgagtgcttccttatggagctggagcagcccgcctagaacccagtctaatgagaactccagaaagctggagcagcccacctagagctgccgcggccgcccagtctaataaaaagaactccagaac

SEQ ID NO: 16045 - DNA, 498 bp, Homo Sapiens
acaggaacaggagtttgggaagagcgcttggataagggactacagcagtggtggcagctccaggacccttgacgcccaggacagaagctttggaacgagacccctgagctctgggttcagccccgaggaagcccagcaacaggatggcagcaccctcttcaggggatggtcccaggaggggccagtaaagtctccagcagagtgccgggaagagcacagcaagacccctgaggagaggagccttccttccgacctggccttcaacggggacctggctaaggcagccagctcggagctacctgcttcctcctccagcctcccttgggttttcttttgataccaatttatagcattttttataaaagcctttgatttttataatgggtgggactgtatccctgcctcaccccaggtctccgtctgccccgccaggtaccccacagagaccaatgacattttgccacttgaaacaataaataaagttttttaggaattggt

SEQ ID NO: 16046 - DNA, 668 bp, Homo Sapiens
  misc_feature (141)..(141): n is a, c, g, or t
  misc_feature (360)..(360): n is a, c, g, or t
  misc_feature (475)..(475): n is a, c, g, or t
cacagaatttgcaccacgggttaagcatttggtcccgcaagcaagccacagactgctattctggtagagggtgttttgttccaatcacgtttcctgttgtgttcagtttcctcaaagtttgcattatggacctttgccgtntgcctcctaggtcagaaggatcgtcgcccaactggcttcaagccctgaaactgaagaagaagaaggtctgagaagtcactgaggttcttcccacctggcagtctcaggcagtgcccattcctttggggtccctgggtgaggaaacggctggagccccacccatgcccccaggttgcaagcctctgtcccctccacctctgaggagcgtctggggaggcnacatttatgcactttgtatcaccctccgaactccccccacaccttcccttccctggatttcaatcactagtggttgaaggttttgtcccttcctctcctccttccctctcccttntctgcttcctcctccagcctcccttgggttttcttttgataccaatttatagcattttttataaaagcctttgatttttataatgggtgggactgtatccctgcctcaccccaggtctccgtctgccccgccaggtaccccacagagaccaatgacattttgccacttgaaacaataaataaagttttttggg

SEQ ID NO: 16047 - DNA, 574 bp, Homo Sapiens
gagacttctgcccagggattccgcaagctgctggagctgaacctactggggacgtacaccttgaccaagctcgccctcccctacctgcggaagagtcaagggaatgtcatcaacatctccagcctggtgggcgcaatcggcaaggccaagcaagttccctatgtggccaccaagggggcagtaacagccatgaccaaagctttggccctggatgaaagtccatatggtgtccgagtcaactgccactgggccgcatgggccagcccgctgaggtcggggctgcggcagtgttcctggcctccgaagccaacttctgcacgggcattgaactgctcgtgacggggggtgcagagctggggtacgggtgcaaggccagtcggagcacccccgtggacgcccccgatatcccttcctgatttctctcatttctacttggggcccccttcctaggactctcccaccccaaactccaacctgtatcagatgcagcccccaagcccttagactctaagcccagttagcaaggtgccgggtcaccctgcaggttcccataaaaacgatttgcagccagaaa

SEQ ID NO: 16048 - DNA, 802 bp, Homo Sapiens
cggggtgctccgactggcccttgcacccgaaccccagctctgcaccccccgtcacgagcagttcaatgcccgtgcagaagttggcttcggaggccaggaacactgccgcagccccgacctcagcgggctggcccatgcggcccagtggctgggccagcatgccctctcggattgtggccctagggtctggcattaaggctgccagctcctcccacagcggggtccagatgtttcctggggagatacagttgactcggacaccatatggactttcatccagggccaaagctttggtcatggctgttactgcccccttggtggccacatagggaactgcctgggcctggccgattgcccccaccaggctggagatgttgatgacattcccttgactcttccgcaggtaggggagggcgagcttggtcaaggtgtacgtccccagtaggttcagctccagcagctggcggaatccctgggcagaggtctcctcaggcctctgtgggggtgggtggtggccagcgttgttgacaacacaatccaggcggccaaatcggcggatggtctcagaaaccaggatctatcacatcatctacctgagtcacatcacagaggataaagacagctccagggagctcctgctccagggcccggcccccagactcatccttgtcgcagataaccactcgggccccgctgtccacgaaggcgcgcacgatcccagctccgatgccgcgcccgcccccggtcacgaacaccaccttcccggcatagcgcgttcccgtagccatcccgtgtacgtcgg

SEQ ID NO: 16049 - DNA, 482 bp, Homo Sapiens
ggtacctggggctctcggggaagaagggcagcagaaggagctgcagcgccgcggggaccccggtcagccccagcaggatcggccagccatctacgtttgcaaggagattccgaagaccaaagatctgggccacaaggatgccaacagtgatgaagagctggggcaccaccccgagagccccccgcaggtttttaggggccagctcccctaagtacatggggaccacgttggaagatacacctgcacatattcccaccaaaagtctggaaataatgataagctcaaatgatgtggcgactctgctgcatcccattaagatcgcaggcacgatagaaaatatgttgcatgagcagtgctggggagttgacagcagccacgttgtacccatactggaaggatgacccaaaggcagctatcagggttgccagggcaagcacaagcgtcagcctcccttccttcatgctctgatcctgttgcttcat

SEQ ID NO: 16050 - DNA, 597 bp, Homo Sapiens
  misc_feature (36)..(36): n is a, c, g, or t
ggcaaccctgatactggccttggttcatccttccantatggttacaactggctgctgtcaactcccgagcactgctcatgcaacaattttacaagagacttactatgctagaccgttgaattcaggaagacttcccttgacgttgctgtggtctgtaaccgtgtccacgtttccatctggagggtttatcggactccctcctggtcggccccttggggtaataaatttggcagaaaaggggccttgctggtcaacaacatatcttctatcgtgcctgcgatcttaatgggatgcaccagagtcgccacatcatttgagcttatcattatttccagacttttggtgggaatatgtgcaggcgtatcttccaacgtggtccccatgtacttaggggagctggcccctaaaaacctgcggggcgctctcggggtggtgccccagctcttcatcactgtcggcatccttgtgccccagatcttcggtcttcggaatctccttgcaaacgtagatggctggccgatcctgctggggctgaccggggtccccgcggcgctgcagctccctctgctgaccttcttcccccagagccccaggtac

SEQ ID NO: 16051 - DNA, 866 bp, Homo Sapiens
cgggctgctttgtgatagaagaatgatttattagaacaaatcccatgacaaatcatataaaataaccattttccgaaagacagccacaagaccacctgagaacgaatgtacagtgaaggactgggagcgcttctttcggggtgtgtcctcgtctaagaactcgatgacaaaggcctgctggttatgtaatagctcctgggggtcccgcttgatctgcctatgcagccgcacctgctccccgctggcctccaagggcaccccagcggccgaggccgccttggccagggggtcctctgagtcactctgcgtgccgtcctcatgcttgtggcccttcagggtgcgggtgtggacaggcaggtcgctcttggtgctgtggcggtcatccccagggccaacccggtgcatcaggctcgggtcattctgcaccagccagtcggccaccttggtctcagccgacaccatctcgccaggtgtggcctccttgcccgggggccgccgctggcgcagggaaaacttggtgatatggtccttgatcttcatcttgccagggctgcagtcatcaaactcgatggtgaaggaggcgtggctctgcaccacaggggacgctccgcccccacctgactctgcatccttcgtgggcatctcgtgtgccggcacctcggggggctgcgacggctgcggggtctccttcgtggggatctcgaagtagatgggctcccgccggaacgagcagctctgaggctcagcaggggcgcggaaaccgtggagctccccgtcctgctgctctggtcccttggggcgctctgggtagggctctacctggcgctgggcgtcagttagcgtgctcccatcgtcctcagcccaca

SEQ ID NO: 16052 - DNA, 554 bp, Homo Sapiens
  misc_feature (99)..(99): n is a, c, g, or t
  misc_feature (136)..(148): n is a, c, g, or t
  misc_feature (209)..(209): n is a, c, g, or t
ccacgcgtccggggactggaggctggaagcgggtggtgtgtgtcccctgtttacttttagctgagctggggttgggtgtacgggttctgttcctcctgngcctgcggcccacctgatgtttacgtgtgtgtgtgannnnnnnnnnnnntggcaggtgtccccccctggtccccgccccaagagcctgctgtctgtatggaggaggtgcnatacgggtccaccggctgctgcccacccctgcatgccccagttgcccaaccccgccttgcccctggacatgaagtggtcacgcttcatccacggctccttcccacccctcggcagtggctgtgcaatgttttaagttcacaagttcctgctcctccccacactgagctcctttgttcctccccctccagcctttgcctgggaactggtccttgtttgccgggcttctcggagggttcactgtacattcgttctcaggtggtcttgtggctgtctttcggaaaatggttattttatatgatttgtcatggaatttgttctaataaatcattcttctatcccatggc

SEQ ID NO: 16053 - DNA, 732 bp, Homo Sapiens
gcaaaaggcaggctcctaaattaatgtcagtgaagttcagggtgggcaaatgagtgtgtgtgaggtataggaaatgctgatgacttctttaatgcttgaagtccgttcacaggtatctagccctagaatgcctagaacaggaagaggcagctggtgttctgcaaaacttggacaggggcaaagttgctgaaaaagttttggtttaacccgaagataagtggaaaagagcttgtccatgaacccaggttctcactctgtttacagaagtgtgttgagtacagttggtgaaggaagaggtaacaaaaaatgctaaatattttatccatgaaaatgacttccagaaaaggaagaatatgaaccccagaccgaaggggaaaagatagttaatagtattatctaacctggttggtatttgtaatgaatggtgattttaattagtcattagccataatgatgtttatttacagtataactcctgaatgctacttaaataaaccaggattcaaactgcaagccagccaggccgttcattatttaaaacgttttaatcggggcttccgggtagaaggtggagcggcagggtgtaattgggttgatgggtgggacctgtcttgaccatcggagttttataatcgagggccaggagggcccgggttgctctcctggttatgtatgtacttgtacataaccacctaaagaatggtgaaataaatgttcttggaaattcctaaa

SEQ ID NO: 16054 - DNA, 1646 bp, Homo Sapiens
  misc_feature (1050)..(1050): n is a, c, g, or t
ccatcatgggagcagcattgctggaggactggtgaagggggctttgtctgttgctgcctctgcatacaaggccctgtttgctgggccaccagtcactgcacagccaataatttctgaagatcagacagcagccctgatggcccatctctttgaaatgggattctgtgacaggcagctgaacctacggctgctgaagaaacacaattacaatatcctgcaggttgtgacagaacttcttcagttaaacaacaacgactggtacagccaacgctattgaggagtgaccttgtattaaataactgcctgctgctcagagatgatctttattctgtcattggggtatgggatagaagcccttgcttatttttaatctgatgaatctgtatagagcccatcgttgagttaccaagacaatacctgctacagtattttggggagcaaactaaagaccagaacttaaattttcactttagacattggatgaatagtatgaagacagtttttcagttgatttggataaaactattttagtgcattgacaagtgtaacttcaacttcatatagaaccatttttctttctgcttttattgaaactgagtatttttctttggctaatgtggattttttatggggatatctgttaattttcaggttttgaaagacattaacctcggaagttgtttttaagaattattctcataattcttattctcataatttctgtaatccacctcaagcttcatagttatttggcattgaaataacacccagagcatgatagaaatgttgttactcttcctctctcaaggagaaagtaattttcctgcaatacttaataattggcaccgttgctttctaaagactccatggtgcattcaagagtatccaacttcaaggggaatctccgcatttcaatgaaaggaggaagagtgtgctgataaacctaccagcaccctattgagcaatgtctattatagtaattttgcatacatttttatttaagggaaaaaatataggtattgtgaaatatttttgctaatcttatagaanaaggaaaaaatcccgttattttaaagggaaaagtaaatttaacagttgccttttttctcaatgtcagggcagatcttattttacagtacagtgggggaaatagaaacatgtgaaaggcaaaaggcaggctcctaaattaatgtcagtgaagttcagggtgggcaaatgagtgtgtgtgaggtataggaaatgctgatgacttctttaatgcttgaagtccgttcacaggtatctagccctagaatgcctagaacaggaagaggcagctggtgttctgcaaaacttggacaggggcaaagttgctgaaaaagttttggtttaacccgaagataagtggaaaagagcttgtccatgaacccaggttctcactctgtttacagaagtgtgttgagtacagttggtgaaggaagaggtaacaaaaaatgctaaatattttatccatgaaaatgacttccagaaaaggaagaatatgaaccccagaccgaaggggacaagatagttaatagtattatctaacctggttggtatttgtaatgaatggtgattttaattagtcattagccatgacgatatttctcccgggtcagctcggttcg

SEQ ID NO: 16055 - DNA, 731 bp, Homo Sapiens
gcggccgcccaggggctggagcagggccgcgcagatccacggctgcgcctccgcgttgccgcagacgcagcccgacgggtccgcgcagtcctcggggcccacgctcagcgcgcccggcccgtggaagcgtaggcggcccgcgcgggacgccaggaaaacagccaggtcctcgtcgcgcgtgaacgtccggcccagagccgagatgctgcggacacgcacggggctagcgccagggccgagccccacgcggaaggaggcactaggcggaaagaagacgtcgtcgtggcggcagggcacgcgctcggcgtccacgaagaagaggccaggtgcctcgtccccagagcgccacaggtgcgggtcatgccaggagaagcggtcagagtcgcggaagacggcaggttcgcccgcgccacagtccaggtgcgagcccacgtctgagacgccgaatccggctcctgaagccaggacgagttccccatccagcggcaggagcatgtctgagacggcgtgaccttcttgcaccaggactgacaccatcttgtccgccgggaactcaacggcgccgccggcgcacggggtccggttctggctccagttggctgcgacgtcgaagtccgtgttggggacccagagtttggagaccgcctgggtcagtgcgcagagctgcagccacagcaggacccggcccagacgcccatctcgcctcggctccttgcaccccaccaggagac

SEQ ID NO: 16056 - DNA, 792 bp, Homo Sapiens
cctggtggggtgcaaggagccgaggcgagatgggcgtctgggccgggtcctgctgtggctgcagctctgcggtgagccgggaccacaccggtgcgggcccggacggtagcggtctgtcaggacccagggccgaggtcgctctaggcctggagggtgaagatcttccgaggagtgggcagggagggctttggagggttgggggcgtgaaactcggccctgcctccctcgtctggcgagtgcgcagcccggaagtgcgcggccagtgcatcgggcggtgcgggagaggagaggaggggctccgggaacctcggccagccccggcctccggcggctcctgccctcgcggtttttccgtctgcgaaatgggcgcggtccccagaacctgccgagagcagcgagtgtgcgcctgcggggctcggcagaccgcctcagcttcccggtccccaagggagcactgagccctcctccgccttcacaccaggccggcgcgtgtccctggcgcccccttccctaaacccctcgcggctccctcaggacaagcccaaccagcacattcagggccggcctgacctggtcctgccggccccagacccttcttacttctcataccgggttgcgctctgtcgcagctcttcccggcccaggtaggactcctccgggaagccttcctgattccaaggccgagaagaggtctgtgctgccccatcctcctccatgccccagttgtcactgtccttaacaacggctgtcctctgctccaggcgccaggcaactgggggcaagtgccggagg

SEQ ID NO: 16057 - DNA, 661 bp, Homo Sapiens
gcggccgctccaaaaagctctccaggtaggcctggctgcagtcactgaacatcctggggaaactggagccaatgctgcctgccatgatgcagcggccggcctcgaagcgttcctggcagcggcagccctggacgttctcatcatggtccatgcccaggttgtggcccatctcatgggccatggtgcaggccacgcccacggggttcttgctgtggtcctggttcacagcccctgagctgtgggagcacatggcggacaccctggcaaaccccacagtagtcccggtgaagtcgacacccgtgatgagctgtacgttgtcatgcaggtgccgccgtgtccgttgccgtgcctgccaggtcaggaggttctccagtgtgacactggggtcggggctgacgtggaacctgtcctgactattccaaatctccaggcccaccaggaccacacggaagttgagtttctgatatagcttgtccacgtgattcaccacctacagcacccgatgacgcacggctgcttcgctccccagcatctggaactctgcattgtccacgaccacatacagcttcacgtatcgatactgtcgagatggcacagagtgcgctggccgacgactgacgacggctgccgtgctgggttccatgaggctgcccagtctgtc

SEQ ID NO: 16058 - DNA, 534 bp, Homo Sapiens
  misc_feature (31)..(31): n is a, c, g, or t
ttactctcccccccacctcccgccaggggcntctggcacctctgcagccaggaccgctgcccaccttgtccacgtgattcaccacctccagcacccgatgacgcacggctgcttcgctccccagcatctggaactctgcattgtccacgaccacatacagctccacgtagcgggtctctcgggatggcagagagtccccgggccgaggcctgaagacggctgccgtccggggtcccaggaggctgcccaggctgtcgtcgctgaccccgcaggtcccggccgtctgcagcaggtgctcagcctggtacacggcgtgccgtccgccctcgccaccttcatccaggggctcgatcaggtgcaggtctgaccccacctggaagaaacccctgaggggagtgggagccgggtgtgctgtgggcttcagagtggcctggtcctgccccgaaggaccagaggctccagtttgttgcctacagctccccctaccctgccaccagcagccccccgcaggtgacttcaggccccagggtacag

SEQ ID NO: 16059 - DNA, 908 bp, Homo Sapiens
caccttgacccattccagaatccaccagtcatgaccagagctgaaaattttaaacaagtgaggtcctccttatttcatgaaccagcagatgataacgtcacgttcagcagtcagctcagatctccaaagccctggtcgatgtagacgtggatttccaggcaatgtggtatactgatgaagaccatggaatagctagcagcacagcacacaacattatatatacccacatgagccacttcataaaacaatgtttctctttaccttagcacctcaaaataccatgccatttaaagcttattaaaactcatttttgttttcattatctcaaaactgcactgtcaagatgatgatgatctttaaaatacacactcaaatcaagaaacttaaggtaacctttgttcccaaatttcatacatatcatcttaagtagggacttctgtctccacaacaggattattaccttacagaagtctgaattatccggtcgggttttattgtttaaaatcatttctgcatcagctgctgaaacaacaaataggaattgtttttatggaggctttgcatagattccctgagcaggattttaatctttttctaactggactggttcaaatgttgttctcttctttaaagggatggcaagatgtgggcagtgatgtcactagggcagggacaggataagatgaaaatatttgtatcacaaatcttaacttgaaggagtccttgcatcaatttttcttatttcatttctttgagtgtcttaattaaaagaatattttaacttccttggactcattttaaaaaatggaacataaaatacaatgttatgtattattattcccattctacatactatggaatttctcccagtcatttaataaatgtgccttcattttttcaaaagtaaa

SEQ ID NO: 16060 - DNA, 687 bp, Homo Sapiens
tgaaaaaatgaattcacatttattaaatgactgggagaaattccatagtatgtagaatgggaataataatacataacattgtattttatgttccattttttaaaatgagtccaaggaagttaaaatattcttttaattaagacactcaaagaaatgaaataagaaaaattgatgcaaggactccttcaagttaagatttgtgatacaaatattttcatcttttaacagggcaagctgatgtgttcacatctcagtctcaagctgcctctatcactaggaacatcagtatttttatttaaaagcacaattgacaatgctttcccatcacccttgctgtgtttttgtagcacctatagccataactggcacctgggggactgcgttgctggcagtttcccttacatttctttggagtcttttcaactgctgtggttttacttagaagtcagtgctatgcatatgtgaattaccagagactgtttgaatagtacttctcagaaaactgtgccagtctggctgtaaacagcacatctacgagaggagctgacagtagcctgctcgtgatggtatgactggacttgggttcccagccatgccctgctatcttctctccctaaatcctcttatcctgtccctgccctagtgacatcactgcccacatcttgccatccctttaaagaagagaac

SEQ ID NO: 16061 - DNA, 858 bp, Homo Sapiens
  misc_feature (844)..(844): n is a, c, g, or t
gccgccgccctcgtccttgcctttgcctgcgcggctcagaaggaccatccgcggcgcgggagacgagccggccgtcccgggccgggggacccgcccgccatggccaccaaggctcgggttatgtatgattttgctgctgaacctggaaataatgaactgacggttaatgaagaagtgcgaggctgtggggaagttcaccaaggccatggatgacggcgtgaaggagctgctgacggtggggcaggagcactggaagcgctgcacgggcccattacccaaggaatatcagaagataggaaaggccttgcagagtttggccacagtgttcagatccagtggctatcaaggtgaaacagatctcaatgatgcaataacagaagcaggaaagacttatgaagaaattgccagtctcgtggcagaacagccaaagaaagatctccatttcctgatggaatgtaatcacgagtataaaggttttcttggctgcttccctgacatcattggcactcacaagggagcaatagaaaaagtgaaagaaagtgacaaactagttgcaacaagtaaaatcaccctacaagacaaacagaacatggtgaagagagtcagcatcatgtcttacgcgttgcaagctgagatgaatcactttcacagtaaccggatctatgattacaacagtgtcatccgcctgtacctggagcagcaagtgcaattttacgaaacgattgcagaaaagctgaggcaggccctcagccgctttccagtgatgtaggacagaacgggccttgaagagaatgccgcgtgctttctcctgacttggggcaatgcaattcaaaactttttttcnccctattattcaga

SEQ ID NO: 16062 - DNA, 893 bp, Homo Sapiens
gccggagccgccgccctcgcccttgcctttgcctgcgcggctcagaatcaccatccgcggcgcgggagacgagccggccgtcccgggccgggggacccgcccgccatggccaccaaggctcgggttatgtatgattttgctgctgaacctggaaataatgaactgacggttaatgaaggagaaatcatcacaatcacaaatccggatgtaggtggaggatggctggaaggaagaaacatcaaaggagaacgagggctggttcccacagactacgttgaaattttacccagtgatggaaaagatcaattttcttgtggaaattcagtggctgaccaagccttccttgattctctctcagccagcacagctcaggccagttcgtcggctgccagcaacaatcaccaggttggcagtggcaatgacccctggtcagcctggagtgcctccaaatctgggaactgggaaagctcagaaggctggggggcccagccagagggggctggagcccaaagaaacacaaacactcccaacaactgggacactgccttcggccacccccaggcctaccaaggaccagcaactggtgatgatgatgactgggatgaagactgggatgggcccaaatcctcttcctactttaaggattcagagtcagctgatgcaggcggcgctcagcgaggaaacagtcgtgctagttcctcatccatgaaaattccccttaacaagtaagtttaaaggggagccagggaaccagggccgtggtagaagtatacattaatacaaagtatataccctaccaagaggcagctggccttttccctttccagtgatctcctaagttttggatatgatccagttatttttatttggatcttaactaaaaaacttactta

SEQ ID NO: 16063 - DNA, 563 bp, Homo Sapiens
aaagagatgcgggtcatggacgagcacatcatggtagaatcaggtgatgactcatgggatctgatcacatgttactgtcgaaagccctttgcaggccggcccatgattgagtgcagcctgtgtgggacgtggatccacctctcctgtgctaagattaagaagaccaacgtccccgacttcttttattgccagaaatgcaaggaactgacggccagaggcccggcggttatggggaggcctcccaaatctggagagccctgatggcacaacttttagcctcagggtcctcagcttatcccctgaagcttggatactgtctgcacttcaaggcaggaattctcaagggagacttgtttgaaaatgagtgtctcactttcccaccctatccttcctccccactctgtggacttgaaattgaatccattacggttggggatgggaggctgtctgtgtcccgacacataatctctgtctcttggacctgccaccatcactttctgggtcaggattggaattgggatggaatgggacagttgtctataaaactctagtgtaaatattaa

SEQ ID NO: 16064 - DNA, 607 bp, Homo Sapiens
tcaagccacatgcgattcgtggacctcgacgtcaccgttaccatcaggtaatcacttcttgggatctgaatcacctcgttactgtcgaaagccctttgcagggcggcccatgattgagtgcagcctgtgtgggacgtggatccacctctcctgtgctaagattaagaagaccaacgtccccgacttcttttattgccagaaatgcaaggaactgaggccagaggcccggcggttaggggggcctcccaaatctggagagccctgatggcaccaactttagcctggaacttccaaatgacaacatgatttgggaactgagcctcagggtcctcagcctatcccctggagcttggatactgtctgcacttcaaggcaggaattctcaagggagacttgtttgaaaatgagtgtctcactttcccaccctatccttcctccccactctgtggacttgaaattgaatccattacggttggggatgggaggctgtctgtgtcccgacacataatctctgtctcttggacctgccaccatcactttctgggtcaggattggaattgggatggaatgggacagttgtctataaaactctagtgtaaatattaaa

SEQ ID NO: 16065 - DNA, 488 bp, Homo Sapiens
aaacaatgcagatgggtgtacttcctttctctcccagtcccaagccaacccatttttccttggaatgcaaaaatggtctggaaagagatatgggggtcctgtgaacagaacagggagtcattatctttttcttctttaccaatagacgatgacaaatgtggatggtgaggaagtaaaacgtcaataaagcagtatcataaataaaaaaataaataacgtttattctgtaccacgcggctgtcagtgtccggagtctccagggcagagcgccccggggagggctgggccctcagagcagcaggagggcgcccagggacagctcaccctggcccagcaggcggccccgatcccggccgcgaccctcatcccgggccttgacgcgaacggccaggcggcgcacctcgtcttccgagaggccgtcgaagcaaaagtcctggtcaaaggaggccttgcggctgcgccccaccacagcgctgcattgccaacgc

SEQ ID NO: 16066 - DNA, 548 bp, Homo Sapiens
  misc_feature (354)..(354): n is a, c, g, or t
gcttcggcaatgcagcactgtggtggggcgcagccgcaaggcctcctttgaccaggacttctgcttcgacggcctctcggaggacgaagtgcgccgcctggccgttcgagtcaaggcccgggacgagggccgcggccgggagcggggccgcctgctgggccagggtgagctgtccctgggcgccctcctgctgctctgagggcccagccctccccggggcgctctgcccgggggactccggacactgacagccgcgtggtacaaaataaacgtgtatttgttgttcttatcagtcccgtttcagtacaacactggcagagatgattctagattaactatcccagtaaaagatantgatattttccatagatacctccagaatttttttcagcaaatggaatggttctacagtgtttcccaatatagacagccatttgcataccatatgtaccacacacgcctaggaaataatgaatcacatgaagtgttagaactagaaagtgtcttggcgatctgtttgctccaatcacctcattttaaaattggtg

SEQ ID NO: 16067 - DNA, 551 bp, Homo Sapiens
gctggggctgcttctggcgctgggcctgccgttcctgctggcccgctggggccgagcctgggggcaaatacagaccacttctgcaaatgagaatagcactgttttgccttcatccaccagctccagctccgatggcaacctgcgtccagaagccatcactgctatcatcgtggtcttctccctcttggctgccttgctcctggctgtggggctggcactgttggtgcggaagcttcgggagaagcggcagacggagggcacctaccggcccagtagcgaggaccagttctcccatcaagccaaggcccgggcccctcaggactccaaggagacggtgcagggctgcctgcccatctaggtcccctctcctgcatctgtctcccttcattgctgtgtgaccttggggaaaggcagtgccctctctgggcagtcagatccacccagtgcttaatagcagggaagaaggtacttcaaagactctgcccctgaggtcaagagaggatggggctattcacttttatatatttatataaaattagtagtgagatgta

SEQ ID NO: 16068 - DNA, 479 bp, Homo Sapiens
  misc_feature (278)..(278): n is a, c, g, or t
ccaccgagacaccagcctctgatggctcaggaggacttgtggggagaggctgggggcacccatgtggtgggctctgtgcagcatgttgcctctgcttggctgtgcctgcagctcagggtgctggggctcgggacccacccccctgcttgcggaaccaacttttctctgtgtgtccagcaggccccacaaccccctctcctttctttcagttctcccatgcagccgaggcccgggcccctcaggactccaaggagacggtgcagggctgcctgcccatntaggtcccctctcctgcatctgtctcccttcattgctgtgtgaccttggggaaaggcagtgccctctctgggcagtcagatccacccagtgcttaatagcagggaagaaggtacttcaaagactctgcccctgaggtcaagagaggatggggctattcacttttatatatttatataaaattagtagtgagatgtaaaaaa

SEQ ID NO: 16069 - DNA, 682 bp, Homo Sapiens
  misc_feature (58)..(58): n is a, c, g, or t
  misc_feature (66)..(66): n is a, c, g, or t
cctcccccctacaccaggggcctcatccgccgagccatcagccagagcggcgtggccntgagtccntgggtcatcagaaaaacccactcttctgggccaaaaaggtggctgagaaggtgggttgccctgtgggtgatgccgccaggatggcccagtgtctgaaggttactgatccccgagccctgacgctggcctataaggtgccgctggcaggcctggagtaccccatgctgcactatgtgggcttcgtccctgtcattgatggagacttcatccccgctgacccgatcaacctgtacgccaacgccgccgacatcgactatatagcaggcaccaacaacatggacggccacaacttcgccagcatcgacatgcctgccatcaacaagggcaacaagaaagtcacggaggaggacttctacaagctggtcagtgaggttcacaatcaccaaggggctcagaggcgccaagacgacctttgatgtctacaccgagtcctgggcccaggacccatcccaggagaataagaagaagactgtggtggactttgagaccgatgtcctcttcctggtgcccaccgagattgccctagcccagcacagagccaatgccaagaatgccaagacctacgcctacctgttttcccatccctctcgaatgcccctctaccccctctagagcc

SEQ ID NO: 16070 - DNA, 333 bp, Homo Sapiens
cagaccccgcaagacgggggggccgcagccgtgtcgctcgcccgggcggcgggaggggagaaacctacggtaagaaaggagtttgtgaaagcgtcttgcgggggctgcccgcagcccccgtcaagacgacctttgatgtctacaccgagtcctgggcccaggacccatcccaggagaataagaagaagactgtggtggactttgagaccgatgtcctcttcctggtgcccaccgagattgccctagcccagcacagagccaatgccaagagtgccaagacctacgcctacctgttttcccatccctctcggatgcccgtcttgcgggggctag

SEQ ID NO: 16071 - DNA, 519 bp, Homo Sapiens
ttttacattaggcaatacaataacgtacgcgccatgttggtctttgccgaccgtgtaaagggcccccgggagtacgtgctggacctgaagatggtcaccatgaattccttcatgatctaccgggcccgctctgtattgaggctcaccgtctttgtaggggcctacacattttgaggagcagatagggagccaccctccctgcagctaccctagttgaggagcctgttgttaggggcagaatgagaaaggctcaggatcccccattgacaggagctgggagctatgcaccacgagcttcagtcaccccgagaggagaggaggtaacgaggagggcggactccaggccccggcccagagatttggacttggctggcttgcaggggtcctaagaaactccactctggacagcgccaggaggccctgggttccattcctaactctgcctcaaactgtacatttggataagccctagtagttccctgggcctgtttttctataaaacgaggcaactggactgtt

SEQ ID NO: 16072 - DNA, 955 bp, Homo Sapiens
ctgcctggctccttccgctgccagtgcgagccgggcttccagctggggcctaacaaccgctcctgtgttgatgtgaacgagtgtgacatgggggccccatgcgagcagcgctgcttcaactcctatgggaccttcctgtgtcgctgccaccagggctatgagctgcatcgggatggcttctcctgcagtgatattgatgagtgtagctactccagctacctctgtcagtaccgctgcgtcaacgagccaggccgtttctcctgccactgcccacagggttaccagctgctggccacacgcctctgccaagacattgatgagtgtgagtctggtgcgcaccagtgctccgaggcccaaacctgtgtcaacttccatgggggctaccgctgcgtggacaccaaccgctgcgtggagccctacatccaggtctctgagaaccgctgtctctgcccggcctccaaccctctatgtcgagagcagccttcatccattgtgcaccgctacatgaccatcacctcggagcggagcgtgcccgctgacgtgttccagatccaggcgacctccgtctaccccggtgcctacaatgcctttcagatccgtgctggaaactcgcagggggacttttacattaggcaaatcaacaacgtcagcgccatgctggtcctcgcccggccggtgacgggcccccgggagtacgtgctggacctggagatggtcaccatgaattccctcatgagctaccgggccagctctgtactgaggctcaccgtctttgtaggggcctacaccttctgaggagcaggagggagccaccctccctgcagctaccctagctgaggagcctggtgtgaaggggcagaatgagaaaggcaataaagggagaaagaaagtctggtggttgaagtggcgggtcacactgcaggaagctcaggctggggcaggtggcactgggggg

SEQ ID NO: 16073 - DNA, 508 bp, Homo Sapiens
gcagatgggttgtagttttaaacagggtagtcacggtgacctcattgaaaaggtaatgtgagcaaagactcgaaggaggtaaggggattaccatgtggatatctgtaagaagattgttaataggcagatgaaacggtgcagagctccgaagctggaagcatgcttggtttgtttgagaaacagcagaggccattgtgactggagtagagtgagcagggggaagagtgctgggaaatgatgaccgtgtttggcccagagactcactcttccgatattttgagttgctagaaaagcttcagtataacctagaggaacgtaagaagttacaagagtttgcagtgcaggcactgatgaacttggaagacaagtaaagcaatggatggcttcaatatccttgggcccagcaaaagataatgaagggaattgttggaaatagagaattgaaaatataaacattcagatagaacaatgtctgttcattaaaattaaaaagtataagtgtctaggc

SEQ ID NO: 16074 - DNA, 595 bp, Homo Sapiens
  misc_feature (558)..(558): n is a, c, g, or t
cgcccggtgctgcgctccgcccggtgttgcgctccgcccggtgttgcgctccgcccggtgttgcgctccgcccggtgttgcgctcccgcccggtgttgcgctccgcccggtgttccgctcttcctctagatatccataggatgcgctccctcacccgcacagaccttttcctggcagcccgcacaccctgcaacctcttcttgaaaggcctgggtctgacctgagggagagagtttctcttgggcagagggaggggtcacgcccccgtccctcctatccacctggcgctttccaccttcctgagagcagaggccactgtaaaagggaccgtgtgctgggggttttctgggtgctggacttgtgggcacacaccccatccactcctgcctggtccacacactggctgctgtttcacagacaaagatctggcggccagtggggctccaggtttgagaagggccctcaaaggagcagccccttcctattgctgcagcgtcttccacacgtggagaggggttcaggcccacgctgctctgggcctgcagggccaccccctgnaggccgcgggagtgcgggaggggacgtcgggcctgca

SEQ ID NO: 16075 - DNA, 481 bp, Homo Sapiens
acaacctgatggcccagctggaccccctttttgagcgtgtgactactctggctggagcccagcaggagcttctgaacatgaagctatggaccatccacgagctgctgcaagatagcaagccggacaaggatatggaggcttcagaaccaggtgaaggctcgggaggcgagtctgctggaggtggagacaaagtctctgaaactggaacattcctgatctctccccacacagaggccagcagacctcttcctgaggacttctgtttaaaggaggacgaggaggaggttggtgacagtcaggcctgggaggagcccacaaactggagcacagagacatggaacctagctacttcctgggaggtggggcggggactacggagaaggtgcagccaggctgtggcaaagggccccagtcacagccttggctgggaaggagggacgacagctgaaggtcgactaaaacaaagtctgttttcaaaaaa

SEQ ID NO: 16076 - DNA, 701 bp, Homo Sapiens
cggccggccaatgccggaccgcttcggcaccgcccgcccgatccctccacccgtgggccggcaatggcgggcgcagtttcgctcttgggtgtggtggggctgctgcttgtgtctgcgctgtccggggtcctaggagaccgcgccaatcccgacctccgggcacacccagggaacgcagcccaccccggctctggagccacggaaccccggcggcgaccaccgctcaaggatcaacgcgagcggacccgggccgggtcgctgcctctgggggcgctgtacaccgcggccgtcgcggcttttgtgctgtacaagtgtttgcaggggaaagatgaaactgcggttctccacgaggaggcaagcaagcagcagccactgcagtcagagcaacagctggcccagttgacacaacagctggcccagacagagcagcacctgaacaacctgatggcccagctggaccccctttttgagcgcccagcaggagcttctgaacatgaagctatggaccatccacgagctgctgcaagaatagcaagcccggacaaggatatggaggcttcagaaccagaggccagcagacctcttcctgaggacttctgtttaaacggaggacgaggaggaggtcggtgacactcagacctgggaggagcccacaaactggagcacagagacatggaacctagctacttcctgggaggtgg

SEQ ID NO: 16077 - DNA, 621 bp, Homo Sapiens
  misc_feature (52)..(52): n is a, c, g, or t
  misc_feature (133)..(133): n is a, c, g, or t
ctatctcgagtgctctgccctgatgaagaaaagaaagtgcctaccagagcancggatgatgaaaggtgtaaaattctggaccacgattagaccaaggaatggtattcacagaatatgaagaattcttaagaancggctagtcgatggggagtgctcaacagcccgactccctgaaaatgcagaaagaaaccgattccaagatgttcttccttatggatgatgcgagagtggagttggtcccaactaaagaaaacaacactggttacatcaacgcatcacatattaaggtctctgtcagtggaatcgaatgggattatattgccacacagggaccattacagaatacctgtcaagatttttggcagatggtatgggaacagggaattgcaattataccaatggtgacaccagaagaggtaggtacttacttctcttaagtgattttctcagcctctgaagaacagttaatgttaatcatctggaatcctgccccggtctgtccggtttgcagtacttgcacacattttggagattgtattttctagacaattctctattttactgaagctatgctgggcaattctggcaatcattaaagtgcatagatttctttcttaacct

SEQ ID NO: 16078 - DNA, 519 bp, Homo Sapiens
  misc_feature (435)..(443): n is a, c, g, or t
aatattaatacaaagttatataggagcaactcattctgtggatcatccttacacaaagttgtttctcactagaaaaatccctaaatatttgtcataaaataaaaactccattatcaaaaattagtttaagatagaaatctatgcactttaatgattgccagaattgcccagcatagcttcagtaaaatagagaattgtctagaaaatacaatctccaaaatgtgtgcaagtactgcaaaccggacagaccggggcagggcaaggcccttgaaaccaagtcctccttgagcacctttcccaggttagaaacccctcttcagcctgtgcttcgcacgtttccttcagcgtgccgccattcagactgcgccacttacgtcccagtgccacgctgcgtggatcaagtgtcaacgggaaagtatgagttaggcaagcgcnnnnnnnnnaagctgtaaacgcttcacatgactggccccgtaagaaattgtgggagcttagatgagcctggagcttttcaggaac

SEQ ID NO: 16079 - DNA, 527 bp, Homo Sapiens
cagtcttctcccatcaggattcattagcctgtttcagcctctacgccggcaggacaggtcccagctgcttgtcggctgcagtgaggcagttggacaggtggagcctacagggaccctccctggagagcaaggggcctccccagggtgccggccagggaatccctgctttggccaagctctttcccacacatgcctggggagtagggaagggtggtttccagaaaaaatgaaacctctggccaggcaaccatcccatcagtgatgccccacccagccacggaaacgacatggtttatatatgtggtgtcctggtattcggcatagatgcctccggtgtagttagccagtctttctgttgccattattccacagctgatgggccagtcttgctcccatcagtgatgccccacccagccacggaaacgacaatggttaaaatgtggtgtcctggtattcggatagatgcctccggtgtagttagccagtctttctgttgccatattccacagctgatgggacgaagatga

SEQ ID NO: 16080 - DNA, 1352 bp, Homo Sapiens
  misc_feature (1291)..(1291): n is a, c, g, or t
gcggccgcttctgctgctcgtgctgctggcgggcgcggcgcagggcggcctctacttccgccggggacagacctgctaccggcctctgcggggggacgggctggctccgctggggcgcagcacatacccccggcctcatgagtacctgtccccagcggatctgcccaagagctgggactggcgcaatgtggatggtgtcaactatgccagcatcacccggaaccagcacatcccccaatactgcggctcctgctgggcccacgccagcaccagcgctatggcggatcggatcaacatcaagaggaagggagcgtggccctccaccctcctgtccgtgcagaacgtcatcgactgcggtaacgctggctcctgtgaagggggtaatgacctgtccgtgtgggactacgcccaccagcacggcatccctgacgagacctgcaacaactaccaggccaaggaccaggagtgtgacaagtttaaccaatgtgggacatgcaatgaattcaaagagtgccacgccatccggaactacaccctctggagggtgggagactacggctccctctctgggagggagaagatgatggcagaaatctacgcaaatggtcccatcagctgtggaataatggcaacagaaagactggctaactacaccggaggcatctatgccgaataccaggacaccacatatataaaccatgtcgtttccgtggctgggtggggcatcagtgatgggactgagtactggattgtccggaattcatggggtgaaccatggggcgagagaggctggctgaggatcgtgaccagcacctataaggatgggaagggcgccagatacaaccttgccatcgaggagcactgtacatttggggaccccatcgtttaaggccatgtcactagaagcgcagtttaagaaaaggcatggtgacccatgaccagaggggatcctatggttatgtgtgccaggctggctggcaggaactggggtggctatcaatattggatggcgaggacagcgtggtactggctgcgagtgttcctgagagttgaaagtgggatgacttatgacacttgcacagcatggctctgcctcacaatgatgcagtcagccacctggtgaagaagtgacctgcaacacaggaaacgatgggacctcagtcttcttcagcagaggacttgatattttgtatttggcaactgtgggcaataatatggcatttaagaggtgaaagagttcagacttatcaccattcttatgtcactttagaatcaagggtgggggaggganggagggagttggcagtttcaaatcgcccaagtgatgaataaagtatctggctctgcacgag

SEQ ID NO: 16081 - DNA, 693 bp, Homo Sapiens
  misc_feature (132)..(132): n is a, c, g, or t
gttaccgtggagtatgatcaagctgaatttttggactgcaaacgatgtaagccaacattgttggccccgatcttcttgttcaatgtgcaagactctagagaagtgacagaggccaagcaagaattaataacntcccctcagcctcagaaacatccattactagcaccattggataaacagcccaaccagcccttaagaccagctgataaggaacctgaacccaggaagagggaagaaggccaagagtcacgcttaggacatcaaaagagagaagcagaaaggtatctgcctccttctcgaagggaagggccaactttccgaagagaccgagagagggagtcatggtctggagagacacgccaggatggagagagcaaaagtaagtagtttgtcagggcacataccagactgtgatcatcacaatggagcatagatggccaatgttatgtccgggagctatctgctttccagtaccctgagagatctgtgcatgacctgatgacagaggccattgctgtctgtggaccttcctgtactgcttaaaggaatctatgcccttcaaatagtaaattgctatatgaatgcagtaaggcatgattttagatttctaagtattggtgaagaaaagtatgcagtatttatttgtttagcatttttttacagaaccagccttgctagtagcatcaaaagtaa

SEQ ID NO: 16082 - DNA, 491 bp, Homo Sapiens
ctcagaaaacatccataccagcaccatgggaaaaacagcccaaccagcccctaagaccagctgataaggaacctgaacccaggaagagggaagaagcctaagagtcacgcttaggacatcaaaagagagaagcagaaaggtatctgcctccttctcgaagggaagggccaactttccgaagagaccgagagagggagtcatggtctggagagacacgccaggatggagagagcaaaactatcatgctaaagcgtatctatcgttccacaccacctgaggtgatagtggaagtgctggagccctatgtccgccttactactgccaacgtccgtatcatcaagaacagaacaggccctatggggcatacctatggctttattgacctcgactcccatgcggaagctcttcgtgtggtgaagatcttacagaaccttgatccgccatttagcattgatgggaagatggtagctgaaacctgcctcgtctatgca

SEQ ID NO: 16083 - DNA, 677 bp, Homo Sapiens
acaacgctggtaaaactttatccatagtgagaacagacacttgtcagcctgaggccctagatcttctggacaaacttctgcgatacgacccatcaacagagactgactgccaaagaggccatggagcacccatacttctaccctgtggtgaaggagcagtcccagccttgtgcagacaatgctgtgctttccagtggtctcacggcagcacgatgaagactggaaagcgacgggtctgttgcggttctcccacttttccataagcagaacaagaaccaaatcaaacgtcttaacgcgtatagagagatcacgttccgtgagcagacacaaaacggtggcaggtttggcgagcacgaactagaccaagcgaagggcagcccaccaccgtatatcaaacctcacttccgaatgtaaaaggctcacttgcctttggcttcctgttgacttcttcccgacccagaaagcatggggaatgtgaagggtatgcagaatgttgttggttactgttgctccccgagcccctcaactcgtcccgtggccgcctgtttttccagcaaaccacgctaactagctgaccacagactccacagtggggggacgggcgcagtatgtggcatggcggcagttacatattattattttaaaagtatatattattgaataaaaggttttaaaag

SEQ ID NO: 16084 - DNA, 985 bp, Homo Sapiens
taggctagtacgaggccgggtggttgaatcggccgaggcagggaccagagctcctcgtggactatcagatgtatgattatagcttggacatgtggagtatgggctgtatgttagcaagcatgatctttcgaagggaaccattcttccatggacaggacaactatgaccagcttgttcgcatgccaaggttctgggtacagaagaactgtatgggtatctgaagaagtatcacatagacctagatccacacttcaacgatatcctgggacaacattcacggaaacgctgggaaaactttatccatagtgagaacagacaccttgtcagccctgaggccctagatcttctggacaaacttctgcgatacgaccatcaacagagactgactgccaaagaggccatggagcacccatacttctaccctgtggtgaaggagcagtcccagccttgtgcagacaatgctgtgctttccagtggtctcacggcagcacgatgaagactggaaagcgacgggtaatgcggcattgatgcttgccaataaaaccaaccaaccaaacacaaaccttgaaggaaaactacagtgtgataaaaagaaattcttatcattccttctaaatgcacagaagagtaaagacctaaaagtctgtcaaaaagcaagaagaaactccccagtgctagtctccagggagctgtcactgtggcagcatggggatgcacctagttcaggatctgaaggagctctgcctttggaatgcatgggagatagagactcggagttgttgtacatttacctttgtttaacagggcaccactgttgaattaacccattcagtcaacaagctctgaatgtctgacttcctatctattccattgtggtctgggtttcctttggtgaaattcaggctcaagtcttagcgaaatgtcagcagtctatactgacacaccagcctcatttacaaaaaggagatattaaaacagtgacagt

SEQ ID NO: 16085 - DNA, 546 bp, Homo Sapiens
gcggccgcctggcgctgcagcgccgctactactccccgtcctgccgggaattctgcctcagctgccctcggctctcgctgcgttcgctcaccgctgtcacctgcacggtgtggctggcggcctacggactcttcaccctctgcgagaacagcatgatcctctctgctgccatcttcatcaccctcttaggtctgcttggttatctccattttgtgaagattgatcaggagactctgttaatcattgattcccttggcattcagatgacttcatcttatgcttcaggcaaagaaagcactaccttcatagaaatgggcaaggtcaaggatattgtcatcaatgaggccatttacatgcacaaggtgatttactacctctgcatcttattgaaagatccagtggaaccacatgggatatcccaagtagtacccgtcttccagagtgccaagccccggctggactgcttgattgaagtatacaggagctgccaggagatcctggcacaccagatagccacatcaacaagcccatgagccccagcgttca

SEQ ID NO: 16086 - DNA, 385 bp, Homo Sapiens
ccgcttgccgtcttgaagataaagttgaaatgctaattccctatccatgaaaacctgctgcatctctttaaaaataaagagatttaccttttaaatataagtctcacttttatggttttagtttaaatctgggaacatcccatgggctggctacctcctccagagaggcctgtaatacttaccttttaaacacttaccatgtaaatggcctcattgatgacaatatccttgaccttgcccatttctatgaaggtagtgctttctttgcctgaagcataagatgaagtcatctgaatgccaagggaatcaatgattaacagagtctcctgatcaatcttcacaaaatggagataaccaagcagacctaagagggtgatgaagacag

SEQ ID NO: 16087 - DNA, 392 bp, Homo Sapiens
gcctctgatgggctccatccgggatttactctgggagacaatagatgtgaatgggactgagctgaactgcagctgggtgcacctggacctgggcagtgatgtggcccagcccctcctgactttgcctggcacagcctgtggccctggcctggtgaacagcctgggtgggcaaaaccaggtgtaagaagggacatttggaccacaatgaacagagcccagaattcaccattcaccaatgtcaaaggcagggactccaagggaagtcagtttcttacttcagatggagcaaagtcctatcaactcactatgccttggtttccccatctgtaaacgcagggtatggcctcaaccttattggcctcccagtcccattaaagctttgtgggaatttg

SEQ ID NO: 16088 - DNA, 637 bp, Homo Sapiens
  misc_feature (137)..(155): n is a, c, g, or t
  misc_feature (467)..(482): n is a, c, g, or t
cacactgacatctgttttcttttccaccaagggtatcactgggatacatcagattggatgccaagcgttcctctgccggacatacaagagttccccaactatgaggtgattgatgagcagaacaagactccatctcnnnnnnnnnnnnnnnnnnntcagatgacagaggggagcggggacaagttttaagtctaagcctcctgggtggggagttctgctgtttcaacatatgctccagtcatggcagactttggccagacagcgccctttttcagagtgaactgagtgtagcacaaattatctgccagtgctagttagcaaacagaatggagccaaaaaagaattgatttgggaaggcccaaggaatttgaaaccgttgagatgaacactttccgtttttgctacactgatttatgttgtgctgggaattgtacaagcctttgaccagaccttaaggttgttttttnnnnnnnnnnnnnnnngattcccttgctgctgcttttacttttgctggaaaccaggaattggaaacctgtgacttgcaaaagcatttttacctagttattagaatgttcactttcttattttacaggaaacataccaaaagaggttttaccaagacgcatagttcagcgta

SEQ ID NO: 16089 - DNA, 1155 bp, Homo Sapiens
agtatgatcagcaagtatgattcaagctgaacctctgccggtttcttgatgaagaacccaagctacccgcggcaggcatgtctctaggagggtggatggattcaaactgattgctgaattcgggcggtaacggtggtagctcatcagctgcggggaagtcttctgggggtggaggaaaatcactttcgatgtcgtagcctccagggtaatagtccgtatcgatggcgtttggatctgctgagtacaggggtgtctgctcatcaatcacctcatagttggggaactcttgtatgtccggcagaggaacgcttggcatccaatctgatgtatcccagtgatacccattgtcatcgcacgattcggactggaaggagctcagagactgcacttcagacaggctttcccgggcactgtatggctgggaaggcttttcctctagaggcttcttggaaagacagggatcaagatccaccacttttgtgtcatagtcaaagtcccagctaggcttctggatggagtcgctgtcagaaggggagtttgaagggggtgggggaggcaggtttggcgccacgctgcagaccgccactgcttttcggtgcccgtgcacagactcggggttaaaagtgctgaattcgggatgctctgggatagcagatccttcgaaggaatttcggtccagattgtttcttgagtcacttggaatactcggggtgtaggaaataggccggacaggcacctggggtggtatgtaaagagtaaatgttcttatttagcttggaatcaaaatacggtctttgcaagaaagccgtagcgggtcccaggtgcttgtctttaggttcagcctgatgcttctttttccgactaatcatcttacggcagagaacaaacaccaccaccaagtaaaaatatccctgcaacaaacacaacggattccaattccttccggccaacccaatgttccacggcgtggacacatactggttgggcgcaggcatcctcgcagtgacgtcccctgtactcgtggctgcagttgcagtgataggagccgtgcgtgttctcacagagggccccgtgcaggcaagggtttccagagcactcgtcgatatcactctgacacctttctcccctaaaacccgaatcacactgacaaacggc

SEQ ID NO: 16090 - DNA, 1195 bp, Homo Sapiens
  misc_feature (164)..(164): n is a, c, g, or t
ggcccaaggcagtacatgtacgatgaacaggggcagaaatacatcgactgcatcagcaatgtggcgcacgttggcccctgcaccctcttcgtggtccaagcagcacatgagcagacccaggtgctcaacaccacaagccggtacctgcatgacaacatcgtggnctatgcgcagaggctgtcagagaccctgccggagcagctctgtgtgttctatttcctgaattctgggtggggtaacagcagttcaaagaaaggaacttgagcccagacatttgccatgtcaagagctggagcctctggaaagagcagggagctggtgcttcctcagtggtggtggaggaggggcattcttatgccaccagctttattctgtgtggattccagggacttccatgttgccaaatccaaagcaatctctttgctgcattgtcttactctgtcccagcagtaattgacagttaccactctccggaagtggtctgtcatcttgcttcccgggcactgtgctctcctgttttctatcagcttctctagccactccttccctgtcttctttgctgattcctcctctgttccttggggctgatcctgggccacttttctctctgagccctctcctcaggtgatctctgccattctcttggtattacatagcatccatgtgttggtgactcacaaatttttttgagcccagacatgtcccatgtgttccaactcgaggttctaactgcccctgtgacatctgacaaacatctccagcttcatgtgttcaaaagggcaagggttgattggaccatggtactgttctccctcacctgcccaagaaggctatccccactcacccccgctcatcttgccttgtaaagggcatcaccacctatatctgctccaggcagaaaccacacgctccccagtcctgcatcaatcctgcctcctccatctccatgatgcctcttaactccctctacctctccatctccatggccaccacctgctctcaccctggcgtcctcctccttggtcttctccttctacttttattcttgtcaactccattagacacactcagaggccacctcctaaaataggagctgacttatgtcccttttctcattaaaactcttcagtggcttcacatgcactgagaagaaaactcagctccttcccagcctgtgcaaatgtcgctggcacat

SEQ ID NO: 16091 - DNA, 478 bp, Homo Sapiens
cagttgggcactgcaccctctcgtggtccaagcagcacatgagcagaaccaggtgctcaacaccaacagccggtacctgcatgacaacatcgtggactatgcgcagaggctgtcagagaccctgccggagcagctctgtgtgttctatttcctgaattctgggtaagtggactgtggccagcccccgggaagagggtgagacggtaacaaagacagtcactcacatgggcccagtgtagtgtagctgaccgagtgtggactcggagaggcagcccccactgcaccaggctcctgagattcccggctgtaggccctgatgctttctctgtgggatccagtttccttgtctcttattgaaggatgttattacctcctttctaggatcatcgctggagcttagtgaggtaatatgttcctttatttctgccttacggatacagccaaaatccctgcctgtgggttgctcagtaaggaagga

SEQ ID NO: 16092 - DNA, 1383 bp, Homo Sapiens
aagccaaatagctaaagctgttttatcacaacaaaggcctagtttggtccatgagtgtgcatttcatttcttcagttaaagccttcagagacacacaataaatttggaccaggggattttttagttattaatgctctctgaagaaaggcaacatctttttgagagcagcattggaccacaccccacaatctcaaatgattgaaattcatgaacatctaggatcccatgaaggtcactggaccctgttttttctacttcaaatcctgtagtagcctactgaatgagaaaacatattctgacccattgggatcaaatcaaaggcacagtgaactcctcatagcatcttctttggaattactcaggaaccagaactttttacacaaatgtaagaaattctaccaaggagtccccttacctaacagcatctcacaaggctgcaccagattccagaaaaggcttctcttgatacatcaaggtagaacctctatgcattttgtgaccgacttattcttagatcattggttttccaaaggctttgtggccatgaagccctttgagtgaaaactgtgcagaagcccagagtaaaagtgaagctgctctggatgaagtagtgaagcaagagtaggggcctgaatcctgctacaactatcttcctttaccaccgtggtaacacctaaggggacttccgtacaacaccttgaactcttccgaacacagtttgaaaaccactgccccagacagcaatatgtttgacctgaatggcattccaatcttttctgtacctccactcagcacagttcatgttcagtagatgctgaacattcttagaaatactgtgtgtgaacttagaaaagtgcaagaagacaggcatgtctttgaccccaggaatgatcatttgctgaagatggtgtcaagtgaacctagattaacagccctccactccagatggatatccagtgattcctagaatgggatatagccagagaacaattctatgcaccctacactgacagactcccttaagcaacaccagatgctctactggtacttgaagtacatgactttgaagtcttgaccctccatgaatacctgaattatcagcaagcgggttttgaagctggtgcctcattgaggccatattagagcaacttgtacatttgacctcttgttatcagccatggtactctacttcgtgtgcaagagataactatgaaagccaaattcaaatactggcaacatttcctaaaggggctcaatatctatcattcgtcttcttttccaaactacacatcactgtatgactcaaccagtagcagttatattgccccttggtttttattcagtttaactactgtttccaagataaatgagctaataagcttt

SEQ ID NO: 16093 - DNA, 771 bp, Homo Sapiens
cagaataacagcatcttcagaatccccctttctcataccctcttattaatggttgaattagtatgtctctgtcatctagagagtcttgcatcttgaccattacctttattttctgtcaagggaatccctagaagatgtatggggagacataggaaaggaatggaagaaagttaattcaccccaaattggataaattccatgacatttagcaatatacttctgtatccctagaattgtatcataactttagttcaaggacattgcatctcaggtgggttaaggaggttgggaaggggagaaaagggatgaggagatattttcttgagatttatctccttgagataatgcttgagaagtcatccagccatggacttcttggagtaatacttacaaagaattggatgcattttgcatccttaggcaaaaaccccagtgctgttacaactgaaaatcattagccttgttctctgatagatacttacaagcccaactacaggcaatcaaaatttatagcagatgagttctaactccatcaacctgtaatgtggtccatcttagggaaagaataggaaaacaccttggtttaccacaggctttgcttacagtttctgctttctgtgacctattttttgtatttcagcattttgtgaccgacttattcttagatcattggttttccaaaggctttgtggccatgaagccctttgagtgaaaactgtgcagaagcccagagtaaaagtgaagctgctctggatgaagtagtgaagcaag

SEQ ID NO: 16094 - DNA, 463 bp, Homo Sapiens
gcggccgccaccccggggcgccccctcgggaattccagagcccagcggggtgagggggggctgatccgggacgagtgaggggggtggacagtggattcagctggaactttggcccccgccggccccactaaggaccaacccgaccccctctcccgcagcactacgccccatcggtgttcgagaagtacacggccagcgtgaccgttggcagcaaggaggtgaccctgaacctctacgacacggccggtgagtgcgcctgcgcgccggggggcccgagggtccgcccgcccgaagggtttcccctcccgggcgtcccccactgggtgtccccgccctgcagccttggcagggccttggccggctcttcactcctggaggccgctcaggggcgctggctgcggggccctagaggccaagccctatacgtaagtggaaggtgtttggaggaggaggtgaactctgg

SEQ ID NO: 16095 - DNA, 1179 bp, Homo Sapiens
cgattggtgaatatgaacagttttgtacaaaaagcaggctggttaccggtccggaattccgggatatcgtcgacccacgctgtcgagtcgcgccgtctgcagtgctgcgggctccgggcaatggatgcccccgggtgccctggtccagacctgtcgaccctcggtcctgggcaggaaggagctgaagatcgtgatcgtgggcgacggcggctgctgtgcaagacctcgctgctcatggtgtacagccagggctccttccccgagcactacgccccatcggtgttcgagaagtacacggccagcgtgaccgttggcagcaatggaggtgaccctgaacctctagcgacacggccgggcaagaagactatgaccggctgcggcccctgtcctaccagaacacccacctcgtgctcatctgctatgacgtcatgaatcccaccagctacgacaacgtcctcatcaagtggttccctgaggtcacgcatttctgccgcgggatccccatggtgctcatcggctgcaagacagacctgaggaaggacaaggagcagctgcggaagctccgggccgcccagctggagcccatcacctacattgcagggcctgagcgccgtgcgaaacaggatccgagctgctctctacctggaatgttccgccaagtttcgggagaatgtggaggacgtcttccgggaggccgccaaggtggctctcagcgctctgaagaaggcgcaacggcagaagaagcgccggttctgcctgctgctctgacccagggcagaacgacctcaagaagccctgacaggcccggggcccagtggcgaatggaccaggagctcgccatcacgagctcaggcaagggctagggggcctgcgggtagacacttggaacactctggagacaaaccgttccgggcgggggtcagaccaagaagtcccctagggcgggccccggggacagtgggggaagatagggggacgcgacaacagagtagtcaaaggaacagagggccacgccgaagagacgcccacaagggggtaccaaagaaacaggagtaggcgtgctagacaaaaactcatgagagaagaacagacgcaagagacacagagcgcaacagagcaggcgaacagcgagccgaaagcaaggacgagcccgaacaaaagaacaggagaacaaagaag

SEQ ID NO: 16096 - DNA, 491 bp, Homo Sapiens
  misc_feature (32)..(32): n is a, c, g, or t
gaacttctggggctcctgctggggccacttcntgggctgctccctcgggcctgtagggggaggtggccttctgacccctttacacgtcccctgggtggacctccctgctgcaggcaccatacctgcgatggtgtacagggctgtgatgccgagcgtgaggatggtggagaggtagaagttccagcccaggcagatgtgcacaaacagagcccccgcgtacaggtccagctgcggagggagagagccttgtgtggggctgttattcccagggctccagcaagccactccctgggtgacctccggcaaggccctctctgggcctcggtggcctgtggataaggaggggagacccccactcgcctgcctgcctgcatcacggggccattgtgaggttgggggaagacctggccgtggagctacaagcttgtgcggatgtcaggggacattactgttgctaataaagtccaaagtggccaatgcctttcccaaaa

SEQ ID NO: 16097 - DNA, 936 bp, Homo Sapiens
gcctgcggcaggacagccatggtcgccaactccaccagcgacctccacactcccgggacgcagctgagcgtggctgacatcatcgtcatcactgtgtattttgctctgaatgtggccgtgggcatatggtcctcttgtcgggccagtaggaacacggtgaatggctacttcctggcaggccgggacatgacgtggtggccgattggagcctccctcttcgccagcagcgagggctctggcctcttcattggactggcgggctcaggcgcggcaggaggtctggccgtggcaggcttcgagtggaatgccacgtacgtgctgctggcactggcatgggtgttcgtgcccatctacatctcctcagagatcgtcaccttacctgagtacattcagaagcgctacgggggccagcggatccgcatgtacctgtctgtcctgtccctgctactgtctgtcttcaccaagatatcgctggacctgtacgcgggggctctgtttgtgcacatctgcctgggctggaacttctacctctccaccatcctcacgctcggcatcacagccctgtacaccatcgcaggtggcctggctgctgtaatctacacggacgccctgcagacgctcatcatggtggtgggggctgtcatcctgacaatcaaagcttttgaccagatcggtggttacgggcagctggaggcagcctacgcccaggcattccctccaggaccattgcaacaacactgccactgccacgtaacagacgccatgcacatgtttcgagacccccacaacaggggacctgccgtggacgggatgaccttggctgagcatcatggccacctggtactggtgcacgaccagtcatcgtgcagcgatcaatgtcagccgggactgaacctgccaagcggctccatcctggcagttactcaagtgctccca

SEQ ID NO: 16098 - DNA, 492 bp, Homo Sapiens
tgcaggataacgcaatctccactgagatccaggctttgctttcctcctattacagtgacaggtgatagggctgggtaggcttggggcctgagctctgactagcccaaccctcccccaaccccttcctggtgccacagctattgagccgctggatgacatcgcagcggtgacagacatcctgacccagcgggagggcgcaaggctggagacacccccaccctggctggcaatgtttacagaccagcctgccctgcctaacccctgctcgcctgcctcagaagcccctctaaaattgtggttgccatggtaccgagggactcattcctggggctcgctgggacctccctaaacccttcctggaagaaaactggaaccaactctgccctacctccctgcactaaccagctttgaggatggcactgaagaacccttggagcaaacatacctcccttgtgactcccacatcaaccattaaagttatttaacagcaaa

SEQ ID NO: 16099 - DNA, 628 bp, Homo Sapiens
tgaaggctgctgttaaataactttaatggttgatgtgggagtcacaagggaggtatgtttgctccaagggttcttcagtgccatcctcaaagctggttagtgcagggaggtagggcagagttggttccagttttcttccaggaagggtttagggaggtcccagcgagccccaggaatgagtccctcggtaccatggcaaccacaatttaagaggggcttctgcccacccctgcagcctaccccaggtccagcagaggaacaggaggccagactggcaaacttgctatagacagcgccgtatccagagcccaactgcgcatgggtcattttctcttctgggcagatcctatgccagcacctttctctctcacactggtgactggagccaagtgcgaggttggcctttgctgcagaggcctctggtccgtggggatcgctgaggtgggaggggggcaaccgagcgagccctaggggagtggtctggggggacagcatccagggaaaaggttcggggtctcccccagggcagggggtgggtccagtctggggctggggccactgaggcaggcgagcaggggttaggcagggcaggctggtctgtaaacattgccagccagggtgctcgtgc

SEQ ID NO: 16100 - DNA, 315 bp, Homo Sapiens
tttaccctttcatatatttttatttacactttaacaacttgctgggaatttaaacaacttgctgggaacatcctttgtgaggcactgtagcctttttttatttgaaactacttaaactccaagacaggctcactaactctttttcaagtgcaacaacaaatgtgttagctgaaaatagctaatttaatgattatttgtgacacagacacgattatgtgagccaagagagcctccccacctctgtctcccctgtggaggaggaggtctttgtgtgcttttgtgtgatggttccactgaattcattacaatagaaat

SEQ ID NO: 16101 - DNA, 558 bp, Homo Sapiens
ttcaggtaaaaccacattgcctttatttggctaaagaacaaaatccaaaataactcagaacaaactaagaacagacaggaaaattacagactgaaccccacttgaggaagacttccccacggactcacactggtgatggggcgaacgttcaagacgaagccagcagtcctttccaagactcttttgtcttttagggatcctcaatacaaaacaacccaactaatccaggatatgtgttcaaaacagtcagttttccccctcaaaaggcgggaaggcccacttcaaacctccaggaacacaacccaagtcatcccagtgttaaacctggtgcttccgttttctgcctcaatccgagcgctaacataaaatcttggcagacaacaatctttcttcttcaagaaaattaacatttaatggtataatcccaagaacatgttctacttatttgcttggaaaaatagaagctagggaccactctttatccgatggcagtctatttcccagtaggaaactaatctcaattgacttggtataggattgagtattgtcccgctcctc

SEQ ID NO: 16102 - DNA, 854 bp, Homo Sapiens
atgttctttccacagtggttcatagggcgtcattcccccttcctggattattttgactatgggtagcttattttcaagagctctttgcctttttaatcctgttccagatcacttatccaaaatctttccaaatcaattatattttgctgcttttctttaattccctaaaagccatagcttctagattttctatcagcacacattctcaccagaagttgaaccaatacaggtagaaaaagaaagcccccttaatgtttttaactgatgatatttttttaagcttaccaatataagtatttttaaaggttctatttttcaaagtcataacaatgattgttcttgttttctctcatagaatagactgccatcggataaagagtggtccctagcttctatttttccaagcaaataagtagaacatgttcttgggattataccattaaatgttaattttcttgaagaagaaagattgttgtctgccaagattttatgttagcgctcggattgaggcagaaaacggaagcaccaggtttaacactgggatgacttgggttgtgttcctggaggtttgaagtgggccttcccgccttttgagggggaaaactgactgttttgaacacatatcctggattagttgggttgtcttgtattgaggatccctaaaagacaaaagagtcttggaaaggactgctggcttcgtcttgaacgttcgccccatcaccagtgtgagtccgtggggaagtcttcctcaagtggggttcagtctgtaattttcctgtctgttcttagtttgttctgagttattttggattttgttctttagccaaataaaggcagtgtggttttacctgaaa

SEQ ID NO: 16103 - DNA, 302 bp, Homo Sapiens
cctggtacgggagtggaagagggggtggtaggaggcagccagttccgagtggcaggtgcccggcccacgccgtctcaggttaagtagggcgcacggaggccaggcactgccactgagaggcgccagacctcacccagatatcctgcttctcgccgatcgggaagttggaatacaagtctatgatttctggtgttctatacattggtgttgtattcctcgtgatctgaaaaaatacaaacatttcaaaggaaaagttgcatcccacaaacagtattttttatgttgcaccactcccgtaccag

SEQ ID NO: 16104 - DNA, 505 bp, Homo Sapiens
tgatctagaggatccctgtaccttcgggcggttctgaagatcttctaccagacgtgccgcgccgtgcagcacatgcaccggcagaagccgcccatcatccacagggacctcaaggttgagaacttgtggcttagtaaccaagggaccattaagctgtgtgactttggcagtgccacgaccatctcgcactaccctgactacagctggagcgcccagaggcgagccctggtggaggaagagatcacgaggaatacaacaccaatgtatagaacaccagaaatcatagacttgtattccaacttcccgatcggcgagaagcaggatatctgggccctgggctgcatcttgtacctgctgtgcttccggcagcacccttttgaggatggagcgaaacttcgaatagtcaatgggaagtactcgatccccccgcacgacacgcagtacacggtcttccacagcctcatccgcgccatgctgcaggtgaacccggaggagcggctgtcca

SEQ ID NO: 16105 - DNA, 500 bp, Homo Sapiens
agggaacagttaggtgtctcatagtcactcatagtggggtggtcaggggtaatggcatctccccactttaggcttctcaaacagacttttgacacctctcaagttcagagctctgatgtggaaagacaggaggtgtggggaaggagggggatttcgtgtgtttgcatgagtgtgcgcttcacccccagaaagttggcaagagggagggaaggaaggagagcaaaatcttcggaaggtgtttcttgtacctgagggatcctgccctgaatctccatagtctccactgtgaactgaggaggggaggggtgtgctggggaatccagtgtcagactctgcagcaagacgtcaggtggggggaccagcaggggaggcgggaggtaaaaatagctccggccagccgaccctcggagccattgtcccaggctgggccttgggcttgggtccaggagctattctggggcctgggagagtcacattcctggaggaagccatagcgccca

SEQ ID NO: 16106 - DNA, 533 bp, Homo Sapiens
  misc_feature (100)..(160): n is a, c, g, or t
  misc_feature (421)..(481): n is a, c, g, or t
gtggcagcgggggcttcggagacgagtgctgagccaagaacctcctagaggctgtccctggacctggagctgcaggcatcagagaaccagccctgctcannnnnnnnnnnnnnnnnnnnnnnnnnnnnnnnnnnnnnnnnnnnnnnnnnnnnnnnnnnnncttcctctgcctgtgcaaggcagggacccacagtggctgcctgcctccgggagggaaggagagggagggtgggtgggtgggagggggccttcctccagggaatgtgactctcccaggccccagaatagctcctggacccaagcccaaggcccagcctgggacaaggctccgagggtcggctggccggagctatttttacctcccgcctcccttgctggtccccccacctgacgtcttgctgcagagtctgacactggattnnnnnnnnnnnnnnnnnnnnnnnnnnnnnnnnnnnnnnnnnnnnnnnnnnnnnnnnnnnnntcatctgtggacactggagtctggaataaatgctgtttgtcacatcaacacc

SEQ ID NO: 16107 - DNA, 437 bp, Homo Sapiens
aggtgtctgtgcaggtggtcggagcggacgaaggtcttgcagcagctgtcgcactggtaggggcgcaggcccgtgtgcacgcgcatgtggttcttcaggtcgtagttgtgggcaaaggcggcgccgcactgctggcacaggtacggcttctcgcccgtgtgcttccgcatgtgcaccttcagcttgtcctgcctggtgaagcggaccttgcagatgttgcactcgtagggcttctcgcccgtgtgggtgcggatgtgtcgcggcagcttgccggcgccctggatgaccttctcgcagatggggcacttctggaaggccttggctcggatcttcttctccaccttctgcgaccaggccgggtagacgtcgccgtcgtgggcgccgctgaagtacttcaggtagtagtccatgacgcccttgtcgtcggcccgcgactc

SEQ ID NO: 16108 - DNA, 434 bp, Homo Sapiens
aggtgtctgtgcaggtggtcggagcggacgaaggtcttgcagcacctgtcccactgctaggggagcaggcccgtgtgcacgcgcatgtggttcttcaggtcgtagttgtgggcaaaggcggcgccgcactgctggcacaggtacggcttctcgcccgtgtgcttccgcatgtgcaccttcagcttgtcctgcctgtggacggggcaacggggcgggcacggtcagtggggccggggacccccgatccccgcccagggaccctcacggacacggcaggccctggatcatcacccttgcagaacacggaccgtgcaccagaggtttcggtgccccgatggggacggtccctcgaaaaacgagacgagtgggggcgatttcgcattctgaacatctaaagagggcctcggaccctgagtgctgtgtggccttgggaa

SEQ ID NO: 16109 - DNA, 613 bp, Homo Sapiens
caaatattccttgatggccaggaaaataaaagaagctgtcttgtcgacggtctcactgatgcctcttctgcattcaaagttcctcgacccgggccagatacactccagttcacagtggatgtcttccactttgctaatgactccagaaacatgatatacatcacctgccacctgaaggtcaccctagctgagcaggacccagatgaactcaacaaggcctgttccttcagcaagccttccaacagctggttcccagtggaaggcccggctgacatctgtcaatgctgtaacaaaggtgactgtggcactccaagccattccaggaggcagcctcatgtcatgagccagtggtccacgtctgcttcccgtaaccgcaggcatgtgacagaagaagcagatgtcaccgtgggggccactgatcttcctggacaggagtggtgaccatgaagtagagcagtgggctttgccttctgacacctcagtggtgctgctgggcgtaggcctggctgtggtggtgtccctgactctgactgctgttatcctggttctcaccaggaggtgtcgcactgcctcccaccctgtgtctgcttccgaataaaagaagaaagcaata

SEQ ID NO: 16110 - DNA, 639 bp, Homo Sapiens
caaacagtgccgctaccccaggcagggcaatgtgagcagccaggccatcctgcccacctggttgcccttcaggaccacggtgttctcagaggagaagctgactttctctctgcgtctgatggaggagaactggaacgctgagaagaggtcccccaccttccacctgggagatgcagcccacctccaggcagaaatccacactggcagccacgtgccactgcggttgtttgtggaccactgcgtggccacaccgacaccagaccagaatgcctccccttatcacaccatcgtggacttccatggctgtcttgtcgacggtctcactgatgcctcttctgcatacaaagttcctcgacccgggccagatacactccagttcacagtggatgtcttccactttgctaatgactccagaaacatgtgacagaagaagcagatgtcaccgtggggccactgatcttcctggacaggaggggtgaccatgaagtagagcagtgggctttgctttctgacacctcagtggtgctgctgggcgtaggcctggctgtggtggtgtccctgactctgactgctggtatcctggttctcacccaggaggtgtcgcacttgctctcaccctgtgtctgcttcctggcctgt

SEQ ID NO: 16111 - DNA, 471 bp, Homo Sapiens
ggggggcaggcccccaaaaacgggccacaggccccgatttccgggaagagccgacacagccacgaaccagacaagcagacaatcagcggacaatcggttctggactcacccctcatccggcccccagccccgccagagcctccgtggctgcgggtgttgggaaccatgcctgccagccagtatgtgcccctcacccaggcctggctgggccctggagagtcctgtttgcacagcccaggggtggtccgctctggcccgccccggagcagggagggtggcctggacaacgcccgagggcccctgcaagcactttacttcctgttcctccccagccttaaccccaaagccctcctgcaccccaaagaagccactgaggctgaccgagccacactgtctccccaggggcgtcgaccaggcccagctgggtccccagggccagcacatggaataaaatagccagggccacactgc

SEQ ID NO: 16112 - DNA, 511 bp, Homo Sapiens
ttcacccagttgggaaacctcactgaaaccccctaggtttgaaaagttgccggaggactgtagcggagcatggacattctgaagcaagccttcgtccgggtctccccacgcccaccgcccgctttgagcaaaggaccttcagcgtcatcaagatcttccctgacctctagcagcaacgacatgctcctcttcatcgtgaagggcatcaacttgcccacacccccaggactgtcccctggcgatctggatgtctttgttcggtttgacattcccctatcccaacgtggaagaagctcagaaagacatagaccagtgtgatcaagaacacagactcccctgaggtcaaggagctagttcaaactctgttcctccccagccttaaccccaaagccctcctgcaccccaaagaagccactgaggctggccgagccacactgtctccccaggggcgtcgacctggcccagctgggtccccagggccagcacatggaataaaatagccagggccaca

SEQ ID NO: 16113 - DNA, 585 bp, Homo Sapiens
acagaggccaatcacatccgactgtcctgcctggctgtgggcctggccctgctgaagcgctgcgtgctcatgtacgggtccctgccatccttccacgccatcatggggcctctccgagccctcctcacggatcacctggcggactgcagccacccgcaggagctccaggagctgtgtcagagcacactgaccgaaatggaaagccagaagcagctctgccggcagctgacctgtgagaagagcaagcctgtcccacagaagcttttcacaccacggctggtcaaagtcctagagtttggaagaaaacaaggcagtagtaaggaggaacaggaaaggaagaggctgatccacaaacacaagcgtgaatttaaaggggccgttcgagaaatccgcaagcacaataaaaaaaaggcgaggatgcaacaaacaaaaatcatggaacgggatgcggaaagaaagcggaaagtaaagcagctttttaacagcctggctacacaggaaggcgaatggaaggctctgaagaggaaaaagttcaaaaaataaattacattttataaataaggcaaggaactggacattccttca

SEQ ID NO: 16114 - DNA, 728 bp, Homo Sapiens
  misc_feature (339)..(390): n is a, c, g, or t
caggctggtacggcgccggaatctttgggcatgctgtgggcctggcctgctgaagcgctgcgtgctcatgtacgggtccctgccatccttccacgccatcatggggcctctccaagccctcctcacggatcacctggcggactgcagccacccgcaggagctccaggagctgtgtcagagcacactgaccgaaatggaaagccagaagcagctctgccggccgctgacctgtgagaagagcaagcctgtcccactgaagcttttcacaccccggctggtcaaagtcctcgagtttggaagaaaacaaggcagtagtaaggaggaacaggaaaggaagannnnnnnnnnnnnnnnnnnnnnnnnnnnnnnnnnnnnnnnnnnnnnnnnnnnttataggtgtgagccacagcacccagccaaaaaagtaattttttttagagtaataatgctataatgttggtgtgattccaacctccagctccccccacccgctgcctgcggttttgtttctgttaaaacgtcacctgatgaaatagaatgaatcctgaaatgcacctctgggatcgggaatggtctgtgtgttatcagctgcgactggttcactgcgtctggacaagcctcatggggactggggattctggccagtgtaatttctgtcaaccacggacgtttgccttcatgtgtagaatttactgttgttatgcaaattatattttcaattataaatg

SEQ ID NO: 16115 - DNA, 504 bp, Homo Sapiens
tttttcaaaagtcactgcctttcccggcagtccccaagcctttccctacggcttcacccgcaccccctcagagcccagggctgcaaccccctcattatccaccacgcacagatggtacagctggggctgaacaaccacatgtggaaccagagagggtcccaggcgcccgaggacaagacgcaggaggcagaatgaccgcgtgtccttgcctgaccacctggggaacacccctggacccaggcatcggccaggaccccatagagcaccccggtctgccctgtgccctgtggacagtggaagatgaggtcatctgccactttcaggacattgtccgggagcccttcatttaggacaaaacgggcgcgatgatgccctggctttcagggtggtcagaactggatacggtgtttacaattccaatctctctatttctgggtgaagggtcttggtggtgggggtattgctacggtcttttaattataataaatatttattgaatgctta

SEQ ID NO: 16116 - DNA, 224 bp, Homo Sapiens
tggttgagagctgggagcaggtgccgaagcgcaggcactcgttgatgtcttggcatccgggctggccgggcacggtgtggaagcccgagcggcaggcacagtaggccgcggtctcaacgggatacggtgtttacaattccaatctctctatttctgggtgaagggtcttggtggtgggggtatggctacggtcttttaattataataaatatttatggaatgct

SEQ ID NO: 16117 - DNA, 351 bp, Homo Sapiens
gcagcctctttccccgagtacctgtaagaggttggatctaatccgtttatctgtgcactgcttggcaacctccttagccaaccgagtcacctcatctgaggccttggcgatgtccttggcacactgaatgagtgcccgcttggtaccactgccccctcttaccagccgagacatctcagccatcagcagagccatgcgcttggctgctgcaatgatgtcattgccctagagggaagcaaagatacagtgtgagctctgcccacgctctggccatattaaggaaggaaggagaagcacagagaagaggagaaaagggccgttcttgagtgatacggatagcactggaagaaa

SEQ ID NO: 16118 - DNA, 1117 bp, Homo Sapiens
ggatgaagagtttcctgagcagaaggcgggggaggtgattaaccagccaatgatgatggctgccagacagctccatgatgaagctcgcaaatggtccagcaagggcaatgacatcattgcagcagccaagcgcatggctctgctgatggctgagatgtctcggctggtaagagggggcagtggtaccaagcgggcactcattcagtgtgccaaggacatcgccaaggcctcagatgaggtgactcggttggccaaggaggttgccaagcagtgcacagataaacggattagaaccaacctcttacaggtatgtgagcgaatcccaaccataagcacccagctcaaaatcctgtccacagtgaaggccaccatgctgggccggaccaacatcagtgatgaggagtctgagcaggccacagagatgctggttcacaatgcccagaacctcatgcagtctgtgaaggagactgtgcgggaagctgaagctgcttcaatcaaaattcgaacagatgctggatttacactgcgctgggttagaaagactccctggtaccagtaggcacctggctgagcctggctggcacagaaacctctactaaaaagaaggaaaatgatctgagtcccaggagctgcccagagttgctgggagctgaaaaatcacatcctggcctggcacatcagaaaggaatgggggcctcttcaaattagaagacatttatactcttttttcatggacactttgaaatgtgtttctgtataaagcctgtattctcaaacacagttacacttgtgcaccctctatcccaataggcagactgggtttctagcccatggacttcacataagctcagaatccaagtgaacactagccagacactctgctctgcccttgttccctaggggacacttccctctgtttctctttccttggctcccattcactcttccagaatcccaagacccagggcccaggcaaatcagttactaagaagaaaattgctgtgcctcccaaaattgttttgagctttccatgttgctgccaaccaaaccttccttccctgggctgtgctacctgggtcctattcagaagtgagctactagtgagcagtcagcaact

SEQ ID NO: 16119 - DNA, 596 bp, Homo Sapiens
gtcttgcgaggtcattctggacttggggtgggccttaaattcaatgaccagggttcttataaagagagcggccacaggaagacggaggagaaactggaagatgcagccgcagcaagggactttatctgagggtccgggcagaggacgtcctccatgtcatcgatgaacttctcagcgaccaggtcggagaacagcgtcatgttgcgcacctgctgtggcttgtcgcaggcgatggagtagaggttttcactctcgtgcttctcgtggaacatgtccccgatgccgatggccgtcactgtgacgtcgcggtcgcacagcgcccgcaagttgaggtcatcgtcccgagggtcgtggcgcccgtccgtgatgactaccgcaaacacacgtgtcttctggcgccggctctccttgatgaggcggtcgtaggcaaacttgagggctgagggtgtccaggtgccacctgcaatccactcgaggttctcgacagcctccattgaagctcgacagggagtcgatatgttcgtcgtccagctggatgcactcaaaggtgccctcgtgctgtactcaccacgcccacacgcaagcgggatcctcga

SEQ ID NO: 16120 - DNA, 558 bp, Homo Sapiens
ggggccggacgcaccttccccaggaccattcccctgatccaacagttgttaaacgccacggagctcacgcaggacccggccgcctactcccagttggtggccgtgctggtctacacccccgagcgggccaagttcgccaccggggtagagcggcaggactggatggagctgttcattgacacctttaagctggtgcacagggacatcgtgggggaccccgagaccgcgctggccctctgctaaagcccgggcacccgcccagccgggctgggccctccctgccacactagcttcccagggctgcccccgacaggctggctctcagtggaggccagagatctggaatcggggtcagcggggctacagtccttccaggggctctggggcagctcccagcctcttcccatgctggtggccaccgtgtcccttgctgcggctgcatcttccagtttctcctccgtcttcctgtggccgctctctttataagaaccctggtcattgaatttaaggcccaccccaagtccagaatgacctcgcaagacccttaactcaaaaaaa

SEQ ID NO: 16121 - DNA, 1617 bp, Homo Sapiens
  misc_feature (56)..(95): n is a, c, g, or t
ttaagtgcataaaaccctaacagtactcagatggcttggggctttgagattggctnnnnnnnnnnnnnnnnnnnnnnnnnnnnnnnnnnnnnnnnaaatttaaaaagatgtcctcactgcacaagtgactacgggctacaggcaaggatgggagacggaggcttcaacacaactcattgcacttagaaccgttactaaccgaaacaccatttgcttgtcaacaatgtacccttgacagcagggagaaacttctttatagtctctgcttcagacaagatttacagctttctccaaggccagaggccaattgtgaccacaagtcttgtttcttgtccaccagacccaatcctctggcaccttgtaccccccgttcctcagcaatatgctcggcctaggttccagaggcagctggaaggaagcagctatgggctcattcagttctgtttgcccaaatccagaagccctaggaaagtcccgtctgagtcttgactcctgacccttgcagtggctggagtcggtactggtgcacacccccactcccacggtgtgggtagtgctgtgaattggaaaccgcagataccctggaggcctggtagacagctgactgcccagcactgggcagactgatagtccgtaagtctgatggcaatgacgacctagagttctgaggaaaggaggtggaactcagagttcctgtgctggactgagaaactgaatctgaggttggcgagtctgagggtccctgcagggtagggctagcagcactagaagggcagctcctccttggaagattgctgccagtgctgtttccagaatgtggctggctgctaaaataccctggtgtccccgtaaatggggccaacgagtctgtggacacagggtgggcggggctggaataggacgtggaagagagggatgattctgaagaaccgtgagagggggggtttccaggtctcagtgcagtagttcgataactgtatcctggagactgtgtaggatgtcctctgaagggggaggaactctgctgaaggaggctttgtgattctgtccgaggactatcacactgcaggagctggtagctgtatctggaagggctgtaaactgttgctcctttagagagtgctgagcttaatgtctctgggccttctccatctgcagggtctgagtctttctctgtgatgttactctcccatgtgggagagggctctcccttttgggccaccctcacgctgcttcggaggaccttggggatgctccctccttctcggagtcgttctactgatgtgggaaccatccacctactgctgatattctcttgaggtctgcagtgagatgaagaagtgcctctggaatctgatgggcttaccgcctccaaatgggacatagaggaatgagatggggagaattttttgtgaggggaagatggagttcgggctgaggatccctgcacaccatggggcaccagtgtcggaaacggagttactgctgccatgcccagctcctgcagacttgcttttgctctgtgcagagtcacctcccccaccagcagaattttccttagcttcttgtttcccggttcgggactccagcaggggtacttttttcctctggggtggg

SEQ ID NO: 16122 - DNA, 842 bp, Homo Sapiens
caggaaccccagcaaccagggcctgctgcacaaacacctgcacctcttcctcacgccagggctcctggaggcagagaccatgcagcacatcttcctaaacaactatcagctctgctccgagatcagcgagcctgtgttgcagcacttcgtgcacctgctggccacgcacgggcgccatgtgcagtacctggacttcctgcacaccgtcattaaggccgagggcaagtacgtcaagaagtgccaggacatgatcatgactgagctgaccaatgcaggtgacgatgtggtcgtgttctacaatgataaggcatcgctggcccacctgctggacatgatgaaggccgcccgcgacggcgtggaggaccacagccccctcatgtaccacatttccctggtggacctgctggccgcctgtgccgagggcaaaaacgtctacactgagatcaagtgcacctccctgctgccgctggaggacgtggtgtctgtggtgacgcatgaggactgcatcactgaggtgaaaatggcctatgtgaacttcgtgaaccactgctacgtggacacggaggtggagatgaaggagatctacaaccagcaaccacatctggacgctctttgagaaacttcaccctggacatggctcgggtctgcagcaaagcgtgagaagcgcgtggatgaccccaccttggagaagtacgtgctgagcgttgtgctggacaccatcaacgccttcttcagctccccattctctgagaacagaacttccctgcagacacaccagacgattgtggtgcaagctggtgaagttaccacacgcctcctcgagtgtcctcactacatgccat

SEQ ID NO: 16123 - DNA, 600 bp, Homo Sapiens
atggtgtccagcacaacgctcagcacgtacttctccaaggtggggtcagccacgcgcttctcacgcttgctgcagacccgagccatgtccagggtgaagttctcaaagagcgtccagatgtggatgctggtctctagccataggagtgtgttctgggtcccaaattgtcctggtcatcctttgccattgagatgctgcctttgcatatagtttcagcagacttggaaataagtcatcatctgcttgtcctcaggtaataaattatgccagaagatgaaataaagagatcaaagacagacattatactgcctttggtttcctaaaaacgaatacatggctaaaagatgaagacacaagaatgtagggtattatacatgtacaccagccatttaagggactagttcgcgtccttattcgttacctcccaacttagtctagctcctgcagtgtgatagtcctcggacagaatcacaaagcctccttcaacagagttcctcccccttcagaggacatcctacacagtctccaggatccagttctcgaactaatgcactgagacctgacacacccccctctcacacaaaaggggatcctctaaaa

SEQ ID NO: 16124 - DNA, 1322 bp, Homo Sapiens
tagctaggtagaggctgggtttaaatcggcacgagggctggaaggagtggaaccagacttgctggtctgatccatgcacaaggccaggctgctaggcctctgtgcctgggcacggaattcggtgcggatggccagctccgggatgacccgccgggacccgctcgcaaataaggtggccctggtaacggcctccaccgacgggatcggcttcgccatcgcccggcgtttggcccaggacagggcccacgtggtcgtcagcagccggaagcagcagaatgtggaccaggcggtggccacgctgcagggggaggggctgagcgtgacgggcaccgtgtgccatgtggggaaggcggaggaccgggagcggctggtggccacggctgtgaagcttcatggaggtatcgatatcctagtctccaatgctgctgtcaaccctttctttggaagcataatggatgtcactgaggaggtgtgggacaagactctggacattaatgtgaaggccccagccctgatgacaaaggcagtggtgccagaaatggagaaacgaggaggcggctcagtggtgatcgtgtcttccatagcagccttcagtccatctcctggcttcagtccttacaatgtcagtaaaacagccttgctgggcctcaccaagaccctggccatagagctggccccaaggaacattagggtgaactgcctagcacctggacttatcaagactagcttcagcaggatgctctggatggacaaggaaaaagaggaaagcatgaaagaaaccctgcggataagaaggttaggcgagccagaggattgtgctggcatcgtgtctttcctgtgctctgaagatgccagctacatcactggggaaacagtggtggtgggtggaggaaccccgtcccgcctctgaggaccgggagacagcccacaggccagagttgggctctagctcctggtgctgttcctgcattcacccactggcctttcccacctctgctcaccttactgttcacctcatcaaatcagttctgccctgtgaaaagatccagccttccctgccgtcaaggtggcgtcttactcgggattcctgctgttgttgtggccttgggtaaaggcctcccctgagaacacaggacaggcctgctgacaaggctgagtctaccttggcaaagaccaagatattttttcctgggccactggggaatctgaggggtgatgggagagaaggaacctggagtggaaggagcagagttgcaaattaacaacttgcaaatgaggtgcaaataaaatgcagatgattgcgcggctttgaatccaaaaaa

SEQ ID NO: 16125 - DNA, 460 bp, Homo Sapiens
atgggacccaggcaggacatgggggcaggactgatttgatgaggtgaacagtaaggtgagcagaggtgggaaaggccagtgggtgaatgcaggaacagcaccaggagctagagcccaactctggcctgtgggctgtctcccgggtcctcagaggcgggacggggttcctccacccaccaccactgtttccccagtgatgtagctggcatcttcagagcacaggaaagacacgatgccagcacaatcctctggctcgcctaaccttcttatccgcagggtttctttcatgctttcctctttttccttgtccatccagagcttgtcccacacctcctcagtgacatccattaggcttccaagaaagggttgacagcagcattggagactaggatatcgatacctccataagcttcacaccatgccacaccgctcccgtctcccctcccacagcgtcctctaa

SEQ ID NO: 16126 - DNA, 656 bp, Homo Sapiens
ccagggagtcatgaccacgcgcacgaacgagaacgtggagctgcaggagctcacatgaccgttcatcaactacactcgagaaggtgcgcttccgtggagcagcagaacgcggcgcacgccgccgaagtgaaccggctcaagggccgcgagccgacgcgagtggccgagctctacgaggaggagctggggagctgcggcgccaggtggaggtgctcactaaccagcgcgcgcgcgtcgacgtcgagcgcgacaacctgctcgacgacctgcagcggctcaaggccaagctgcaggaggacgattcagttgaaggaagaagcagagaacaatttggctgccttccgagcggacgtggatgcagctactctagctcgcattgaccctggagcgcacaattgaatctctcaacgcaggaagatcgcgtaccttaagaaaagtgcatgaagaggagatccgtgagttgcaggctcagcttcaggaacagcaggtccaggtggagatggacatgtctaagccagacctcactgccgccctcagggacatccgggctcagtatgagaccatcgcggctaagaacatctctgaagctgaggagtgctcaagtcgaaggtgaagacctgaccaggcagcgacaagaacacgacgcctgcgcaggc

SEQ ID NO: 16127 - DNA, 794 bp, Homo Sapiens
catccacagcaaagtcaatatcttgccaacaacattagcatatgaaagcggttattataggcagcattagggagagtttgagtcacagcaatcgtgttggtggtcaggttaactctggcaatattcccggtgttgtacatgttgacgtacatgttgtgttgttaaactgctgtaccagtaccttggccataggtgatccgcaactctcgagcatttaaatacaatagcaaatcatccagtgtgttgtacagtctataatactccaacagtctcccatctgtattcaatggcgccacccaatacagtcctttgtttggatgctgatgttcaccacaccaccatgaccacagctccctggagtggggggagggtggacgacaggggtgttttgatctttagaggcctcacactctttcagcttggtcttcaaagccacaatttctcggcgaattggcaaggacattgtttttgtctagtgtctcaagcctctctaccaagagagtcatatttcttacctccacctccagctggtcaacaatttttgagcttccaccaaaactctccttcagctgtatgaccagtttttccatctccttcacttctaccttgatcagctcgaagtccagttcagtgtaagaaatggtatccttctccatgatgtcaattcggacagttaggtttaacagtttcttttcatacacactaattaattggacatattccctcactttggaaagttctttctcaaacttctgagaaagaacatgagctgtgaattccaagagttccacatt

SEQ ID NO: 16128 - DNA, 392 bp, Homo Sapiens
cctagagatccctgtcatatggcaggccaagcaacattagcatatgaaaagcggttattataggcagcattagggagagtttgagtcacagcaatcgtgttggtggtcaggttaactctggcaatattcccggtgttgtacatgttgacgtacatgttgttgttgtaaactgctgtaccactaccttggccttgccatatgcaatgcatgggccaaggccatggttgttggaaacgtaagaaacatacgaagctcaacttatcgactctaacttggccctgctattgatctgttactttatattttctgggaagttcaatttttatctattactaacttctcatcttaacatatcgactcgtggccttgccatatgaagtgatcctctagag

SEQ ID NO: 16129 - DNA, 1117 bp, Homo Sapiens
  misc_feature (75)..(76): n is a, c, g, or t
  misc_feature (931)..(948): n is a, c, g, or t
tatcagaaaagagcataccagtgtatgaaatgtatggtagctctatttagtactggtcctgttgcttaccaatcnntgcagggcaatggagatctaatagaaagtggacctgggcagtggaatggcttgaagatgaacttgaaagaagaccatatactggcaatcctcagtacacttacaacaattggtctcccccagtgcaaagcaatgaaacgtccaatggttatttcttggagagatcacatagtgctaggatgacacttgcaaaagcttgtgaactctgtccagaggaggagccagatgaccaagatgctccagatgaacatgagtcgcctccacctgaagatgccccattgtacccccattcacctggatctcagtatcaacagaataaccatgtgcatggacagccatatacaggcccagcagcacatcacatgaacaaccctcagagaactggccaacgagcacaagaaaattatgaaggcagtgaagaagtatccccacctcaaaccaaggatcaatgaaatgcacataattaactggttccatcaagactgtgcacccaggccttacagtccaacctttttctgtgtctggctaatatttaaaactagaaaaactattcctaatcaacatggagtggagagtttattcactgtcttatctgcagaaatttgctgtcaatatataacccgcctgcagtggaaagtgtatagtgttttgtaataaatggcctgatgctaatgtgtaaatggcaaaggtgtatatagtatattaatgttgactgttaattcttaagcaagaaacttttttcttgatgagactcacagatctacacaaactacaaaagttaattttcttgttacacccactgcactctgcaaccagtgttgcctgcctcatggcagttggatcagctcctttaccnnnnnnnnnnnnnnnnnnccaacagcaacaaaacagagcccatccatgtcagccacaccaatagtttcatgttaattctttgccactggagtcaatatttgctatgagcaatgtaaggctggtaacctgttaaataatttggttgactgtggaaaattggtgagaacactgcccttcaaacaatggg

SEQ ID NO: 16130 - DNA, 614 bp, Homo Sapiens
  misc_feature (70)..(89): n is a, c, g, or t
tcttgttacacccactgcactctgcaaccagtgttgcctgcctcatggcagttggatcagctcctttacnnnnnnnnnnnnnnnnnnnnccaacagcaacaaaacagagcccatccatgtcagccacaccaatagtttcaagttaattcttggccactggagtcaatttgcctatgagcaatgtaaggctggtaacctttaaattatttggttgatgtggaaaattggtgatgtaacactgtttctagatttttttcattgcctttttattctgatattaggttaatcactttgaagctatagttatgctgtaacatttagcatggcttcacaccaagttagtgtagccaatgaggaaaaagttaccataatgacagcagttgtccgagaagtgacagctgtattactcagagcttttacttcttacacctagaatattaaaatataaaacaaggggagaaatatgacagtctcactgcattgcccaggctggattgtatgtggctattcaccggaaagagcatagtatgttacagcctccacctcctgtaccaagatgtccgcctgcccagcctcctgataagctggtcagacataacggtgtcctctagatc

SEQ ID NO: 16131 - DNA, 781 bp, Homo Sapiens
gctggtaccgcgtcggatatcccgggatatcgtcgacccacgcgtcggctgtgatcggctgctgagtgaggcccagaggatcacggggctgcgagcactggcagggctggcctacaacgcctcgggctccgagcactgctacgacatctaccggctctaccacagctgtgctgaccccactggctgcggcaccggccccgacgccagggcctgggactaccaggcctgcaccgagatcaacctgaccttcgccagcaacaatgtgaccgatatgttccccgacctgcccttcactgacgagctccgccagcggtactgcctggacacctggggcgtgtggccccggcccgactggctgctgaccagcttctgggggggtgatctcagagccgccagcaacatcatcttctccaacgggaacctggacccctgggcagggggcgggattcggaggaacctgagtgcctcagtcatcgccgtcaccatccaggggggagcgcaccacctcgacctcagagcctcccacccagaagatcctgcttccgtggttgaggcgcggaagctggaggccaccatcatcggcgagtgggtaaaggcagccaggcgtgagcagcagccagctctgcgtggggggcccagactcagcctctgagcacaggactggaggggtctcaaggctcctcatggagtgggggcttcactcaagcagctggcggcaaagggaaggggctgaataaacgcctggaggcctggccaacaacaacaaaacacacacacccac

SEQ ID NO: 16132 - DNA, 1019 bp, Homo Sapiens
cggtccggaattcccgggatgtgacgggcgcccgcggaaggcgacatgggctccgctccctgggccccggtcctgctgctggcgctcgggctgcgcggcctccaggcgggggcccgcagggccccggaccccggcttccaggagcgcttcttccagcagcgtctggaccacttcaacttcgagcgcttcggcaacaagaccttccctcagcgcttcctggtgtcggacaggttctgggtccggggcgaggggcccatcttcttctacactgggaacgagggcgacgtgtgggccttcgccaacaactcgggcttcgtcgcggagctggcggccgagcggggggctctactggtcttcgcggagcaccgctactacgggaagtcgctgccgttcggtgcgcagtccacgcagcgcgggcacacggagctgctgacggtggagcaggccctggccgacttcgcagagctgctccgcgcgctacgacgcgacctcggggcccaggatgcccccgccatcgccttcggtggaagttatggggggatgctcagtgcctacctgaggatgaagtatccccacctggtggcgggggcgctggcggccagcgcgcccgttctagctgtggcaggcctcggcgactccaaccagttcttccgggacgtcacggcggactttgagggccagagtcccaaatgcacccagggtgtgcgggaagcgttccgacagatcaaggacttgttcctacagggagcctacgacaacggtccgatgggagttcggcacctgccagccgctgtcagacgagaaggacctgacccaggtcttcatgttcgcccggaatgccttcacgtgcctggccatgatggactacccctaccccactgaacttcctggggcccctccctgccacccccgtaagggtgggctgggatcggctgctgaatggaggccccagggatccggggctgccaaccctgggcagggctggcctaacaagcctcgggcttcaagaaatggtaaaa

SEQ ID NO: 16133 - DNA, 483 bp, Homo Sapiens
gggaccggagcaccccaggatcgaagagggcgcacgggcccggccctcccacgcgccctccaggacccggcagccagacagacggacaggcggaccgctagggagctcaagtacccggacacacgcacgagcgcagaacaaagggccggacatgctccagcccgctccgcctgcgcctcggccttgcgcgcgggggcccgggttacctgcgcagagccagctgtgatgtaaagaagtttgtgctgcatgagagagatagcacctgaagaaaatgaggccctggaggatgagagactctaaaggaaaagggaagggcctgctgtcttccagccacgccagcccccaactgagaagctgggtgaagccatcttgcatctttagccccagtcaagttacctcagcaaagactagctgaccctgccaagccctgcccaagttacagaatcatgagcaaataaatggctgtttctgttttaagctttt

SEQ ID NO: 16134 - DNA, 775 bp, Homo Sapiens
  misc_feature (607)..(607): n is a, c, g, or t
  misc_feature (627)..(627): n is a, c, g, or t
  misc_feature (651)..(651): n is a, c, g, or t
  misc_feature (670)..(670): n is a, c, g, or t
gccacgtagctcactcttttcttaggctgtgtagttcactttcccagtgcaaactttgggaaaagctctgtgccacaggctccattcctgtttgccacatcacaaataccaatcattgctctaaggagtggatgatttgatgagaatattcagttcttacaccactactagaggaggaacactgactgccttgtcgtggatgtggtctggcagtttctgtaggtaggggtggtggattgtctccaaatgtggccaccgacagtgcctcccattcctgtgtgtgcatgctgcttctcccactagaaggtgtcttttactttccttctctttgcatctggaacttgttttgaccagttggacctagcagaagtggggacctgtgacttccaggccttatgaaatcttgtagcattgtctttcccttttagagccagctgtgatgtaaagaagtttgtgctgcatgagagagatagcacctgaagaaaatgaggccctggaggatgagagactctaaaggaaaagggaagggcctgctgtcttccagccacgccagcccccaactgagaaatgggtgaagccatcttgcatctttagccccatcaagttnactcagcaaagaacaattgnacccgccaagccctgccccaattnacaaatcctggaccaatanaaaggccgtttctgttttaagcttttaaattttgggggtggtttatgtgtcaataataactgaaacagataatatatacagaataaactttagtttaaataatct

SEQ ID NO: 16135 - DNA, 770 bp, Homo Sapiens
agggcaaagttgctgagcttgaaggtggggtatctcccgaccgaacaggtgagaaaatcgttctgcatcacaaactgcaggagtttcgagatggatgcatcaaggactgaagtgggttcagtagagaattcaaggcaaagacgaagcgtaatctcattccaccgtgcgaagcagccagagcttggtgcagctggatctggactttaatctgggtttccttaagaaccccaagaggttcaatgtagctgtgacccgggccaaggccctgctcatcatcgtggggaacccccttctcctgggccatgaccctgactggaaagtattcctggagttctgtaaagaaaacggagggtataccgggtgtcccttccctgccaaactggacctgcaacagggacagaatttactgcaaggtctgagcaagctcagcccctctacctcagggccccacagccatgactacctcccccaggagcgggagggtgaagggggcctgtctctgcaagtggagccagagtggaggaatgagctctgaagacacagcacccagccttctcgcaccagccaagccttaactgcctgcctgaccctgaaccagaacccagctgaactgcccctccaagggacaggaaggctgggggagggagtttacaacccaagccattccacccccctcccctgctggggagaatgacacatcaagctgctaacaattgggggaaggggaaggaagaaaactctgaaaacaaaatcttgttctatgcaaaagc

SEQ ID NO: 16136 - DNA, 458 bp, Homo Sapiens
gctctcgggttaaaggcttggctggtgcgagaagagctgggtgctgtgtcttcagaagctcattcctccactctggctccactttgcagagacaggccccctttcaccctcccgctcctgggggaggtagtcatggctgtggggccctgaggtagaggggctgagcttgctcagaccttgcagtaaattctgtccctgttgcaggtccagtttggcagggaagggacacccggtataccctccgttttctttacagaactccaggaatctgtggggtacagaggagtgccagcagagactggaggctaagccacggtcctgtcccatctgagctgtacttgctcaacctctggatgtcatttaacttataaatacaatagtgatgctgtgaaaatggacacatctgaggattaactgaacgacaagcaagcgcttaaaaaagagccacctgccctagg

SEQ ID NO: 16137 - DNA, 881 bp, Homo Sapiens
  misc_feature (591)..(591): n is a, c, g, or t
tgctctagaggatctgatcacgtgcatgtgcaggctgatgaggatgtggatggagagcagagaggcagagaatgtttcctatggactcaaagccttcactgttaaaccccactggatctatactcgtctcatctccgttaaaaccaaatccactggatctgccacagcttcagcatcgagctgctgttatcccaccaatggtatcctgcaccccatgtaacataccaattggaaccccagtgagcggctatgctctctaccagcgacacattaaagcaatgcatgagtcagcactcctggaggagcagcggcagagacaagaacagatagatttggaatgtagaagttctacaagtccatgtggcacatccaagagtccaaacagagagtgggaagtccttcagcctgctccacatcaagtgataactaatctccctgaaggcgttcggcttccgacaactcgaccaaccaggccaccgccccctctcatcccgtcatccaaaaccacaatgggcaacgtgggatccgtgccattgtgaagaacagagaaaatgcatgtaaaattccttgcatataacaggcactttatanatggcagctagagttagaattttaactcaatgaacacagatacaaggagccttttaactgggagcaaagagaattaaactctaagtagagcacctaagtgcatgtctgtgtttgaacacatttcatcacatttataataaccctgagggattaggaaggggttcagttggagagagagcagcacttggtagaagaaacgtgtgtctgggggtcagacacacctggttcaaatcccagcagcactacttctagccttgtgccacaatgcacgtgatcgggatcctctagat

SEQ ID NO: 16138 - DNA, 679 bp, Homo Sapiens
aatgattccagtgcaacgtcagcggttgatgaggatgtggatggagagccagagaggcagagaatgtttcctatggactcaaggccttcactgttaaacccacgtggatctatactcgtctcatctccgttaaaacaaatccactggatctgccacagcttcagcatcgagctgctgttatcccaccaatggtatcctgcaccccatgtaacataccaattggaaccccagtgagcggctatgctctctaccagcgacacattaaagcaatgcatgagtcagcactcctggaggagcagcggcagagacaagaacagatagatttggaatgtagaagttctacaagtccatgtggcacatccaagagtccaaacagagagtgggaaggtaggtagatagagctatcaccaagagaacttttatgaagggaaataaagctaaacccaaaagcagtgtccattgtgctttgtaagttgtcagcctcccaactgattattatatttgtcctaacagacacagttccttaaattgaccttaaactatgaagaaatgttagtattattaactactaaaggatgccagtaacatttttaatagcattctagttaatgtgaattttctgatattcatctttgtgctggaagacattataaataaagttatgctttatgttccgttc

SEQ ID NO: 16139 - DNA, 477 bp, Homo Sapiens
  misc_feature (414)..(414): n is a, c, g, or t
ctggttgaggacaatgacatggatgccccggccctgctcccgggcctcatcctccagcacctacacagtggcagagacaaagtccagcttttcactctggcattcaaggtgtctctgtcttaggggtacttaaaacaccagctgcttgaaacatcacctcctgcctatgtttctgttcacacagttcttttccaaatcaagctcgaaggccacctcttccagaaagcctctatagcactcccatcagaagagatcacgtctttctacaaccctcccctccatgactttcatagctcttagagcctctgctgtctctgcttcatcctggaagtatcacaatcctccaccacactgaacccctcaaggtagggccaggtctgattactttcaggtccccagtgcccagcacaagcntgaggccaaagaaaggaccaggggatggttataaaataaatcaatgaattgactgcctaaaaa

SEQ ID NO: 16140 - DNA, 1021 bp, Homo Sapiens
tattatagatagatggataggatcaggaaactgaaaaaatccacagcaatgtccaggtcctcttccagtaaccacagcaaacttggcctccggaaacaggttgaaagtggcagtagaggctggccttgtagtgctgagacacgcgggcattcttgatgctgatgggagtatgctggatgcccctcagaccaaacagtgccaccacatccatgggttcctcatagtagccgtcaatgaaaactgttatcatctgaggagacaccccctgggctgaaagcagagagcgcagcatcctgtacaggtaattgggtcggttccctgcaatgacagtgcagatgagcactcggccgggcgctaccatgttgaggaatagcaccatggcctcatcctcatgaggtgagtacgtgtcaaacacacgttttgccatcacgtggcccgtggcctggttgaggacaatgacatggatgccccggccctgctcccgggcctcatcctccagcaccgtggtgccatccactgccacatatactttgctgcgacttgaatacacctctacgtccaggacccgccggggaccactgcctctgcgccgtgggggctccaggcggcctagggcctcatcatagtcttgctctggctctgggtcttcattggcttcactgatggctcgccgagtgtccaggatcaacttgatattgacaatgacagtcaccagcaggaaaagcacggcccctgtctgacagaatctccgcagggcccgctggtttgtcagtttatacttccaggtaaggtaccagctccgcttcttccgagccccaaagggcttgatgagggggctgggcttccagtcgtccataccggattggcgggtcaccaatgtcctggccagcccatgacttcaggaatggcttaggggccccgccccccgctcgggccccgctagggccctcacagctcggcccggctcgccgcggcctccgcctcctccatgccgctatcccgggaattccggaccggtacc

SEQ ID NO: 16141 - DNA, 770 bp, Homo Sapiens
gcggccgctacatcagcagctcctacaagcgagacctctatcagaagtggaaacagaaacagaaaattgatgatcgtgactcggacgaagaaggggcatctgaccggcgaggcccagagcgaagaggtgggaagcgagaccgtggccaagcaggtgcatcccggccccacgccccaggcacccctgcaggccgagtccgcccggaactcaagaccaagcagcagatcctgaagcagcggcgccgggcccagaagctgcacttcctgcagcgtggtggcctcaagcagctctctgcccgcaaccgccgccgcgtccaggagctgcagcagggcgccttcggccggggtgcccgctccaagaagggcaagatgcggaagaggatgtgaggaccaggacccagccccgtggctccttgattggccttagggtgggcatcagcagacgttcccgtgcaccactgtgtgcctggccctgtgctgggcactgggggcactccctgcaggagccatcatctgtgaaaaggagcactgtatggccacagaagggcagcagctgcgtcagcctaagacagagacatttgaacagggccttgaagggtgtgcaggagttcgccagcaaagccaggcaggccaagacttgagttggcaactcagctgctgctgcttccatgtgttctgggttcagaggtcatggctgcaccggtcagagccctgagtgcctcagggtttggcaatggaatttttaatgtaataaatctttattgagcactg

SEQ ID NO: 16142 - DNA, 311 bp, Homo Sapiens
tgcggccgctacatcagcagctcctacaagcgagacctctatcagaagtggaaacagaaacagaaaagtgatgatcgtgactcggacgaagaaggggcagcagctgcgtcaccctaagacagagacatttgaacagggccttgaagggtgtgcaggagttcgccagcaaagccaggcaggccaagacttgagttggcaactcagctgctgctgcttccatgtgttctgggttcagaggtcatggctgcaccggtcagagccctgagtgcctcagggtttggcaatggaatttttaatgtaatcctcgtgcc

SEQ ID NO: 16143 - DNA, 1241 bp, Homo Sapiens
cagagggtgttagggctgtgtcgtgatgatcactatcatggagtcatttcttgtagggaatagttagagggtaagatcagagataggtacttagttcaagaagactctctgaagctcccaaactgtagatatgtcctgtgtgcgaactggctggctttacagaagtcctgatggaagtgggtttattgttttttgactcgttaccaaccctctgcttactccttcccctcaaaaaaagggaagctgacttctcaggttagccagcagctcactcatacttttttctctctctattccattggctgatctgctgacttggggctctgaatctggatactctccatcaccggttggctgctgtcaccatttccttcctcgttgatggcactactagtggtcaagcagaggatgcagatgtacaactcaccataccaccgggtgacagactgtgtacgggcagtgtggcaaaatgaaggggccggggccttttaccgcagctacaccatcccagctgaccatgaacgttcctttccaagccattcacttcatgaccaatgaattcctgcaggagcactttacccccagagacggtacaacccaagctcccacgtcctctctggagcttgcgcaggagctgtagctgccgcagccacaaccccactggacgtttgcaaaacactgctcaacacccaggagtccttggctttgaactcacacattacaggacatatcacaggcatggctagtgccttcaggacggtatatcaagtaggtggggtgaccgcctatttccgaggggtgcaggccagagtaatttaccagatcccctccacagccatcgcatggtctgtgtatgagttcttcaaatacctaatcactaaaaggcaagaagagtggagggctggcaagtgaagtagcactgaacgaagccaggggttcagatgacactgctgcatcctggtcacattctctgtctcctggaatgctcccacctcaagtggagttagaaggaaggtagaggggctctcccccaggattttggtgttttgactaacaccagttcctgccaacctctgttgccaccacctttccttccaggccctaagcacgtgcagcaaagcacaccacagcacctttgataacctctctccatcctgggcctgatgacctgctctagactgttatagagggataagcagctcattcccctggttcctaataaaaagcctttaaattaaaaa

SEQ ID NO: 16144 - DNA, 680 bp, Homo Sapiens
cggaggcgttgaatggccgcagtggtggcggcgatggccgtggaggcggttgtggaggctgaagatgcagagaagtggcggcgggaaaaggcatcttggtagctgttctctgcaccgccggggcttgaaggaggttgaagtggtgctgctggagtaggcagagtcctgagagtagggggtgctgccccgagacgtgtagggggttccttgggaggactgaggtgtgaactggccaaaggaagatggggtatcttgtcggctgctggagaagcttgtgtcctgggagcagggggtgccgttgccaggagtgcccaccgcagtggtgcctgctgggtaggcagctgtgtcagaggaagagcggcggcgggattcggccgtctcagtggctgcacccgagccttggaacttctcactcagggccttgcccccagtgggcacagtctgaggggtgtaggagccattgacaattagttcatagtatttcattcgttgttgtcctttgatgtcaagctgggcatggatgatgttgcccatgacggaggtaaggtggaggttcttgaccgtttccttggcgccccgagtgctggtgaagagcacacgggccaggcccaggtgcttgcgcgtacgggggtgaaggagatctctacctcttccaccttgtccagctaccctcctgttac

SEQ ID NO: 16145 - DNA, 784 bp, Homo Sapiens
cctttctgagcagctgtgtttgaagaaagctagtgggaaaagttccaggattacatgtcaggaaactacaagaggtagaaacatttgttgatttaccagtgtttttaacttcctgctgggctgaaaactgcttgtttcgtggaaaagcaaaacttgacagcaaacatctaaaatgaagagctcccaaacttttgaggaacaaacggaatgcattgtgaacactctactcatggacttcttgagcccaacattgcaggttgccagccggaacctatgctgtgtagatgaagtagattcaggagagccttgttcttttgatgtggctatcattgctggtcgccttcggatgttgggtgaccagttcaacggagaattggaagcttctgccaaaaacgtcattgcagaaaccattaagggacagacaggagctatactccagaacactgtggaatctctcagcaagacctggtgtgctcaggattccagcttagcttatgagagagcttttctggcagtgtcagtgaaacttcttgagtacatggctcacattgctcctgaagtagtgggacaggtggctatccccatgacgggtatgatcaatgggaaccaagccatccgggagttcatccagggccagggaggttgggaaaatctggagagctgaagagttggagctattcacgagactgaacatcacttccttgttgactgattgggtgattgattcctgggaattcaaacaaacaaataaaaaagcacttttttcattttatcagaactgaaa

SEQ ID NO: 16146 - DNA, 701 bp, Homo Sapiens
tttcctagtcattcaagcaatacctttacaatttaaccagctggactatcacatacttaatatttttctttcaaatcatttttcattcattttgtttaacctaagcaataatacctgaagtcatgggtttgatggactacttatgtattttcaagtgcccattaagataacaaaatattaaaatgagaaaagattattcatctactctctaagatttccttagttaccaccagttgcacatttggcactctaagaaacaattgctttactggattcctgcacctgcagcctcctgcactttttgagtgatactctgttgatgtttcctttgtctttcctcagacaggagctatactccagaacactgtggaatctctcagcaagacctggtgtgctcaggattccagcttagcttatgagagagcttttctggcagtgtcagtgaaacttcttgagtacatggctcacattgctcctgaagtagtgggacaggtggctatccccatgacgggtatgatcaatgggaaccaagccatccgggagttcatccagggccagggaggttgggtaagtttgttggggctcctggttttgctaggtatttgcactgtttttgtactaatacctgggattccaattcatgaccctttttgtaaattggaaaccaacaggaaaacaggcttccctattttgctgaaaat

SEQ ID NO: 16147 - DNA, 639 bp, Homo Sapiens
ttctccgtggcatctgtcatctcacgaagatttcttcgcataatgatgctatccgtgctgaagaataccaggactcctgtgaatttctggttcttgaagaattacttgtcccccacatttaaggatctgcccaataacatgattcatcaggtgccaattaaatccctccctcaagaatggcattggtgtgaaacgtggtgtgatgacgcctctaagaaaagggcaaaaaccattgatttgtgtaataatccgatgaccaaagagccgaaactggaagcagctgtgcggattgtcccggagtggcaggactacgaccaagagatcaaacagctacagatccgctttcagaaggagaaagaaacgggagcactgtgccaaaaagaagcccaaaaaaacccaagccgaaaaggtcctcagaaacgtgaagaattatgatctctggagaaggacaggaaatcaccccatttgaaaaacagtttttataataaatgctagttttttctgatctgtctatacaactgctgataagccggctgggcaggagtgccacaccttttgattctgagcatttgattctgacttctgtactctggtggccactggatctttgggattaaagctctgttggatttgtacctc

SEQ ID NO: 16148 - DNA, 611 bp, Homo Sapiens
  misc_feature (124)..(124): n is a, c, g, or t
tactcttgcataatgatgctatccgtgctgaagaataccaagactcctgtgaaattctggcttcttgaacgaattacttgtcccccacatttaaggagcttcataccttacatggcaaatgaantacaatttcccagtactgagcttgttccagtacaaatggccccggcggcttcactcaacaaactgaaaaacagcgtatcatctggggttacaagatcctcttcctggatgtacttttcccactagttgttgacaagttcctgtttgtggatgctgatcagattgtacgaacagatctgaaagagttaagagatttcaatttggatggtgctccttatggttacactcctttctgtgacagccgaagagaaatggacggctacaggttctggaagtcagggtactgggccagtcatttagccgggcgaaagtatcatatcagtgcactatatgttgtggatctgaagaagtttaggaaaatagctgctggtgacagactcaggggacagtaccaaggtctgagtcaggaccctaacagcctttcaaatcttgatcaagatctgcccaataacatgattcatcaggtgccaattaaatccctccctcaa

SEQ ID NO: 16149 - DNA, 759 bp, Homo Sapiens
ccatcaacgggcgcttccagaagatcaagagcatggcggcctcccggcgagccaagctgaatgaatcccatcgcctgcaccagttcttccgggacatggatgacgaggagtcctggatcaaggagaagaagctgctggtgggctcagaggactacggccgggacctaactggcgtgcagaacctgaggaagaagcacaagcggctggaagcagaactggctgcgcatgagccggctattcagggtgtcctggacactggcaagaagctgtccgatgacaacaccatcgggaaagaggagatccagcagcggctggcgcagtttgtggagcactggaaagagctgaagcagctggcagctgcccggggtcagcggctggaagagtccttggaatatcagcagtttgtagccaatgtggaagaggaagaagcctggatcaatgagaaaatgaccctggtggccagcgaagattatggcgacactcttgccgccatccagggcttactgaagaaacatgaagcttttgagacagacttcaccgtccacaaggatcgcgtgaatgatgtctgcaccaatggacaagacctcattaagaagaacaatcaccatgaggagaacatctcttcaaagatgaagggcctgaacgggaaagtgtcagacctggagaaagctgcagcccagagaaaggcgaagctggatgagaactcggccttccttcagttcaactgagcgacgtgtatactcctgggcgtgaaacaga

SEQ ID NO: 16150 - DNA, 1239 bp, Homo Sapiens
tggaatatcagcagtttgtagccaatgtggaagaggaagaagcctggatcaatgagaaaatgaccctggtggccagcgaagattatggcgacactcttgccgccatccagggcttactgaagaaacatgaagcttttgagacagacttcaccgtccacaaggatcgcgtgaatgatgtctgcaccaatggacaagacctcattaagaagaacaatcaccatgaggagaacatctcttcaaagatgaagggcctgaacgggaaagtgtcagacctggagaaagctgcagcccagagaaaggcgaagctggatgagaactcggccttccttcagttcaactggaaggcggacgtggtggagtcctggatcggtgaaaaggagaacagcttgaagacagatgattatggccgagacctgtcttctgtgcagacgctcctcaccaaacaggaaacttttgacgctgggctgcaggccttccagcaggaaggcattgccaacatcactgccctcaaagatcagcttctcgccgccaaacacgttcagtccaaggccatcgaggcccggcacgcctccctcatgaagaggtggagccagcttctggccaactcagccgcccgcaagaagaagcttctggaggctcagagtcacttccgcaaggtggaggacctcttcctgaccttcgccaaaaaggcttctgccttcaacagctggtttgaaaatgcagaggaggacttaacagaccccgtgcgctgcaactccttggaagaaatcaaagctttgcgcgaggcccacgacgccttccgctcctccctcagctctgcccaggctgacttcaaccagctggccgagctggaccgccagatcaagagcttccgcgtagcctccaacccctacacctggtttaccatggaggccctggaggagacctggaggaacctacagaaaatcatcaaggagagggagctggagctgcagaaggaacagcggcggcaggaggagaacgacaaactgcgccaggagtttgcccagcacgccaacgccttccaccagtggatccaagagaccaggacatacctcctcgatgggtcctgtatggtggaagagtcggggaccctcgaatcccagcttgaagctaccaacgcaagcaccaggaaatccgagccatgagaagtcagctcaaaaagatcgaggacctgggccgccatggaggagccctcatcctggacacaagtacagatgc

SEQ ID NO: 16151 - DNA, 578 bp, Homo Sapiens
cgagtttaggggaaatgtatatgtctgtccatcctgttgctttagcctgtcagctcctagagggcagggaccgtgtcttccgaatggtctgtgcagcgcctagcacaccgtgggcgctcaataaatattaaattaattaacccatcattccctctccctcccttcctcctggactaccccttaccgactgcgggaagtatcggaggaggaagcagagtcagcagaagttgaacggtgggcccggcggctcttgggggctggtgttgtacttcgagaccgctttcgctttttgtccttagatttacgtttgctctttggagtgggagacctatgcttacgtttcttggactcagattctgacctgttggaaaaaagagaagaaaaaacataagaaacacctctgcctgaattcagcaaaccttctccagtcattcaagtattcccacctcatacctgtgcttcttcttctttgagcttttctttctctcccgtcgaggagagctgctctctgacctgctaaagatggattcaaaagcaagctcatcctgcctggcttctttcctgccctcccgcgtagt

SEQ ID NO: 16152 - DNA, 2348 bp, Homo Sapiens
aaagataaagacaagaaggagaaatctgcaactcgacctagcccctctccggaaaggagcagcacaggcccagaaccacctgctcccactccgctccttgctgagcgacatggcggctccccacaaccccttgcaaccacccccttaagccaggagccagtgaaccccccatctgaggcctctccaactcgggaccgttcaccacctaagtctcccgagaaacttccccagtcttcttcctcagagagcagcccaccatcccctcaacctaccaaagtttctcggcatgccagctcttccccagaaagtcctaaacctgctccagctccagggtcccaccgagagatttcttcttctcccacatctaagaatcgctcacatggccgagcaaaacgggataaatcacattctcataccccctcccgtaggatggggaggtcccgtagccctgccaccgctaagagagggcgatctcggtctcgaacccctaccaagagaggtcattctcgatcccgatctccccagtggcgtaggtccaggtctgcacagaggtggggaagatctagaagcccccagcgacgtggccgctctaggtctcctcagcgaccaggctggtctaggagcagaaatacccagagaagaggcaggtctaggtcagcaaggcgagggaggtcccactctagatccccagccactaggggtagatctcgttctagaacaccagcccgccggggcaggtcccgctctagaacacctgccaggcggagatcacgatccagaactcccaccaggcgtaggtctcggtctagaacaccagcccggaggggcaggtctcggtctagaacacctgctaggcgcagatctaggacccgatcaccagtacgacgcaggtctcgtagtagatcaccagccaggagaagtggcaggtcacgctctagaaccccagctagacgtggccgctcacgctccagaaccccagccagacgtggccgctcacgctctagaaccccagctagacgcagtggtcgctcacgctccagaacaccagccaggagagggaggtctcggtctaggacaccaagacgaggaagatcccgcagtagaagcttagttagacgtggaagatctcactctagaacacctcaaagaagaggcagatctggctcatcttcagagcggaaaaacaaatccagaacatctcaaagaagaagcaggtccaattcaagcccagaaatgaagaaatctcgcatttcttcaaggcggagcaggtctctctcttcaccacggtccaaagcaaaatctcgcttgtctttgaggcgcagcctttcagggtcttccccatgccctaagcaaaagtcacagacaccacccaggcgcagtcgctctggatcctcccaacctaaagctaaatctagaacgccacccagacgcagtcgctccagttcttctccgccacctaaacagaaatctaagacaccatcaagacaaagtcattccagttcatctcctcatcctaaagtgaaatctggaacaccaccgaggcaagggtccataacaagtccccaggccaatgagcaatctgtaacgccacagagacggagctgttttgaatcatcacctgaccctgagttgaaatctaggaccccttctagacatagctgctcagggtcctctcctcctagagtgaaatctagcacacctcccagacagagcccatctaggtcatcatctccacaacccaaagtgaaggcaataatatcaccaagacaaagaagccattctggctcctcttctccaagtcctagtagggtgacgtcgagaacaactccacggcgaagcagatcagtatctccctgctccaatgtggaatccagattgttgccaagatacagtcattctgggtcctcctcaccagataccaaagtgaaacctgaaacaccgccaagacaaagtcactcagggtctatttcaccataccccaaagtaaaggcccaaactccaccggggccaagtctttctggatcaaagtcaccatgtccccaagagaagtctaaagactcactagttcaaagttgccctggatccctctctctctgtgcaggagtaaaatctagcacaccaccaggcgagagctattttggtgtctcatctctgcaactgaaaggacaatctcaaacttcaccagaccacagatctgatacttcaagtccagaagtgagacagagtcattcagaatcaccatctctgcagagcaaatctcaaacatcacctaagggaggtcggtccaggtcttcatctccagtcactgagctggcatccagatctccaataagacaagatagaggtga

SEQ ID NO: 16153 - DNA, 652 bp, Homo Sapiens
tcataggagaccctggaagactttcattaaccaaacccatggctacccacgacaacctgcgcagctgcttgtggggagccgccatgtcgctcagcaaggagcggagtgggagcaggtggttctgggcctgtgctgctcctttccggagaggggctaggtcgagttgcagatttctccttcttgtctttatctttgtcttcataagggctgctaggctgtttcgtagcagtctccgggctactaggccgttgtgtgctggtagtacctggttcactgaaaggcgcatctccctccccgcgtcgccctgaagcaggggaaggacttcgcccagccaaggcagttgtatgagttttagctgcagcacttcgagacctgcaggagttaattgaggacgtgggagaggaaggaaatcagctcaaagggagaacagaaaaccccctccccaactcccatccacctttcctaactggacaaccctcttccaaaaagcctttagtcgcacaactcaaatcattcactgaaatgcaagtacagtccactttggttcttcttttcccaacacaatcccaaagagcgttctccctctacccctttactcacctcccccaaacatccccaaaccatccacccagcccactccctaccacaacca

SEQ ID NO: 16154 - DNA, 377 bp, Homo Sapiens
tgcacacgccgagacacccaacatatgtacgacacttacgtgtcatttaaaaataatgataaaattatatcaagattcaagcgcctcttgtagcgcttcccacagtcctcacatttggatggattttctccactgtggtctctttgttggtctgtacagtatgaccggcatacaagcctctttccacaatcctcacatttcaatggctttctttggcagtggagtttcttatgattcaaaatactagaagcatgtctaaagctcttcccgcagttatcacagttataagatctctctcccgtgtgggttcaatggtggaagtcaagacctgactaactaatgtagcccttcccaaaatcctcacatttgtatggctt

SEQ ID NO: 16155 - DNA, 1103 bp, Homo Sapiens
  misc_feature (970)..(970): n is a, c, g, or t
atttccgggatgtgaagagtgtgggaagggcttcaacagtaagtttaatcttgacatgcaccagagggtccacaccggagagagaccttataattgtaaagaatgtgggaagagctttagccgggcctcaagtattttgaatcataagagactccatggtgatgaaaagccattcaaatgtgaagagtgtgggaagagatttactgagaattcacagcttcattcccatcagagggttcacactggggaaaagccatacaaatgtgagaagtgtggaaagagcttcagatgggcctcaactcatctaacccatcagagactccacagtagagaaaaactacttcaatgtgaggactgtgggaagagcattgtgcacagttcatgccttaaagaccaacaaagagaccaaagtggagagaaaacatctaaatgtgaggactgtaggaagcgctacaagaggcgcttgaatcttgatacgcttttgtcattatttttaaatgacacataactgttgtactcatttatggggtacagtgtgatagttaatgcaagtatacaatgtgtaatgatcaaatcagtgtaattaacatacctatcacctcaaacatttatcatttatttatgttgggaacccttaaaattcactgtcctagctatttgaaaataatacgttgttaattactgtcaccctgtagtggtgtaaaacactagaacttattcctcctacctgcctgtatttctgtattcattaaccaacctttggctaccaccctgcctcctcaccctctagaactactattctactctctacttctatgaaggtaactttttgagcttcacatatgtgtgagaacatgtgggatgtatctttctgtgcctggcatatatcacttaatataatgccctgtaagtctcattcactttgctgggagtggaaagaattttggtggtttttcatggcgtaaatagnactctggagggggatatttgcgcccacttttcttttatccattcatcccaggggaacccttagggtggattacataaccttggggctaatttcttggggtaatcggggaagtggggcctggcaaataaaccgt

SEQ ID NO: 16156 - DNA, 1558 bp, Homo Sapiens
  misc_feature (1334)..(1374): n is a, c, g, or t
ttaagatcctatcgacttctgctctggaaggctgaagacggaagaagggagtgtcagaggcgcctgccagctgtgtcatctcccccagctccagtttcacctcatcacccaccacacataatggggagctggagccgtcattctcccccaacacggagtcccagattgggcctgaggaagccatggagaggctgcaggagacagagaagattatagctgagctgaacgagacatgggaggagaagctacgcaagacagaagccctgaggatggagagagaagcattgctggctgagatgggggtggccgtccgggaggatgggggaactgtgggcgtcttctctccaaagaagactccccacctggtgaacctgaacgaagaccctctgatgtctgagtgtctgctctaccacatcaaagatggcgtcaccagggtcggccaagtagatatggacatcaagctgaccggacagttcattcgggagcaacactgtctgttccggagcatcccccagccagatggagaagtggtggtcactctggagccttgtgaaggagctgagacatatgtgaatgggaagcttgtgacggagccgctggtgctgaagtcagggaataggattgtgatgggcaagaaccacgttttccgcttcaaccacccggagcaggcaaggctggaacgggaacgaggggtccccccaaccccaggaccgccctctgagccagtcgactggaactttgcccagaaggaactgctggagcagcaaggcatcgacataaagctggaaatggagaagaggctgcaggatctggacgaatcagtaccggaaacgaaccggacgaagccgatcttctgctggagcagcagcgactgtatgcagactcggacagcggggatgactctgacaagcgctcttgtgacacgagagctggcaggctcatctcctccttgcgggaccagctgccgcccaacacaggtccagaccatagtcaaacgctgtggtctgcccagcagtggcaagcgcagggcccctcgcagggtttatcagatcccccagcgacgcatgctgcagggcacagacaccgctgaggcaccatggctgacctgaagatgcaaggcgcggaacagagatctggtaagaggtgcgcctggatgcacttaccgccaggggcggcacgcacatgatgcccggccagacctcaagatgcggagcgcgtcagacactaggcaagcacacggcaccgacaaccgcaggaaggcctgtgacacggacatgcctggcacaacggcagcgcaagagagcaagcacgtagcaccagcacctgggagagannnnnnnnnnnnnnnnnnnnnnnnnnnnnnnnnnnnnnnnncagggctcacttgaagacacacggaacatgcgaagatcgaaacgaaccacgacacaccagagcatcgacacagccagcgtacgacaagcgagcaacatcagcaggaacgagaaaacacggcgaccacagccatgccaaagctgcgtcaagacacaagaaacacaacagagagaaatgcaacgga

SEQ ID NO: 16157 - DNA, 694 bp, Homo Sapiens
tcggtacctgctgcttctcctcctcggagcaggcaagggtggaacgggaacgaggggtccccccacccccaggaccgccctctgagccagtcgactggaactttgcccagaaggaactgctggagcagcaaggcatcgacataaagctggaaatggagaagaggctgcaggatctggagaatcagtaccggaaagaaaaggaagaagccgatcttctgctggagcagcagcgactgtatgcagactcggacagcggggatgactctgacaagcgctcttgtgaagagagctggaggctcatctcctccttgcgggagcagctgccgcccaccacggtccagaccattgtcaaacgctgtggtctgcccagcagtggcaagcgcagggcccctcgcagggtttatcagatcccccagcgacgcaggctgcagggcaaagacccccgctgggccaccatggctgacctgaagatgcaggcggtgaaggagatctgctacgaggtggccctggctgacttccgccacgggcgggctgagattgaggccctggccgccctcaagatgcgggagctgtgtcgcacctatggcaagccagacggccccggagacgcctggagggctgtggcccgggatgtctgggacactgtaggcgaggagaggaggtggagctgccgtgctgtgctagcgagcagcac

SEQ ID NO: 16158 - DNA, 207 bp, Homo Sapiens
tgatgtctcccgggtagaacagtgctcacctcatcctggctcatgacgggcgtaagggtgaaatttgcttcaagtacctggtgaggagctggtgcactactggaatgtcctttgtttccagttggtcgcagcccagactgtcttggagagtctctggcagtcggtcgagcttcatggtgcgctgcatggtcatatttctgctcaggt

SEQ ID NO: 16159 - DNA, 647 bp, Homo Sapiens
gtcggaaatgggttgggttcattagcgcatcccagcaaacatccatatctatgacacagagaagaagatggtagagatcaacttcctgtgtgtccagaagaagctgcgttccaagagggttgctccagttctgatccgagagatcaccaggcgggttcacctggagggcatcttccaagcagtttacactgccggggtggtactaccaaagcccgttggcacctgcaggtattggcatcggtccctaaacccacggaagttgattgaagtgaagttctcccacctgagcagaaatatgaccatgcagcgcaccatgaagctctaccgactgccagaggccagtgctgccccgggtggtgggcagggggcagagagagggcaaggagagcctggctgtcagcaggagagaagggctctgggtggagagggagctttctcctactggaaaagcgaaccagcccatagtcttcagatttcctggactttctatttctgttatctgaagcaggattttattttagtttaactttctcagttcctctgagtctgtgcctggactagcttctctgccatctgttgaaaggctcagagaacacctattctctgtaattttagcctaagtaaagcataaatagaatgatgaacaa

SEQ ID NO: 16160 - DNA, 635 bp, Homo Sapiens
atggggactccaccagccagtcccccccaattaagaggtcatgcccagatgtgcagatctcatggaaccaagggattgacttgtggtggcatgagctcatgcaagaggcaggggatgagtgtgagcccgagtggtgtgatgccgaggacccactcttcatcctgtacaccagtggctccacaggcaaacccaagggtgtggttcacacagttgggggctacatgctctatgtagccacaaccttcaagtatgtgtttgacttccatgcagaggatgtgttctggtgcacggcagacattggttggatcactggtcattcctacgtcacctatgggccactggccaatggtgccaccagtgttttgtttgaggggattcccacatatccggacgtgaaccgcctgtggagcattgtggacaaatacaaggtgaccaagttctacacagcacccacagccatccgtctgctcatgaagtttggagatgagcctgtcaccaagcatagccgggcatccttgcaggtgttaggcacagtgggtgaacccatcaatcctgaggcctggctatggtaccaccgggtggtaggtgcaccagcgctgccccatcgtggacactttgcatccagacggggaacc

SEQ ID NO: 16161 - DNA, 561 bp, Homo Sapiens
tgggcatagctgttctagagtaccctggtatgcacaatggatgccccaacgagataggagtctcccttacaatctgttgtgctatgtctcaaggtacaagggcctctctacccacagtacaaggtcaaagtcttccagttcccacctagccctgctagaggaggcattcctagaattgctcctggatcctcagtatactgatgagcaggcaaagaaggacatcaagaattttctaggcaggaaaagtgaaggaatttgagcctggagaaaggcatagcagtgccagactcacctgcacatctgggcatgacctcttaattgggggggactggctggtggagtcacccatgccgagctctgcccgccccaggtgcttgaccacaatgcagcatcttactgggaaacccctggagaagagaaaagcctaaagtggtagccttgttggctcaaagggaacttggcaagacccacccatgtccatttagggtagaggggacaaagggaacctggcactggggaaaggctcagtcaactcagacagtcctagtgctgtgtgaggtc

SEQ ID NO: 16162 - DNA, 375 bp, Homo Sapiens
cactgtgtacccacgtcgtgtggaggcgataggtgctcagagggtgacacagcgggagcaggcaaaccaggaccactgctgtgacagacggctcttgttggtctcaaaccaaggccccgaccacttgctttagatctactcgatagagtggttcagcttgaactccacgccaggagcccaccccaactactgaaactagctgaggtccaagtcggtgcagcaggcccaggtgccgggagaggccatcctgctcgccaaccacatctaccgcctgcacgcctatctccagcgcttcgcctagtcctcccaccacaaacgtgggatccgtgcacgttaacgattactaggactatgcagaatcctgggggtgtgggg

SEQ ID NO: 16163 - DNA, 625 bp, Homo Sapiens
agggacccagtacttaatttctgaaggttctccggaggctcagaattcagcaaacagggctgccacaaatgcaaggagggcaagatgatctgcatctgcaactactgccaatgttcggtgagtcacaggtgtcacgtgctatagttgttgaacagttaatacttacaccttcttctagcctgagtaaaatcctgcttgtgatgggagctaggcaagttattgtggtttctgccgaactcccttctaaagcaaaagcacaagtggtggggctgtagccttctaggttgctgactttggaaccagtccaagatctagttctgctggcagaagctaagattcaagaggcagagctaattgtagaagcagtggtaagcgttcaccagctgctataaatatcagaggttcggagcggtctgctggtgatgcagctgcgacagctgcagctggtcgaggtccctaagacagagaagtagagaatgcttctcgcagagaagtctagtcacgaggttccagagttgttgcaggacactatgatcatttaggaggacatggtgctgcagggcggtatgctccgggctataaaaggttaggtagtggacaggctcccagtgctgacctgcgtggt

SEQ ID NO: 16164 - DNA, 699 bp, Homo Sapiens
ggggagacggggtcagcgcgcatatctggctcttaagagttgtttgtgagggctccccggctcagccggctggtttcagggaacattcaggcgcttaaggcctggttgtttgattagctcctcggaacagtgacagagggtatgcgccctagttgattccagttggtggagcagacagaatagagaagtaatcctccgaaggtttctgcatagtcctagtaatcgttaacgtgcacggatcccacgtttgtggtgggaggacgctgctttgggaaaggaaaagatagaaacaccacccctgttgttgcctcatttgctgaatctgtttagttcggatgttaagaggcctctttgcctaagatagatgcaaatgcactgcgctttgttgtgcgcctggcactccactcattcctgatatagctgtgttaggcttgagatcgtgcagaacccttcccagattacttccccatcctgcctgctccaccaactggaatcaactaggctgcataccctctgtcactgttccgagcagctatcataccaccatgcctttaagcacttcattgtccttgaccacgcaggtcagcactgggagcctgtccactacctaaccttttatagcccggagcataccgccctgcagcaccatgtcctcccaccacaaacgtggatccgtgcacgttaacgattatctagaca

SEQ ID NO: 16165 - DNA, 573 bp, Homo Sapiens
  misc_feature (23)..(23): n is a, c, g, or t
aagtttgtggtggaggacccagnaaagtggtacaggtggtgcaaagtaatcaaatattttgcatttgtgtgctgtgggtttgactattgtgctttttctcctaccacaaagggcagctgacacagttaaagctggcaccccataggttttggtcactgcatgtttagtcctgcagtcatcactccaggcacaattgttcctacacatgttggggcttgggttgttggttttcccacaacaggacaccaggcacatagttaggctaacaatgttcatcctccacagagggccccaatcctaccacccagtaccagaaagcccttccctacagcactctccactggccctgcacttgacaacacaaagagtcacagccaccgtcctcccaccacaaacgtgggatccgtgcacgttaacgattactaggactatgcaaaaacctgtggtcgtccttagtctcctggatgagcgcccgcgcgcgcttcgtctgcggcgccggcgcttctcccgccactcctttctactcccgtccctcacgcctccgctcgctcctcggggcgctcttgctgctgt

SEQ ID NO: 16166 - DNA, 606 bp, Homo Sapiens
gttaattattatcactctaggcatggccaggagtagaggggttaatactttatttaattgtcctcccttgtttttgcagaataaattcaccagtaccccttcttgctccggggccccggactcattcaactccctccatcccggtgctgacagcaggccagagtgggctatacagcccccagtacatctcttacatacctcagatccacatgggaccagctgtgcaggcacctcagatgtatccatatcctgtatccaattcagtgcctgggcagcagggcaagtaccggggagcaaaaggctcccttcctccgcagcgctcggaccaacacctagccagcctcagccccgccgagagatgcaggccagccgcggctgctggcccgcctctggtggctgccacgccctattcttcctacatcccctacaaccctcagcagttcccaggccagccagccatgatgcagcccatggcccactacccctcacagccggtgtttgcccccatgcttcagagcaacccacgcatgctgacgtcgggcagccatccccaggccatcgtgtcatcctctacccctcagtacccttctgcagagcagcctacat

SEQ ID NO: 16167 - DNA, 561 bp, Homo Sapiens
ctgttgtcttcagagccctatggggtctcccgtctcctccaagacagagtccgtttcggataaggaggactaatctacccctgagcaccatcagcgaggcactgatgtgggccacgatgtcagcccccaccaccttgtccaagccaaactggcagccccccggtgggcctcatcaagggagaagacaaagatgagggccctgttgctgaacaagtaaagaaatcaacgttgaaccctaatgctaaggagttcaatcctacaaagcctctgctgtctgtgaataaatccaccagtaccccaacttctccggggccccggactcattcaactccctccatcccggtgctgacagcaggccagagtgggctatacagcccccagtacatctcctacatacctcagatccacatgggaccagctgtgcaggcacctcagatgtatccatatcctgtatccaattcagtgcctgggcagcagggcaagtaccggggagcaaaaggctcccttcctccgcagcgctcggaccaacaccagccagcctcagccccgccgatgatgcag

SEQ ID NO: 16168 - DNA, 538 bp, Homo Sapiens
ggcgggaaagatccgccgggccgccgacacggccggacccgccgccgggttgaatcctccgggcggactgcgcggaccccacccgtttacctcttaacggtttcacgccctcttgaactctctcttcaaagttcttttcaactttcccttacggtacttgttgactatcggtctcgtgccggtatttagccttagatggagtttaccacccgctttgggctgcattcccaagcaacccgactccgggaagacccgggcccggcgcgccgggggccgctaccggcctcacaccgtccacgggctgggcctcgatcagaaggacttgggccccccacgagcggcgccggggagcgggtcttccgtacgccacatgtcccgcgccccgccgcggggcggggattcggcgctgggctcttccctgttcactcgccgttactgagggaatcctggttagtttcttctcctccgctgactaatatgcttaaattcagcgggtcgccacgcggacgcgtgggcggacgcgtgggcggacgcgtgg

SEQ ID NO: 16169 - DNA, 1531 bp, Homo Sapiens
  misc_feature (124)..(144): n is a, c, g, or t
  misc_feature (997)..(1028): n is a, c, g, or t
ccattaactaatacatgccctcatagatatattcaattagtgttatcaccatgggaacaagatgctgattcgtcaactgaaaattcacttcttctcacagtattcaagtttttgataacacagnnnnnnnnnnnnnnnnnnnnnggtgaataaccattatgttgttacacagacatcatctgcactgcaaataacacaacagaaatgcttttcttgagctccagtgaaggttttgacaagaaggccatagggtgtctcaaaaagtttcaccatcggcctctcttattttggctgccaaagaatgtctcatttcctatccaactgccaaaaagtgctagcatttgaggcttaggagatttggcttgtgggaaacctccctcccaggaaattttttctcttggcaacattactttaaatgatgaagtgccattgtttgtcgcatttgtttttgacattcggagcaatgagtcatttttgcacaacaggaaaagaccagataattggaaaatgttcaatccctggaggatagactctgtccttttttatttaaatttcatcttcattgaatatacttttctttaacaaatgactgattcaaaatgtatactgtttatatgaatatatttgtgaatatatatatgttaaaatgctacacagcttcaaccactagaggaataaggaagaggacatggaaattactcagattgttacagtcccttctttgagacaaacaaacagaagtgcacaaatgcacttaagagtttccaagggagtgtggatttcaaataaataaaccaaaaattttaaccaaaaccaaattttcaaggatttctcaatcttgtctgcaagctgaaaaacagacctagctggaaagtgaaaagtgctcactcagggtaaaaagaatggaaacaattaatgtgattagaagaggggtttgaccgtggtcttgatttttaaacgccacatgcaggtattagagaagatataaacctgaagnnnnnnnnnnnnnnnnnnnnnnnnnnnnnnnnccactccaacatactgaaggagtttaaccttttatgtagtgggtaaatcttgtttccaatgaatgatctacagtgcagtggccagaagaaagtaccactgtaagacagcgtggtttgctaaagcagcaatgaaaactggaaaactacagtagttatagcttttaaaataccctgccaacttgtccaagatctaaagacctgaagatgctagaatgccacacaatgtagctgccagcaactgaacaccccactcggttcattctgcgtggcctctgctcccttctcccctccctcagagtggctgttggagtcctaagccatggctggccagcaccagcaataacttctcaggacagttctgcaaggctactgacccacctttaactgggagcagtggctactctggaagttctaaggacataataggtttgaagtgcttcttttgcagtaaaactgtattatcactcgattgtgttagcacccacgcgtccgcggacgcgtgg

SEQ ID NO: 16170 - DNA, 1070 bp, Homo Sapiens
  misc_feature (883)..(914): n is a, c, g, or t
ccgagcatttccactgttagcaaatatacggcattttgctttagttttcccccatcctctttaactataaagctaatttgtgaccaaagatggcatccttcatactggatgctgtatccaatactttgttgtgtctgtgctaacctgggaactggccacctccattgttctttgcttctgcacaagatccatgaaaatccattgatcagaagaacttcacctgcagacctcttcaagtgacactatgtaggaatccttccaaggaatatctatgtacaatgtatatagctgaaatgctcagatgaacaacatattaaaattaaaaccactgcctattgtaactacactgggcatcagaataaaaggcctctagaaattgctgaacaatggttaattaagatattgctaacacaatcgagtgataatacagttttactgcaaaagaagcacttcaaacctattatgtccttagaacttccagagtagccactgctcccagttaaaggtgggtcagtagccttgcagaactgtcctgagaagttattgctggtgctggccagccatggcttaggactccaacagccactctgagggaggggagaagggagcagaggccacgcagaatgaaccgatggggtattcagttgctggcagctacattgtgtggcattctagcatcttcaggtctttagatcttggacaagttggcagggtattttaaaagctataactactgtagttttccagttttcattgctgctttagcaaaccacgctgtcttacagtggtactttcttctggccactgcactgtagataattcattggaaacaagatttacccactacataaaaggttaaactccttcagtatgttggagtggnnnnnnnnnnnnnnnnnnnnnnnnnnnnnnnncttcaggtttatatcttctctaatacctgcatgtggcgtttaaaaatcaagaccacggtcaaacccctcttctaatcacattaatgtgttctccattctttttaccctgagtgagcaacttttcactttccagctaggtctgtttcagcttgcaga

SEQ ID NO: 16171 - DNA, 242 bp, Homo Sapiens
cagcctgggtgacagagcaagactctgtctcataaataaatacaaagcccattcttccagagtcttgtgccttaaataaaacacacctctctgctgtgggaagactgtgcaatcgcacagccgcagagcttggtttgggaggttgaagtgctctggggagaattcgtagatcatcctcagaaaagccttgccctggtgttctaccagaaaaacgtctcccaatcacccaggaaagctgtcca

SEQ ID NO: 16172 - DNA, 1369 bp, Homo Sapiens
  misc_feature (622)..(645): n is a, c, g, or t
  misc_feature (781)..(1066): n is a, c, g, or t
  misc_feature (1270)..(1292): n is a, c, g, or t
ggcaggctcagaagacgatgcggggctgtgtgccggccttcttgctgcatgtactcagcctcaggagagcttgctgcacccaggccgcccaggtcttcacagcacaactgcctggaagcaggttgcgagaaggagaggcggatggcatgagcagcaagggggaccgatgctgtgcagctcacaccactccagaacctgacaaggcaccagcaggaccccttgccaggagcatgtctgtgcagcagtgtttttgcccctgcacattccagaagccctcatgggaagggatgcagccaggcagactcctgccagatggggcaggtagtttattcaaagagaactctgtatcccataggcccaggctctcctttcgcttggcgtgggctttgctggcccagtgtgtgctcctggctcagcagaaacatccatttgagttggcatccctgtagggatcccagagcgttgtaagccttcttgtgattggtagggatggctgtggggtggcttccaggagggggccaccattgccgcatctacttctagactcccaaaggagcccaggctcaggcaggcctggcccagagtcacgctggcaaccacgagttcgggaagcagtcgtatnnnnnnnnnnnnnnnnnnnnnnnnagtatccatgacaggtatgaaacatattgtctctttataaatgtcattttacaaattatgtgattatctggaagctctaagatgagagcaaatgcctgatcactctggccaaatgtcagatactaaagcccattcnnnnnnnnnnnnnnnnnnnnnnnnnnnnnnnnnnnnnnnnnnnnnnnnnnnnnnnnnnnnnnnnnnnnnnnnnnnnnnnnnnnnnnnnnnnnnnnnnnnnnnnnnnnnnnnnnnnnnnnnnnnnnnnnnnnnnnnnnnnnnnnnnnnnnnnnnnnnnnnnnnnnnnnnnnnnnnnnnnnnnnnnnnnnnnnnnnnnnnnnnnnnnnnnnnnnnnnnnnnnnnnnnnnnnnnnnnnnnnnnnnnnnnnnnnnnnnnnnnnnnnnnnnnnnnnnnnnnnnnnnnnnnnatacaaagcccattcttccagagtcttgtgccttaaataaaacacacctctctgctgtgggaagactgtgcaatggcacagccgcagagcttggtttgggaggttgaagtgctctggggagaattcgtagatcatcctcagaaaagccttgccctggtgttctaccagaaaaacgtctcccaatcacccaggaaagctgtccannnnnnnnnnnnnnnnnnnnnnntgtcactttccatgggttcagttatctgcggtcaaccacggtctgacaatattaaatggaaaattcttcaaacagtt

SEQ ID NO: 16173 - DNA, 661 bp, Homo Sapiens
gcttggcaccatagcagtaaggccacatccccaaaccttaccatttcggcagcggctgaaaggtctaggctttgtagcttgcctgccagttcatcaaggaggcgagcctgctcctcttgtttttccttgaactgggattctcgctccatcatcacgtcttctactctgtctctcatgagggctgactgctccacagtgctgtcgggttctgtggtggaggcattcaccctctcctctgcctcaagagacatctggaaatacttggtaatgctatccaaggcaccccgaatatctgagtttttgataaattccagttgttcagccaagttctttcacagtggttgtctaggctttcggcttctgtctgtagagaatccagttctttggctgtgctgttgctttgggaagttgtgtcagataatttcacttctacttgagccatcatttctgtaacatctttaatcagtttctctgcttcctcaaagagattccctatgtttttcagtggctctgctgcggggctctgcgccaggatgtcttttatctcgctgactttcctctccaccgagtccacagtctcacggtaaggcccgatcacaccactgatcttcaggccttgctttctccaggaatctgtgtgtcctgttggcagcaccaccca

SEQ ID NO: 16174 - DNA, 519 bp, Homo Sapiens
gagagacagagtagaagacgtgatgatggagcgagaatcccagttcaaggaaaaacaagaggagcaggctcgcctccttgatgaactggcaggcaagctacaaagcctagacctttcagccgctgccgaaatgacctgtggaacacccccaggggcctcctgttccgagactgaatgtggcgggccaaactgcagaactgacgaaggagagaggaagtgtggggggcctggctgtggtggtctggttactgttgcacacaacgcctggcagaaagccatggacttggaccaagatgtcctgagtgccctggctgaagtggaacagctctccaagatggtctctgaagcaaaactgagggcagatgaggcaaaacaaagtgcctgaaagacattctgttgaagacaaatgctaccaaagaaaaaatggacaagagcaatgaggagctgagaaatctaatcaagcaacatcagaaacttttttgacccaggatgtaggaactggtctctggcccagagagg

SEQ ID NO: 16175 - DNA, 706 bp, Homo Sapiens
tagttctgtgtttggccggatctggtccatggtgaggggactacggttaaagggatctgtttggtcactgagcaaatgtcttgcaatggtggatctatccacagtgactctggaagatggcagcaccacagggtcacacatcagtgtgctcataatgggatccaggaactcatcacaggcatctgcataggtttcctcttcctgttgttggaggtctgcaagagacttgattctctctgccaagttgctgaaagccataatcatattcccaggcttatttattttcttcaagactcgaactgtctgtgcaaagagagttggggaataggaacgtccatccttgggcacagaggcacagaaattctcctcatccccaagatttaagtagatagtgcagatatctgatacaagctgctggggtttgaagtcaaattcgctgaagtccttgacttttaaggcacccatcttggggccaaccaggtgttgcaagaagtagttcaacatggagatgatgcgctcagccaggaaaggatgcacaaagagtgacttgatctctgatgtgagaaaagcaagggtaccgattgtttcattggacatgatgttatggaaacgtgccagctgtccaaacatctgtaggccagcctccttttctcggcgggcttctggggtcagactatcccattcacctcgacctttcagttcgcta

SEQ ID NO: 16176 - DNA, 695 bp, Homo Sapiens
tccggttatgtgcaagagagtggcgaataggaacgtcatcctgggcacagtggcacagaaattctcctcatccccaagatttaagtagatagtgcagatatctgatacaagctgctggggtttgaagtcaaattcgctgaagtccttgacttttaaggcacccatcttggggccaaccagagtgttgcaggaagtagttcaacatggagatgatgcgctcagccaggaagggatgcacaaagagtgacttgatctctgatgtgagaaaggcaaaggtaccgacttgtttcattggacatgatgtcatggaaacgtgccagctgtccaaacatctgtaggccagcctccttttctcggcgggcttctggagtcagactatcccattcacctcgatccttctcaaatttgctgaatctttatcttgctcaaatactgtatggcttcatccaaaaggaagatggcatcattcattagcaggttaagaaagcggaggaaaagtgggggattcatggcttctaaattcttagaggcatagtcagccaaatccttaatgctctcccgataggtatctgtcccccacatgtatcttagatagaatacatgggacgcggtaattaacttctgttcaaattgatgggtctcctgtaattcgatgtccaagaaccttgattagacctaacaagttgggtcatacc

SEQ ID NO: 16177 - DNA, 708 bp, Homo Sapiens
agggattgaatccggatggaactccagccctttcaaccctgggtggattttctccagcctccaagccatcatcaccaagagaagtaaaagctgaagagaaatcaccaatctccattaatgtgaagacagtcaaaaaagaacctgaggatagacaacaggcttccaaaagcccttacaatggtgtaagaaaagacagcaagagaagtagaaatagcagaagtgcaagtcgatcgaggtcaagaacacgatcacgttctagatcacatactccaagaagacactataataataggcggagtcgatctggaacatacagctcgagatcaagaagcaggtcccgcagtcacagtgaaagccctcgaagacatcataatcatggttctcctcaccttaaggccaagcataccagagatgatttaaaaagactgtggctctgtaactcttcaaaggcccagtttcccctcacgcagcctcttaggtagcgtttcccctaatcgtgggggttggaccccagagtctgtccaaagaattttcacatggttgcctgcatctttggctctgctgtgatctgattggaggagggacagtttctggtacccatcctctgatttatacatatgcattttttcccctctggcctttagatggcgctcacccccaggcagcatgtgctattaaacttctagaactagggggatcctctatgat

SEQ ID NO: 16178 - DNA, 831 bp, Homo Sapiens
gcacagccaggaatgcatgacacagtcatgcagtcagagaccttgaaggacactgcaccggtgctggagggcttgaaggaggaagagatcacgaaggaagaaatcgacatcctcagcgatgcctgctctaagctgcaggagcagaagaagtcactcaccaaggagaaggaggagctggagctgctgaaggaggatgtgcaggactacagcgaggacttgcaggagatcaagaaggaactttcaaagactggtgaagaaaaatacgtggaagaatctaaagccagcaagagattgacaaaaagggtgcagcaaatgatcgggcagatcgatggcttgatctcgcagctggagatggaccagcaggctgggcaagctggccccggccaacggcaagcccacgggggagaacgtcatcagtgtcgctgagctcatcaacgccatgaagcaagtcaagcacattcccgaaagcaagctcaccagcctggccgcagcactggatgaaaacaaggatggcaaggtcaacatcgacgacctcgtcaaggtgattgagctggtggacaaagaagatgttcacatctccaccagccaggtggctgagattgtagccacactggaaaaagaggagaaggtggaggagaaggagaaggccaaagagaaggcagagaaggaggtcgcagaggtgaagagctagaaccactggcctgggcacctgtcctcctgctgtgccgtcaccctggcacagggccgtgagggcgattgctttgtggtgattctcagtggctcatctaatattttggctggaataaatcagagactttccgtatggatgcc

SEQ ID NO: 16179 - DNA, 541 bp, Homo Sapiens
tgcgtcgacttctgctctgaccttctgctctttttccagtgtagctacaatctcagccacctggctggtggagatgtgaacatcttctttgtccaccagctcaatcaccttgacgaggtcgtcgatgttgaccttgccatcctatgttttcatccagtgctgcccgtaattatggtgtatctaagaaagtaaccaagaagccagtatttttcactgtaatagttgcagtggtgggattacttgccagtattagaaaatggagaatgggaaatggaaaatctcattggattactcctccttacattactgcgtttggatttgtagtcttaacaaggcaataaatggaaggggaaagaaggaatcaattcatggtaactagaatgtaatgagcacttgcattaagtcacaatttaatttgtatactttcggaaattctttcctggttgtaagcctaaaggggcctgcctagaggaggtgaggaagataagcagctgtgggagagggcgtgtggctagtgggccgggggttgaagaaagcagaa

SEQ ID NO: 16180 - DNA, 717 bp, Homo Sapiens
catggttggaagccagtggaaaaggtggaagagcagtgccatccattgaatgggttgaacttttcacaggtcatctttgctttgaaccagaccctcctgcagcaggaaagcctgcgagcaggcagtcttcagatcccctacacgacggaggatctcatcaaacacgtataactgcgggggaccgccatgctaacaacagcaaaagccatgacagatcccaggttaccaatgttagtaatgccacgctaccacctcaggagcgcatcactgctcaggagattgacagctacctacgccgggagctgatctacaagcggaatgagagtaatagggaagcgggtgaaggcccttgtggaggagttccctgacaaaggcttcttctatcgcctctggagatggtcatttcatgggcaacaacacagtgctggatgttttgcggcgtgaaggctatgaggtagaacacgccctgctggacgacccatccacaaagggaagagtaaaaagacctccacttttgctccaaaagtccctaccctggaagtaccggcaccagaagccgtatcctcagggcactcaacgctgcctccccttgtgtcccggtctggaagtgccgacacgcccagtgaggccgaacagaggttccggaagaagcggaggcggtcacagcggaggccgcgactccggcaattcagcgatctgtgggtccgcctggaggag

SEQ ID NO: 16181 - DNA, 1391 bp, Homo Sapiens
ccgcgttccgggcctcggagccgccttgaggaggatgagtccctggagctggttcctgcgtgcagaccctctgcctcctgcccacgggcgcagcttcgcggcgcggggcgcccggcaccgccaactgcgagctcaagccccaacaaagcgagctgaattccttcttgtggaccattaagcgagacccaccatcttacttcttgggcacaatccatgtcccgtacacccgagtttgggacttcatccccgacaactctaaggaggctttcctgcagagcagcattgtgtactttgagttggatctcacagacccctataccatctcagctctcaccagctgtcagatgctgccacagggcgagaacctccaagatgtgctccccagggacatctactgccgcctcaagcgccacctggagtatgtcaagctcatgatgcccttgtggatgaccccagaccagcgcggcaaggggctctacgcagactacctcttcaatgctattgccggaaactgggagcgcaagaggcctgtctgggtgatgctcatggtcaactccctgactgaagtggacattaagtcccgtggagtgcctgtcttagacctgttccttgcacaggaggctgagcggctgaggaaacagactggggcagtggaaaacggtggaagagcagtgccatccattgaatgggttgaacttttcacaggtcatctttgctttgaaccagaccctcctgcagcaggaaagcctgcgagcaggcagtcttcagatcccctacacgacggaggatctcatcaaacactataactgcggggacctcagctccgtcatcctcagccatgacagctcccaggttcccaattttattaatgccacgctaccacctcaggagcgcatcactgctcaggagattgacagctacttacgccgggagctgatctacaagcggaatgagagaatagggaagcgggtgaaggcccttttggaggagttccctgacaaaggcttcttctttgcctttggagctgcttcacagtagccttgaaaatcaggagccttgaactacagtagctgtgaaaactgtttgcctaatggttactggaggggacagaatgggttcaaagttcctccaaagctccatccttaaagaatcatcactatttgacatgtccaatagttccctgaaatttccattcccaagcttgtcttcatttgacctgactcagagcttgctctgtgtgaatagccctattcttagggtgtgtgtcgaaaacaatcagtagcagctgtttaacatcatagttgctggaaatagcaatattaattgaagcttacaagggggtggccaaaaaacttaaaagcaattacatgaaacaaacagacttttatagc

SEQ ID NO: 16182 - DNA, 882 bp, Homo Sapiens
tgaaggtatgggtcatgaacagaaccaaggagctgcgctgctacagatgttaccacttctgtggctgctaccccactcctgggccgtccctgaagctcctactccaatgtggccagatgacctgcaaaaccacacattcctgcacacagtgtactgccaggatgggagtcccagtgtgggactctctgaggcctacgacgaggaccagcttttcttcttcgacttttcccagaacactcgggtgcctcgcctgcccgaatttgctgactgggctcaggaacagggagatgctcctgccattttatttgacaaagagttctgcgagtggatgatccagcaaatagggccaaaacttgatgggaaaatcccggtgtccagaggtcaggagttttctggggagtgaagggaggagggctgcattaacctcattgatctgtacactgaaataattccccttgataccagctccccatctcaaatactttctggttctcttcatcaccttaatttttccaccagccttggtctgcaccctgtgttcttttggtgggccgaagtacctagcatgtagtaggcattcagaactatgtacttgacatgtgatgaattcaacaggtaccaactgatacctactgaatattaacacttgtgctactatgcccagcaacatggactgggaagagtggaacatatctgattgacgtgactatgtcttagtgagaagaccgtgcatggttagacatcaatgtgagctctagacaggaagttgctgaaggaagtcactggtggaggggttccagagtagcctggaatctggcctctgctttctaacgtcttagctgcaggtccttgcctggaaacaaagacccccccttcagagcc

SEQ ID NO: 16183 - DNA, 449 bp, Homo Sapiens
gcattaagggctttctgcttctgctccaggacatttaggtagaaggtggctcggtcccttacttcattgtcatcatccatcacacacctcttccgcaacaccaagatactgggtaacatctcttcattctgggctccaaacttcgccagagcactcacagcacctgcccggacctcctcaagctccaagaccactcggttatagatgaagcggatgtactttgagggattggtggtcttgggcccctcctggcccaggagatgtagaatacaggtggccagcactgtgaactcgcagtcctcgatgaactcgcacagatgtgacagccctgtctccttgctctctgagttctcttctgatgatgcagtccacgatagcgcgcttatactcaaagccaccctcttcccgcagtcgacgcggccgcgaatttagtagtagtaggcgaccgc

SEQ ID NO: 16184 - DNA, 839 bp, Homo Sapiens
agaccagggatggacacagtcagaccatttaggatatagcctgcattaagggccttctgcttctgctccaggacatttaggtagaaggtggctcggtcccttacttcattgtcatcatccatcacacacctcttcagcaacaccaagatactgggtaacatctcttcattctgggctccaaacttcgccagagcactcacagcacctgcccggacctcctcatgctccaagaccactcggttatagatgaagcggatgtactttgagggattggtggtcttgggcccctcctggcccaggagatgtagaatacgggtggccagcactgtgaactcgcagtcctcgatgaactcgcacagatgtgacagccctgtctccttgctctctgagttctcttcaatgatgctgatgatgcagtccacgatagcgcgcttatactcaaagccaccctcttcccgcagcatggtgaacaggaagttcataaggacggcgtgtttgcgaggatatttctgacacagggcactgatggcctggacaaccaccaccttgaattcatccgagatttctgacatggaggaggagatctgcttcatgaggcggtcgatgctgctctcgctgcccgtcttaaggagggtggtgatggccagcgtggcaatgctgcggtttgaatctgtgaccaggttctccagatcccagattacaagctgtcacacgctgacggatgcttcatggcaaccttattgagggtacgaacagccagcatagcggagagcagtcttgggtgagctgccagaaaagctggagcactgacacagccggccagctcttacctcacttca

SEQ ID NO: 16185 - DNA, 690 bp, Homo Sapiens
  misc_feature (346)..(369): n is a, c, g, or t
  misc_feature (563)..(617): n is a, c, g, or t
tgagcaggctgatgcatacctctgacatgatggggcgcatgtcctatgagccaaataaggatccttatggcagcatgaggaaagctccaggagtgatcccttcatgtcctcagggcagggccccaacggcgggatgggtgacccctacagtcgtgctgccggccctgggctaggaaatgtggcgatgggaccacgacagcactatccctatggaggtccttatgacagagtgaggacggagcctggaatagggcctgagggaaacatgagcactggggccccacagccgaatctcatgccttccaacccagactcggggatgtattctcctagccgctaccccccnnnnnnnnnnnnnnnnnnnnnnnnacgacatgattcctatggcaatcagttctccacccaaggcaccccttctggcagccccttccccagccagcagactacaatgtatcaacagcaacagcagaattacaagcggccaatggatggcacatatggccctcctgccaagcggcacgaaggggagatgtacagcgtgccatacagcactgggcaggggnnnnnnnnnnnnnnnnnnnnnnnnnnnnnnnnnnnnnnnnnnnnnnnnnnnnnnncaagctgcccagccttcccctcaagcaagatgtatacaaccagtatggcaatgcctagcctgccactgccaca

SEQ ID NO: 16186 - DNA, 547 bp, Homo Sapiens
cgttgctgctgatgctgctgctgcagcggggggtagcggctaggagaatacatccccgagtctgggttggaaggcatgagattcggctgtggggccccagtgctcatgtttccctcaggccctattccaggctccgtcctcactctgacacccaactcagagggacaggcatgtcgctcattcaataaccatccagtcacgggcacctgccttgaggaggcttggtgatcccaggttctgatttcagggaagcttccatcatcaacgagtgtcccttcagcacaccttcatctcacacacacgctcgcctgcaggcttccacaatgcttgctcctggggaatgggtatgccacagtaagctcttccaggaaaacaccagtatctttctagatggcaaaggaaatctaaatcgcttttccctaagagagctgggaactctgacgtttctactcccactccctttttaacagctgctgtttaactggtttcactggctcccatcccttctattttctgggcattaagtctgctcacagcaaggggagct

SEQ ID NO: 16187 - DNA, 583 bp, Homo Sapiens
  misc_feature (104)..(191): n is a, c, g, or t
ccacattgtcacctgtgaagtgctggggctcctcactttacataaaacgtacagcccttaaaagttgaataatgtaagaaaaattgtattttaactgcaccatnnnnnnnnnnnnnnnnnnnnnnnnnnnnnnnnnnnnnnnnnnnnnnnnnnnnnnnnnnnnnnnnnnnnnnnnnnnnnnnnnnnnnnnncatattcaatttataagtgagttgtgctttatacttgacatatgtaagcagtattagaaaaactaaacagtatgtcccactcctccctgcccctagggcttaataaataactagcatgaaaagaacacattacatcaactgcttctttcaaacatatttcactggagagcctgaatatactagaattatgttttatacggttcatgaacttcataggggaaagtgtccacaatcaactactattatgagcaagccttgtgtgatacctgttccaattgttcaggtgtccatgggttatcaccaataactcgtttggctgcataaaagctcattcccggaggaggctgtgggattccagaacctccgccactgtttgaagagatcctgcgctg

SEQ ID NO: 16188 - DNA, 317 bp, Homo Sapiens
ggtgacacacgagacaggtaaggcacttctctgtagagcaccagtcatttttaaaagctgctcagagaacatctgtgtcctgtttaaatccagaataaaatccttaatgccaatttttaaattcccaagaagtaatataacagggagtcatgcttttccccacattgtcacctgtgaagtgctggggctcctcactttacataaaacgtacagcccttaaaagttgaataatgtaagaaaaattgtattttaactgcaccataaaagctagatgaaagttaaacctataattaaaaaattaaaattacaaaagttac

SEQ ID NO: 16189 - DNA, 777 bp, Homo Sapiens
  misc_feature (682)..(682): n is a, c, g, or t
  misc_feature (754)..(754): n is a, c, g, or t
gcccccgaacatcctcgggcttggtggaagagtcctcatattcctccgccagggagaagagatcactgaatttcatcttgtgggcttcgtcacagctcgcttggacatgctgcagcgcctggagaattggcgtctggctaaaaactagaggaagaaaagggagagcagggaaggaaaaacaatcagatgtctgggagcttattaaacagcacgcacaggttgttttatcccgagtgtgggttgtggccccgggtgtcctgcccctgcccccagcctggctccaggcatagtctgggccagggcagcaccgtctacactggacgccgagggtggaaggcatacagttctgcttggtgttggtcaggttgagccgcagattgtccaagtgctccaggatctgctccagagtcagctgggccagcttgctgctagagctcctcaggctctgtctcttgcgaggcaggctgttgttcttgatgagcagggacttgatgtgctcggccagcagctcgtcatatttcatgcaccagtgccgcaggatgctggtggtgaactggtcgtcaggatggcagggccggctcagcaccatcttcaccatctcctcgctgggcttttctcttcggagttgaagcggtaggcaggacagggcctctgggtgctccttgtatttgaggtgctgcangatggggattatggtctccaggggaatattgtggccagaaagagctgcaggcacaacactgctcaaggtctnccagtctaggctctgaatgagta

SEQ ID NO: 16190 - DNA, 1263 bp, Homo Sapiens
tatcaccccttaccttgaccagttggatgagtccctgagggacaaagtactccagctacagaaggggagtgatacggaggcccagtgtgaggtcatgcaggaaattgtggaccaggtcctggaggaagactttgactcggagcagctgtctgtccttgcttcctgcctacaggagctcttcaaggcccactttcgaggggaggtcctgcctgaggagattactgaggagtccctggaggagtctgtaggaaagcctctgtacctaatatttaggaacctatgtcagatgcaggaagacaacagcagcttctctctacttctagaccttctctccgagctatatcagaagcagcccaagattggctaccacctgctctactacctgagggccagcaaagccgccgcagggaagatgaacctgtacgagtcatttgcccaggctacccagctgggcgatctgcacacctgcctgatgatggacatgaaggcctgccaggaggacgatgtgcggctcctgtgccacctcacgccctccatctacacagagtttccagatgaaaccttgaggagcggagagctgctgaacatgatcgtggctgttattgactctgcacagctccaggagctggtctgccacgtgatgatgggtaacctggttatgtttcgaaaagactcagttctcaacatactcattcagagcctagactgggagacctttgagcagtattgtgcctggcagctctttctggcccacaatattcccctggagaccataatccccatcctgcagcacctcaaatacaaggagcacccagaggccctgtcctgcctactgcttcaactccgaagagaaaagcccagcgaggagatggtgaagatggtgctgagccggccctgccatcctgacgaccagttcaccaccagcatcctgcggcactggtgcatgaaacatgacgagctgctggccgagcacatcaagtccctgctcatcaagaacaacagcctgcctcgcaagagacagagcctgaggagctctagcagcaagctggcccagctgactctggagcagatcctggagcacttggacaatctgcggctcaacctgaccaacaccaagcagaacttttttagccagacgccaattctccaggcgctgcagcatgtccaagcgagctgtgacgaagcccacaagatgaaattcagtgatctcttctccctggcggaggaatatgaggactcttccaccaagccacgacaggttcg

SEQ ID NO: 16191 - DNA, 605 bp, Homo Sapiens
atgtcgtggctggcgctgccctacaaggagaagcacaggaagctcaaactttggaacaaataccgaatttccaacattccatcactaatattcctcgacgccaccactgggaaggttgtgtgcaggaacgggctgctggtgatccgagatgacccagaaggtctggagttcccctggggaccgaaacccttcagggaagtcattgcagggcccttgcttagaaacaatgggcagtctctggagagcagcagcctggaggggtctcacgtgggcgtctatttctccgcacattggtgtccgccctgccgaagcctcacccgggtcctggtggaatcctaccggaagatcaaggaggcaggccagaacttcgagatcatcttcgttagtgcagacaggtcggaggagtccttcaaacagtacttcagtgagatgccctggctcgccgtcccctacacggatgaggcccggcggtcgcgcctcaaccggctgtacggaatccaaggcatccccacgctcatcatgctggacccgcaaggcgaggtgatcacgcggcaggggcgggtggaggtgctgaacgacgaggactgccgggagttcccctggca

SEQ ID NO: 16192 - DNA, 835 bp, Homo Sapiens
ggcgctgccctacaaggagaagcacaggaagctcaaactttggaacaaataccgaatttccaacattccatcactaatattcctcgacgccaccactgggaaggttgtgtgcaggaacgggctgctggtgatccgagatgacccagaaggtaaaacctcagcccgtgcatatggtcctcttattacccagccctccctcctccatgcccttaggctaatctccgtcccaccggtggagagagtactggtgaaatagatacacgtgggtttacgtggtagagaatgtcgtcttggtgaaatcatagtattccctaggacatggttttaagattttcacagggatcagaatgtccctcctaggggctttaattcatgggccaaaagagatggactctgccgtaagaagctccgcttggagggccgcagaggctgtgggaaagcgtgagagctcagaccccggcctctagtgctgcatccgtggcggctgcccccttcacagttagaagcaagctgagtggggtttttcctctttaaaacattacatagcgaagtcccagcccccgtgtcactctcctggccttggcggtgagtgcacctcgttgcttggagctgtcactccctgcgggccttggtcttgctggctacgcgtgggctgtgctcctccagccgccccgctcagggccgtccgcgtggcgtctttccctctggcagtgagtgagaacagggctgtgagatctcctcccctcacttaatccgtccagtgagaagattcaaccccgctcacacattttcccagtaaaaatgccacctacttcaaagaattgtcctcagtaaa

SEQ ID NO: 16193 - DNA, 1060 bp, Homo Sapiens
cacccataatctggaagtcggacctgtccaatctgaatctgaatccctggctacccacatggccatggcacgttctgtaatgtccctgagcccactgtcatcttcattacaaagtgacaatgacagggctgttgagaagactagatggagtgatacgcagcacacaactaccccctgccctcacccctgctcctgatcttcttagccctagccccagggccccaactaactcagctgtcctggtaacaactcagtttgatggcataggacagaggtcagcaaacttttcctataaagtgccaaatagcaaatatttttggctttgcaggccttttagcacctgctcaactctgccattgtgacataagaagtcatagataacgtgtaaacaaataaggatagctgtgttccaataaaactttatttacaaagtagacagtgggctggatttggctcatgggccatagtttgcccgccgccatataaagaaagagacctaaatactccttatctgcaaagttagatataactgccacatatgtgctcttcctagaaacagaatcacttttttgtcaaataccatggaacatttacaaaagttgtataaacattaggccaccaaaaaagtctcaataatttttataaaaagtagaatgaatgctgattaaaatgtgataaagattctgtaaaaacaaaggcatggattgcacaaagagaggggtgccatgctgggagacaatccacttctttttaactttcaggtatgaaataatgtactcttgctggagaaccgatcccttagaccgccccaccttttcagtattgaggctgcagctagaaaaactcttagaaagtttgcctgacgttcggaaccaagcagacgttatttacgtcaatacacagttgctggagagctctgagggcctggcccagggctccacccttgctccactggacttgaacatcgaccctgactctataatatgctcctgaactccccgcgctgccatcagtgtggcccagcagaagtcatgacagcaaactcatgaggacggacatc

SEQ ID NO: 16194 - DNA, 831 bp, Homo Sapiens
cgggatcgattattaccgccaaggccgcattgctaagatgcctgttaaatggatcgccatagaaaggtcttgcagaccgagtctacacaagtaaaagtgatgtgtgggcatttggcgtgaccatgtgggaaatagctacgcggggaatgactccctatcctggggtccagaaccatgagatgtatgactatcttctccatggccacaggttgaagcagcccgaagactgcctggatgaactgtatgaaataatgtactcttgctggagaaccgatcccttagaccgccccaccttttcagtattgaggctgcagctagaaaaactcttagaaagtttgcctgacgttcggaaccaagcagacgttatttacgtcaatacacagttgctggagagctctgagggcctggcccagggctccacccttgctccactggacttgaacatcgaccctgactctataattgcctcctgcactccccgcgctgccatcagtgtggtcacagcagaagttcatgacagcaaacctcatgaaggacggtacatcctgaatgggggcagtgaggaatgggaagatctgacttctgccccctctgctgcagtcacagctgaaaagaacagtgttttaccgggggagagacttgttaggaatggggtctcctggtcccattcgagcatgctgcccttgggaagctcattgcccgatgaactttgtttgctgacgactcctcagaaggctcagaagtcctgatgtgaggagaggtgcggcgagacattccaaaaaatcaaagccaattcttctgctgtaggaggaatccaattgtacctgatgt

SEQ ID NO: 16195 - DNA, 377 bp, Homo Sapiens
ctctttctggggatggtcgaagtttactgatctctcttattgcttcatggcagtactgctgggcgaggtaggttgtttgttgcacaccatcactctgtagtacatactgtcgagctctgtctacatctccaggcaaactgaaccgtcgcatgatcatagcattcatttctgggaactgctgacaggcaaacaggacaggaccagtggctaacccgagcttcagatcagctgatgttggtttgcccatctggtcagaacacgaggtgaagtccaatacatcatctattagctgaaaagctattcctacattttttccgtactgataggcgatcccatgccccactgtggcatacaacgaacgcccccgagctccgacg

SEQ ID NO: 16196 - DNA, 370 bp, Homo Sapiens
  misc_feature (347)..(347): n is a, c, g, or t
ctctttctggggatggtcgaagtttactgatctctcttattgcttcatggcagtactgctgggcgaggtaggttgtttgttgcacaccatcactctaagaccagttaaaacaaaacatttcgtaagtagtctgtagtacatactgtcgagctctgtctacatctccaggcaaactgaaccgtcgcatgatcatagcattcatttctgggaactgctgacaggcaaacaggacaggaccagtggataacccgagcttcagatcagctgatgttggtttgcccatctggtcagaacacgaggtgaagtccaatacatcatctattagctgaaaagctattcctacattntttccgtactgataggcgatctc

SEQ ID NO: 16197 - DNA, 653 bp, Homo Sapiens
  misc_feature (346)..(383): n is a, c, g, or t
  misc_feature (397)..(526): n is a, c, g, or t
atgctcatgatctgtccgggaaggtctctccagctactggaaggggagtgcccacaggggccaggagaaggcagttgggcagatgttgccgtagtccggacacatccaggcatacgtggttttgaatcacttcctctccaagggctgctgcttcctctccacccctcccaagtgttctggctctgggccccagctggccacctcagcccgggcaggctcctccaacctgaacgacaggcaacctccacgctgcctgccacggcaccccaaagtcaagacgtagaactcattccacctccttcacccgaggctgctttcccaaacgtcttcccagtcccaccttcannnnnnnnnnnnnnnnnnnnnnnnnnnnnnnnnnnnnngacaagtcactgtnnnnnnnnnnnnnnnnnnnnnnnnnnnnnnnnnnnnnnnnnnnnnnnnnnnnnnnnnnnnnnnnnnnnnnnnnnnnnnnnnnnnnnnnnnnnnnnnnnnnnnnnnnnnnnnnnnnnnnnnnnnnnnnnnntccacatagatgtcggataggtgttctgaacttatgccagagctgaactccacctgatccagaaacggctgccgtccacctgctcagaccatacctcagaactgttgctggctcctccttttccctc

SEQ ID NO: 16198 - DNA, 600 bp, Homo Sapiens
  misc_feature (133)..(282): n is a, c, g, or t
gcttgatggactgagaggcagccatcagcagttctgaggtatggtctgagcaggtggacggcagccgtttctggatcaggtggagttcagctctggcataagttcacaacacctatccgacatctatgtggannnnnnnnnnnnnnnnnnnnnnnnnnnnnnnnnnnnnnnnnnnnnnnnnnnnnnnnnnnnnnnnnnnnnnnnnnnnnnnnnnnnnnnnnnnnnnnnnnnnnnnnnnnnnnnnnnnnnnnnnnnnnnnnnnnnnnnnnnnnnnnnnnnnnnttaatatactccaatccagtggcttcgatttgcttagtcacgagcagccatgggaatgataagctaaggctgtgactcttcattttctacaataatactaagcacttcctgtattgcatatcaactcatttaatcctcacagcaatgtgagatacatactatcctccccattttataattgagggaactgaagcatagacaggttacatagctggtgactggcagatgaagtgacttatccgtggtcctacaggtgatgagtggcagtactgtgctcttatcaccagctcttgagcgtgctaatcctgtcatttgtcg

SEQ ID NO: 16199 - DNA, 553 bp, Homo Sapiens
actctgggtcctgagtcaaaggaagacaagcagggcatactctgggctgagactgttgaaggaaaaatagctgaaggcaagctagataaaaagcattgtcaaacaagcagaaaacagcaccaaaaagcagcagggaggaaactggggcagtgaacaaagctcaagtccaaacaagacgcacagaagaagtaagagccaacaaactgcctttagggttccagcagccacaggagagtggcagtagctggcttcatccgtacactcaaagctcaaagcctaatgcagcaggtagtttcctaccaacccccagttcacaagtaaaaagcagaggtctcagtaattacatgactagcgcaacgtcatgggctagtaagtatccgttctagaacttgaacccaggtttggctgagagcaaagcccatgttctcagtctccatatgataaccaaattctgactgagtcaatgaagaaaaaaaggagttatcaaaggaaatccaaaaggaatgaccaagattgagggtgatgacaggaaggcactacccaggacccgact

SEQ ID NO: 16200 - DNA, 797 bp, Homo Sapiens
gcgggaaccgggctggtgggcctggaggggcctgcctgtcccccttgcagagggtcttcccgccacgtgaagccggcacaggcctggatgccgacgacccttgctcgggtttggctgggggttgcaggtccccctgctttcttgttagtttcttcatagaggccctaagatgcttgagcacagtgtcctcatccctggcccaggtatcaacgaaccggtcgcaaaaatcgtcaccacagggccacacctggacgtcttcgtgaggcgcttctgctgaaccttaaaggcgattcttgttatcggcatcaacgcctgttcgccttctaccagatacacgtcccacaggcgcagggtgagcccgagagagatcccgtcaatcaatatccggatgaggcagcctaacggggaacactgcccacatagatctttcttgtcctgatgccccatggtcttgggttgtgacgtggctaccacatgctcctgttggtcttggagcccctggacggtcccgccatttgggctgtgaaatccctgcagggagtgcctctcactggccagcagctgcaccagtgcccagaatgcatcctcctcaggaagatagaggaggaacaaggcggcgatgtggctcaggtccctgcagtagcccacctccgggttgtactcctcatatgccaggaggatgtggagtagttcccgctgcttggttccgtatcgatccctgaagaatatatgcttccttaatgtcccgcttacgtcccggatatacaggggatcgctactatgagtcgacctgcagt

SEQ ID NO: 16201 - DNA, 814 bp, Homo Sapiens
cctgcttatcgggacgtcttcgtgaggcgcttctgtagaaccttaaaggcgattcttgttatcggcatcaacgcctgttcgccttctaccagatacacgtcccacaggcgcagggtgagcccgagagagatctgatgccccatggtcttgggttgtgacgtggctaccacatgctcctgttggtcttggagcccctggacggtcccgccatttgggctgtgaaatccctgcagggagtgcctctcactggccagcagctgcaccagtgcccagaatgcatcctcctcaggaagatagaggaggaacaaggcggcgatgtggctcaggtccctgcagtagcccacctccgggttatactcctcatatgccaggaggatgtggagtagttcccgctgcttggttccgtatcgatccctgaagaatatatgcttccttaatgtcccgcttacgtcccggtcgatgcgctggatgtgctcagatgacctcttgcccttctccttcatgatctggtatcttccggggtttttcaacttcatttcctcagtgttcaggaggactgaccacatcgggccccggatgttcatgggcattcccttgtacgctcgatctatgagctgtgggcagaaaacgatctggtgtcacaggccgcggggtgaccccagtgaggaccagagcccggggattctggaaattgtcggttttggccccatgattcctcagtagaggtgagatcaagctgggacagggtctcccttcccaggactgaaagagtggatgacactcagagtcgaaactctgatctgaccttttcctc

SEQ ID NO: 16202 - DNA, 456 bp, Homo Sapiens
ggtcggattcgctgggatgtgctcagatgacctcttgccattctccttcatgatctggtatcttccggggtttgtcaacttcatttcctcagtgtacaggaggactgaccacatcgggccccggatgttcatgggcattcccttgtacgctcgatctatgagctttctgctgcttttgtatttctcccagtctcccagcatatccacccacttgctctttcggctgatctcccgccgaatttgcttcgcctcccgcgcagtcagaggaggcagctccgtctcatgtacaatccccaaatgatcgacgttgttgttgtagcttcgaaaaggcttaggccccttgtcctctggcagcccagctcggtgtcccttttcgtatttcataatgatgtcctctcgctcttgtgcccaccaactgcccgcgacctctaccacgtccatccatccgaagcagtg

SEQ ID NO: 16203 - DNA, 765 bp, Homo Sapiens
  misc_feature (484)..(484): n is a, c, g, or t
tgggctttgtccacatgggctggcctgaagcccagccggctactgccacagcgggcttctcccaggctgctctcggtcggccgtgcggacctcgccaagcatcaggaactcccggggaagaagctgctctctgagaaaaagctgaaaaggtactttgtggactatcggagagtgcttgtctgtggaggaaacggaggcgctggggcaagctgcttccacagtgagccccgcaaggagtttggaggccctgatggaggggacggaggcaacggtggacacgtcattctgagagttgaccagcaagtcaagtccctgtcgtcggtcctgtcgcggtaccagggtttcagtggagaagatggagggagtaaaaactgcttcgggcgcagtggcgccgtcctctacatccgggtccccgtgggcacgctggtgaaggagggaggcagagttgtggccgacctgtcttgcgtgggagatgagtacattngccgcgctgggcggggcaggagggaaaggcaaccgcttcttcctggccaacaacaaccgtgcccctgtgacctgtacccctggacagccaggacagcagcgagttctccacctggagctcaagacggtggcccacgccggaatggtgggattccccaacgccgggaagtcctcactgctccgggccatttcaaacgccagagcggggtcgcctctgggcctctgtctgagcaaacctggatgtgaattcggtggttttgaatgcataaagtgccttgtgga

SEQ ID NO: 16204 - DNA, 502 bp, Homo Sapiens
  misc_feature (416)..(417): n is a, c, g, or t
tttccgtgtccacaaggcactttatgcattcaaaaccaccgaattcacacccaggtttgctcagacagaggcccagaggcgaccccgctctggcgtggctaccacctgagcggctggcggccctggcccagctcggcctccgcgtagggtcatacagcaccttcaggtagaacagcagctgctccaggttctcgccggtcaacgccgacagcacgatgacctcctgtcccaagtgatcccggagctgggacagattggcttgggcttcagggaggtcaatcttgtttgcgacgattgcgtggggcctcgcagacaggcccttttcatacatctccagttcatattttaaatcgtcaacttgagtccacggctcaggctgagaaagatccaccacgaacaagagaaagcggcagctnncgatgtgcctgaggaaggcggaccccagacccctgttctggtgggcgcctcgtatgatgccgggaatgttcgccactgctatttg

SEQ ID NO: 16205 - DNA, 615 bp, Homo Sapiens
ggaaaagaaaaaatagctgtgtaagcaagacatttagaagtcacagagtttgaaattgattgcttcttaggggcagggtgtggggagtagggcctagtgttgagcagggcctggagcttacgtattttaaactatgaactattattttgatagaaatttaaaaaattttagagttttaaatctatatcattacagactatatatattctgcgtttacactgtgaaaaaattagaagtcaatagaaaaagagaaatgaacaaaatccctttttatatatttgaaaaaattatacctctgaataattgagtcaaagaagacttgttatggaaattagaaaatatttagaactgaataatgaaattaccacatatgaaacattagggataaacatgtttcatatgcagataaaatattagagaggatatttagttaagaagaaagactgaaaattaattagctaagcattaaactcataaaaacaaaaggtaatttggagaaagtagaagaaagttttaagagcagaaacaaatgaaataagtgaagtgaggggcaaaaatattaaaaaactgatatttaaaaatagtcccaaaagatatatagacctagccgcgaca

SEQ ID NO: 16206 - DNA, 1000 bp, Homo Sapiens
  misc_feature (443)..(461): n is a, c, g, or t
  misc_feature (711)..(774): n is a, c, g, or t
catcacacttagtcaaagtcactggggtagcatttaacagacatttgcaaaaagtttctaatgaaagatagggcaaaaagcaaaattataagtataatagaaataaaggaagttggaaaaagcaaagacaaatctaaagaaagttaaaaagatgacttacgaaccccaaagctaattactatccttagagaattaagagaaagcattgcgttcattaaacaaggacaggacagaatgccatcagataggaagaattacagcaggaaaacttggaaattatgatgggtataaaaaacccagtaaaagtgttaaaagatgaagttgaggaaacttctaagcagtagaaaaaacagatagaaaacagaaaaatagatttgagtaccagtccagcagaaccaacatccatctagtgaaacagaaagcagagtaaatgggaagaggannnnnnnnnnnnnnnnnnngcgacagagcaagactgtcccaaagaaaggaaaagaaaaaatagctgtgtaagcagacatttagaagtcacagagtttgaaattgattgcttctaggggcagggtgtggggagtagggcctagtgttgagcagggcctggagcttacgtattttaaactgtgaactattactttgatagaaatttaaaaaattttagagttttaaatctatatcattacagactatatatattctgtgtttacactgtgnnnnnnnnnnnnnnnnnnnnnnnnnnnnnnnnnnnnnnnnnnnnnnnnnnnnnnnnnnnnnnnnttatacctctgaataattgagtcaaagaagacttgttatggaaattagaaaatatttagaactgaataatgaaattaccacatatgaaacattagggataaacatgtttcatatgcagataaaatattagaatatttagttaaaaagaaagactgaaaattaattaactaagcattaaactcataaaaacaaaaggtaacttggaaaaagtagaagaaagttttaa

SEQ ID NO: 16207 - DNA, 868 bp, Homo Sapiens
  misc_feature (174)..(217): n is a, c, g, or t
  misc_feature (244)..(263): n is a, c, g, or t
cagtcagcataagggagaaagattaggtatcctggtatgttatgctcacaccctgtcaataagaaggctcttgaactcttatctgtgagtcttggactttaaatgcagacttcactgctcatcatcaatagaataattaatcagttctggaaagcagtgcccttatgtcatatnnnnnnnnnnnnnnnnnnnnnnnnnnnnnnnnnnnnnnnnnnnnccttatgtcatttctattgttcattannnnnnnnnnnnnnnnnnnncagaaaggatttactcctcttcatgtggcagcaaaatatggaaagcttgaagtcgccaatctcctgctacagaaaagtgcatctccagatgctgctgggaaggtaagaggtcaccagccactctgaagcaggccacttccacgataacaaaatacacccttgctaatattcactaatagccactcaaattataactaaatatttaagtcccactaggatgaagagcacttgggaaataaaaggtaaatgctggggtccaagtactgtggaaaccggaatgtaaatatgccctatgtcgtatccaatctaatttcatttcctcaatctaagcctctggttttaagacacctttgacactggttgttgtttctgcacgtgttttcagagcgggctaacaccactgcatgtagctgcacattacgataatcagaaagtggcccttctgcttttggaccaaggagcctcacctcacgcagccgcaaaggtacctataattccacagcctaaggagactgatgggtaaggtctatcagtctctatctgcacatctacttctgcttcagcaggagcaccctcctagtttagccacgacatgccgggggatc

SEQ ID NO: 16208 - DNA, 678 bp, Homo Sapiens
aggtttagttgaactagctaagaggcaagcggcaataaaatgtattcagtgaccctcttatagaatatattctaagtgaaatacatctctgtacatttgtcagtaacagtgaaacagctttttgctaaataggtcactaggcttttgaaagcagaagattatgccatttgttttgattggatgaaccagacgtttcactaaaccacataatgtgaaaaaaatgcaagtctttttctgtagtttaaatgtagacatcttgaaaatgagtaagtaatctaataaattataaagacctttgaaatggttttattgttttatgagaaactattgatttgtaactttgaatgtaagttataaaataatgttacttaaatatgaccagtttacatgaatgttattatctgatctgcagaaattcaagattatttaaatatcattctttagagtgaaagaaatgtaatcattccattaacagtgttttcacagggtactactgtgtaaatgcagaagcggtgagccctttgatatggaagaagtaattgaaattctcgtaatgagactaagaagacaccttcttcacctaactcagttattcacagctaacctagtggtttgaggtcacatgttttactaaacacctacctagtcataggatagctattttttaaaaatataata

SEQ ID NO: 16209 - DNA, 786 bp, Homo Sapiens
tgtcgtggctgtgtcaggatgtcatcagttggcctttgaagggaagttccttccaagaaactgctgtgaccatgtgttctctgtgggcagaggccgggcggtattctgggacatcaagaaccgcttgccacggtcagtgactacagttcagtgggagaacagcttcgtgtctgtgtacagtaaggacaaccccaacctgctgttcaacatgtgtggcttcgagtgccgcatcctgcctaagtgccgcaccagctatgaggagttcacccacaaggacggggtctggaacctgcagaatgaggtacagcctgggcggggctgggagtgacatgaacgcgcctgcacttcctgggtcagtcaccggagtcttgttgggtggaaagacttgaatggtgggcacagttggctcttgcttctgtgggagttcctcggacatgttaaccttgactttgtggtttaggttactaaggagcgcacagctcagtgtttcctgcgtgtggacgatgagtcaatgcagcgcttccacaaccgcgtgcgtcagattctcatggcctctgggtccaccaccttcaccaaggtacaaggccgtcatgcccagcttccctcttgtcctctgctgtcctctgctcttttcacacccctttcacttcgtcccccgctggctgcttccttctcttctttgcttagtgtgccagtttccatgctctgtgccatagtggcttatagtatgtcaggtcacttcatcgttattttctgagcgttccttgtagaaattgtgtagccacg

SEQ ID NO: 16210 - DNA, 1192 bp, Homo Sapiens
cttcatgctcattctgacgaaagtgttgaaccacatcttctttttgaccacctgaggtcggattcggggatgaacacatgccccattgagagcatgccgagtccacccaactccttaggggttgtagaacacaaccggggggaacccgacttggcatcttggagttgagtccaatcgtgatacgtgtctggattttgttctcacacttcaccagtaagtccaagagctcttgggtgttcaccacagcctcccgaaagtatgtcataaggccaatgagagctgtattccacttattcacaatcttggtgaaggtggtggacccagaggccatgagaatctgacgcacgcggttgtgggaagcgctgcatagactcatcgtccacacgcaggaaacactgagctgtgcgctccttagtaacctcattctgcaggttccagaccccgtccttgtgggtgaactcctcatagctggtgcggcacttagggaggatgcggcactcgaagccacacatgttgaacagcaggttggggttgtccttactgtacacagacacgaagctgttctcccactgaactgtagtcactgaccgtggcaagcggttcttgatgtcccagaataccgcccggcctaagttaacatcatgtttcatgaggcgcatgcgggcatctcggggccagcacttcttgttattatagccaacgatgttttcattattgggtcagggtgctctgtcaggtaacgttgaatcaggtcccgagcctcatctgctgtgaacctgcaacaaatatggatgcgatcatgtatctgcagaagagacggatggggtggcagcctcagtggctatgtcctggaaactgagaaagtcatttggcatctgagggggcccagccatctcactggcccggtgcaatcccatacaagccaatccatcaccaggccataatactgcacgatgaatgaggcaactgcaggcctctgatgatcccatatgaattcgtatggttcatgtccttatagttgatgacgacgttgttcttggctgtcatgtagtcgcctatgttgtggtccacgatgaggcgcagcagcctattgagcagagtcaagtcgaatcttctcgacgcgtgggtcgacgtatcccgggaattccggaccgtaccagcctgcttgttaaccactttcatagtcacctag

SEQ ID NO: 16211 - DNA, 1755 bp, Homo Sapiens
  misc_feature (1460)..(1506): n is a, c, g, or t
tctggtcgcctatgcagacttcgtggtgactttcgtcatgctgctgccttccaaagacttctggtactctgtggtcaacggggtcatctttaactgcttggccgtgcttgccctgtcatcccacctgagaaccatgctcaccgaccctgaaaaatccagtgactgccgaccatctgcctgcacagtgaaaactgggctggacccaacccttgtgggcatttgtggtgagggaaccgagtctgtgcaaagcctcctgcttggggcagtacccaaaggaaacgctaccaaagaatacatggagagcttgcagctgaagctccggggaagtcatctacaagtgccccaagtgctgctgtattaaacccgagcgcgcccaccactgcagtatttgcaaaagatgtattcggaaaatggatcatcactgcccgtgggtgaacaattgtgtaggagaaaagaatcaaagattttttgtgctcttcactatgtatatagctctgtcttcagtccatgctctgatcctttgtggatttcagttcatctcctgtgtccgagggcagtggactgaatgcagtgatttttcacctccgataactgtaatcctgttgatcttcctgtgccttgagggtcttctgtttttcactttcactgcagttatgtttggcacccaaatccactccatatgcaacgacgagacggagatcgagcgattgaaaagtgagaagcccacatgggagcggaggctgcgatgggaagggatgaagtccgtctttggggggcccccctcactcctctggatgaatccctttgtgggcttccgatttaggcgactgcccacgagacccagaaaaggtggcccggagttctcagtgtgaggcgtggctcatcagactgaaacttgctcacagacttccagttatttatttggggtctgaaggatatcaacagctcatctgtgaccaacagggcaactggaacctacacaaaccaattgcttgcagcaagcagagttttatatatttatagtcacagatggcagaggaagaggctctcagtccccacctgtacaacaacggaaaggtgtgtggccacacgaagaagccaaacgccgtggcctcctgcagagctggggcttctgtggagaatacttcgggttattacatggggttattcaaatcctgggtcctgagctgctgtttccaatcatgaagaaaaacagtgaatccagtgaacagggattctccaagcagtcatttcagggggctcctgctgaccccgccactcagcagtgcactcccccggatcacagcaggccgtttacatagaaagacgttttggtctcgattagctccgatgctttgaactgaagttgcaaaagatctgtgcattgaacagtgaaggtggcttccggcacactccccgctgccccggaagagacatcctttgaccctctcagcaagtcnnnnnnnnnnnnnnnnnnnnnnnnnnnnnnnnnnnnnnnnnnnnnnncaaaattgccagtgttgtttaggcagtgtaacatttaccggctgtgtacagcaaacaagctattttttagaaaccgacgtttcagggaagaggggagagagccgcggggtcctgcccgtggttactatgaatgtattgctgttggaggacatctcgatccaaagaacagccgttcctgtgcggcccttcgttgccctaaagctttcattttttaaagaaataaagagtgcttgagggccttggaactga

SEQ ID NO: 16212 - DNA, 505 bp, Homo Sapiens
  misc_feature (193)..(193): n is a, c, g, or t
tcgagctcgccctattattgtatgacctggtctggctcatttgcctatacttcataatcacagtgtcaatagaaacctcacacatatacagactcttttgaaaccactggccaggaagtcatggtatgaatttttcgcttgtgacgggtggccctccctctgctccttggcagaacaatgacatgtgcccatngtagaatggtgaacaactatcccccttggaagctggccagtgggctggcgcctagtaggattcttgctctgagccaatacattactgccactcggggttattcacggaccacgttataaccacacttcctcttagtccgcacgaatgccagtgatttttcacctccgcataactgtaatcctgttgatcttcctgtgccttgagggtcttctgtttttcactttcactgcagttatgtttggcacccaaatccactccatatgcaacgacgagacggtaagctttgttctcggctgtgtggacttcatatgt

SEQ ID NO: 16213 - DNA, 367 bp, Homo Sapiens
aggctggccagacatctgtcaccagtgaaaacggggctggacccaacccttgtgggcatttgtggtgagggaaccgagtctgtgcaaagcctcctgcttgtgagtgtggggtaggcacatgggggagggtcagcctggctgggagtcctcagcagtttgctcctctttgctgacaagcgcacttgccccttcctcctctgcgctcagactctacagctactcagcagtccagcttctgctcccaccccgctcctgctcctgcggaaaaggccccagaagcctggagagctggaggcggccaggaagtcagggtagaaggtgtgtgcagggcgtgctcctgcctggtgacagaagtctggtaccgccg

SEQ ID NO: 16214 - DNA, 1300 bp, Homo Sapiens
  misc_feature (456)..(456): n is a, c, g, or t
  misc_feature (506)..(506): n is a, c, g, or t
ccatccggcgtatctcactggacaccagtgaccacaccgatgtgcatgtccctgttcctgagctcaacaatgtcatctccctggactatgacagcgtggatggaaaggtctattacacagatgtgttcctggatgttatcaggcgagcagacctgaacggcagcaacatggagacagtgatcgggcgagggctgaagaccactgacgggctggcagtggactgggtggccaggaacctgtactggacagacacaggtcgaaataccattgaggcgtccaggctggatggttcctgccgcaaagtactgatcaacaatagcctggatgagccccgggccattgctgttttccccaggaaggggtacctcttctggacagactggggccacattgccaagatcgaacgggcaaactcggatggttctgagcggaaggtcctcatcaacacagacctgngttggcccaatggccttaccctggactatgatacccgcaggatctactgngtggatgcgcatctggaccggatcgagagtgctgacctcaatgggaaactgcggcaggtcttggtcagccatgtgtcccacccctttgccctcacacagcaagacaggtggatctactggacagactggcagaccaagtcaatccagcgtgttgacaaatactcaggccggaacaaggagacagtgctggcaaatgtggaaggactcatggatatcatcgtggtttcccctcagcggcagacagggaccaatgcctgtggtgtgaacaatggtggcggcacccacctccgctttgccagagcctcggacttcgtatgtgcctgtcctgacgaacctgatagccagccctgctcccttgtgcctggcctggtaccaccagctcctagggctactggcatgagtgaaaagagcccagtgctacccaacacaccacctaccaccttgtattcttcaaccacccggacccgcacgtctctggaggaggtggaaggaagatgctctgaaagggatgccaggctgggcctctgtgcacgttccaatgacgctgttcctgctgctccaggggaaggacttcatatcagctacgccattggtggactcctcagtattctgctgattttggtggtgattgcagctttgatgctgtacaggtaacttcagtcttgctacaggggccacatgctcattgctcttcatgagcatgtctgggatctcccgaagctctgcagttcactgaatcaagctctgaccagccttattgcaagttggtgcctgtcagagcatcagagaatatc

SEQ ID NO: 16215 - DNA, 248 bp, Homo Sapiens
tccagggaaggacttcatatcagctacgccattggtggactcctcagtattctgctgatttggtggtgattgcagctttgatgctgtacaggtgagcttcagtcttgctacaggggccacatgctcattggtcttcatgagcatgtctgggatctcccgaagctctgcagttcactgaatcaagctctgaccagccttattgcaaggttgggtgcctggtcagagcagcagggaaagacagggcgggg

SEQ ID NO: 16216 - DNA, 1008 bp, Homo Sapiens
  misc_feature (64)..(64): n is a, c, g, or t
  misc_feature (148)..(148): n is a, c, g, or t
tatcaagtgttctcaatgctaagttatatgtgttagtgtcggggaaatagtttgcagataatgnaggagtacccctacaactatatgtccttagttcttacagaacctcatagtttgagaacaaagctgatgcaactgatttatacanaatgaactttggcaagaaaaataacattaacctcattgtttatggccatgctttgcttaatgatggatcattgttttgtgaggagacagaaaaaccctcagattcatcctttactttgtgtttgacacattcccctttaccttcaacctcagaacccacaactgatcctcaagctagtttatctccaatgtctgaaagcaccctcagcattgctattggcagttctgttatcaatggttgcgctacttataatggcctttcaatagatagatttggtataaatattccttcacctgaacattcaaatacgattgacgtatgtaatactgttgacataaaaactgaggatctgtctgacagcctgccacccgtttgtgacacagtagccactgacttatgttccacaggcattgatatctgcagtttcagtgaagatataaaacctggagactctctgttactgagtgttgaggaagtactccgcagcttagaaactgtttcaaatacagaggtctgttgccctaatttgcagccgaacttggaagccactgtatgcaatggaccttttctgcagctttcttcccagtctcttagccataatgtttttatgtccaccagtcctgcacttcatgggttatcatgtacagcagcaactccgaagatagcaaaattgaatagaaaacgatccagatcagagagtgacagtgagaaagttcagccacttccaatttctaccattatccgaggcccaacactgggggcatctgctcctgtgacagtgaaacgggagagcaaaatttctcttcaacctatagcaactgttcccaatggaggcacacacctaaaatctcaaatgtcgg

SEQ ID NO: 16217 - DNA, 653 bp, Homo Sapiens
aagcgacatttgctacaagatcctattgcacccaccaactccacctgccaacattatgtctgcaaaacttgtaaaaggcaagaaaatgatgatgaaaccttcctgtagctggtgcaaagactatgagcagttcgaggaaaacaagcagttaagcatcctacgtgaactgctacaacaaaactatgcgagtatataacacagactacactggcacgggatataatagaagcagttgactgttcttctgatattttggctttgcttaatgatggatcattgttttgtgaggagacagaaaaaccctcagattcatcctttactttgtgtttgacacattcccctttaccttcaacctaagaacccacaattgatcctcaagctagtttatctccaatgtctgaaagcaccctcagcattgcctattggcagttctgttatcaatggtttgcctacttataatgggctttcaatagatagatttggtataaatattccttcacctgaacattcaaatacgattgacgtatgtgatactgttgacataaaaactgaggatctgtctgacagcctgccacccgtttgtgacacagtagccactgacttatgttccacaggcattgatatctgccgtttcagtgaagatataaaacctg

SEQ ID NO: 16218 - DNA, 618 bp, Homo Sapiens
  misc_feature (369)..(446): n is a, c, g, or t
tcaacaactacctgattttcgtcctgaccagactcaagtcagaaggtacgccctctgctcccttccatgcgatcgggaccctgctttctccccctgggcccttgaacctcagccttcctcctcccagatgagccaacgcgctctctcagtggcctcatcctcaagaacaacgtgaaggcacactatcagagcttcccaccccctgtggcagacttcatcaaacaggagtgtctcaacaacattggcgatgcctcctcgctcatccgagccaccattggtgagaggggcagcgggggttggcctctgaggacacactgaactctcacttctcagcatgttaagtgtagtgcttcatggaatgctctggcnnnnnnnnnnnnnnnnnnnnnnnnnnnnnnnnnnnnnnnnnnnnnnnnnnnnnnnnnnnnnnnnnnnnnnnnnnnnnntgggtaagcagcagaagtcagaaacagctgaggcagtgcagggccacgctctggaaccactccctcctgtaacagtccttcttggctctgagacagtcatgcaacatctagaattttgtgttcggccttgggctgagtgctaagggtatagcagttaaaataatgcaggaca

SEQ ID NO: 16219 - DNA, 509 bp, Homo Sapiens
ctcacccgggacagcgatttgactttgcctacggaaaaacacgcgaagaacgtgccctactgtctacagacgtcgcaatggatcaagaagatttctttcttcatgaccctgcccttgccagaatttcctgcgctgtccacctcatacaacttcagcttgccttgcgccatggactggcagccagacgagcagggcctagcagcaggtcctgcagctgctcaaagactcacagtcgcccaacacagccactcagcgcatcgtgcaggataaactcaaacaactcaatcagtttcctgacttcaacaactacctgattttcgtcctgaccagactcaagtcagaagatgagccaacgcgctctctcagcggcctcatcctcaagaacaacgtgaaggcacactatcagagcttcccaccccctgtggcagacttcatcaaacaggagtgtctcaacaacattggcgatgcctcctcgctcataccggccaccactgtcacggcgcagtttc

SEQ ID NO: 16220 - DNA, 671 bp, Homo Sapiens
tcgatgtcctgccaacacatcagggcccatcctaagcacagaggatacaagctggatcatccatgtctggttcagccgtgtcaaaaaatgggtgggtgctcagaagctctggcaccaagggaagcaccagggttggatgccgacttcccagaaacttcaagcacctgaaacaaacaaataagaatgcacatcaacaaattagtaaagttagtcctttgaaaagtactaggaactggaatcagaaaacctgaactggaattggaaattctcaaccatatacttttgctaactctatgacttcagataagtcacccagttattctggaactcggttaattcatctaaaaaaactggttattataaagataaaagaactggttatttaaccaagagccatttcccccatctttcttcctgagagagccctgattttactcaggtatcaggcaggcagcaaagtgctcggaaaaggcaggtccagcccaagagctgaaccactattggtctaaacccatcatggcaatcccattcccattttccagtgactggtttgctggtgggcaagtaagccagttctagacaatggagcacgaaagtatgctggctggggggcttctcagggatgtttttgcaaatcaaaagagcaatgcatgaaaaggaatgacccttcc

SEQ ID NO: 16221 - DNA, 901 bp, Homo Sapiens
cagtcagctctatcctgaaagcattgtcccaattccttcttctaatgaagaaatacgcttagttgatgatgcgtttggcaaaatttgtcacatggtcagtgatggctcttgggtggttcgtgttcaggcagcaaaactgttgggctctatggagcaagtcagttctcatttcttggagcagacccttgacaagaagctgatgtcagatctgaggaggaaacgtactgcacatgagcgtgccaaggaactttacagttcgggggagttttccagtggcagaaagtggggagatgatgctcccaaggaagaagtagataccggggctgtgaacttgattgagtcaggagcttgtggagcttttgttcatgggttggaagatgagatgtatgaggttcgtattgctgctgtggaggccctctgcatgttggcccagtcttcaccctcttttgctgagaagtgccttgatttcctagttgacatgttcaacgatgaaattgaggaagtacgtctgcagtctatacataccatgagaaaaatctctaacaacatcaccctccgagaagatcagcttgacactgtcctggctgtgctagaggattcatccagagatattcgagaggctcttcatgaactcttatgctgtactaatgtttcaaccaaagaagggattcatcttgcattggtggagctgctgaaaaatttaaccaagtaccctactgatagggactccatatggaagtaatgacttttttgcccatttactcactgagtcccataatgtggtgcttgaagtttctgggaagtcggcatccaaccctggtgcttcccttggtgccagagcttctgagcacccagccattttttgacacagctgaaccagacatggatgatccagcctata

SEQ ID NO: 16222 - DNA, 568 bp, Homo Sapiens
  misc_feature (139)..(139): n is a, c, g, or t
gagtacagcctgtttgatccatttccaaccactatacttatgtcactttttttctttcaattgaaagagttcagctgggaaactgctctctgaaggaggcagggaatatgcaaaagataaagtgtgggccagagactcncaggagttcccctaaatccaaagtcctttttctcctgagaatagagactacatttcccagcctcccttgcagttaggtgtgaccatgtgaccaggatatatggccagtggatctcagcagaggtaacatgctccacttgcaggcttggtccataagaacctcccggtgtgacctccctttgtcttttcccagctgctgtctgattagagaggctcctgcaggacatggaggagggaggagtgagatcagctttgtaattgaacaaagtgtggatggggcaaaggctgcttctgcaactctataaaacaaaatataaaatggtgccgccacaattgacagcaggcagggcacaactgttttgatggaaatgctatacagctgatgcaaatatactgcattctcaaaaccctctgggcagaaatcgccaag

SEQ ID NO: 16223 - DNA, 612 bp, Homo Sapiens
tctagatgtatcccctgccttgacgtcctgccttggcgatttctgcccagagggttttgagaatgcagtatatttgcatcagctgtatagcatttccatcaaaacagttgtgccctgcctgctgtcaattgtggcggcaccatcttatattttgttttatagagttgcagaagcagcctttgccccatccacactttgttcaattacaaagctgatctcactcctcaccccaaaagactgttactactcctggagaggtttgtgaaggtcgacctgatccctccaggatggagaacggacagaacagaccttaagctggggaccagggtttcaaagtggagcctcccaatcagggccagattgacttcagattgtaagcacagggcatgttgatgtttggatgaggctcccagaagagacagagaaagagagaaaaggatatgatttattgtgaggattcatcccacatcagaaattctctaaccaacccctaatgccagacttcaggcttggcattagagtaacactccctgctgaaacagataaaccctgaatattgtctatttcctgctcatgtcaaaggctctgcacgttttcctggccctgcagact

SEQ ID NO: 16224 - DNA, 520 bp, Homo Sapiens
atattatcaaaggaatgatctaattggtccaccacagatttggatcagatagttattcctcataatccctcaagctgagactcaggaaactagtcttgcgtggggacatatgtcaaatgcattacaaaagcatcacttccttagtctaaataacgtcaccaccacccacccagttatgcaagcaaggaacttagacagtatcctttttacctccctcttcctcattgcccatatctaacccgttctatgttctgaaatagtacttctggattcattctgtcctgttgtatttttggatccatccatttttccctttgtcgaatcccaagctggtcagtcctccttaacattccaaggcgacaagcgtgttagtcggaacagcacgcacgtactgtcggaagtcaaccagctctggcattcgaaaataccggaacagctcatgggcttgcattgtccagtgatgatagttctctaagctgaattctgttgggagagaaaaatgtcacgttcgttcaggtaa

SEQ ID NO: 16225 - DNA, 571 bp, Homo Sapiens
gggactactgtttttttaaataaacaattatggcattttcagatatggatattatcaaaggaatgatctaattgtccaccacagatttggatcagatagttattcctcataatacctcaagctgagactcaggaaactagtcctgcgtggggacatatgtcaaatgcattacaaaagcatcacctccttagtctaaataacgtcaccaccacccacccagttatgcaagcaaggaacttagacagtatcctttttacctccctcttcctcattgcccatatctaacccgttctatgttctgaaatagtacttctggattcattctgtcctgttgtatttttggatccatccatttttctctttctcaactaccccacttgtcagtccaccttgacattccacagtggcctcctcactgttctctccatccttcattcatgctcctctccagtgttctctccacctacattgagagcaatgtttccagattaactagtatatcaagtgagtcctaggtttaaaaacctgcaatcactttcattgcttttagtataaatatcaaaatccttat

SEQ ID NO: 16226 - DNA, 502 bp, Homo Sapiens
  misc_feature (299)..(411): n is a, c, g, or t
agcggacatttgccttccaccctgagtagagcacagcaaggccctccccagatgagatccccaatcttgaactttccagccatccagaattgtgagccaaataaccctctttttctttatagatgacccagcttcaggtattcccttatagcggcacaaaacagactaagacaagatataaaatccacaagtccgtatcggcataaggaaatcatttagtaaagaaataacataaatgggagagaagaaacaaaatgtcctgtgcagaattccaggttatttatgcagctactccttannnnnnnnnnnnnnnnnnnnnnnnnnnnnnnnnnnnnnnnnnnnnnnnnnnnnnnnnnnnnnnnnnnnnnnnnnnnnnnnnnnnnnnnnnnnnnnnnnnnnnnnnnnnnnnnncaggcacttaaggtcatcatcaacagtgatcagtcgtgaagccttggaaggatgcgaagagaaggggtatcacctctatggttgtccgctg

SEQ ID NO: 16227 - DNA, 687 bp, Homo Sapiens
cctttcttaagaggccacttagtatccttatcggccaaacagctagcaaatagtaaccacagccgtatggaataagaaatatctagtaagaaataaaaaatgggagagaagaaacaaaatgtcctgtgcagaattccaggtaatttatgcagctactccttacttaaggagatggccatagctccccactccgtgttgagtggtgacttccttccagagagcacaggggtggggagcaactctgcagcagagaaactgacaggcacgaccccagccaggcacttaaggtcatcatcaacagtgatcagtcgtgaagccttggaaggatgggaagagaaggggtatcacctctatggttgtcctcccttaaacacataaccacagtctagtcgtgagaacaacgtcagacaaacccaaattgaggtgcagtctacaacacacctgatcagcactcctcaaaaccatcaaggtcacccaaaacacagaaggtctgagaaactgttgcagccaaaaggagcctcaggggacaggacacttaatgtgatgtggggtcctgagtgggatcttggagcaggagaacagtagatgcaagctgaggccacctgaatcaagttgtgctgaatgaggtgtgagctttagttaataacaggtcagtattggtttattcattgtacaaattcgctggtc

SEQ ID NO: 16228 - DNA, 1619 bp, Homo Sapiens
  misc_feature (196)..(276): n is a, c, g, or t
  misc_feature (1024)..(1078): n is a, c, g, or t
gatccttaggctactccacaaacagctcttcagagaggtcttacctgggctcatctaaaatagatccactccctcttttgctcccaaaccctttatatttctttatagcacttattaacatgtcccacagtacatttattacatcttctactttctagaatgcaaattccttgagaacaaagactttacgcttgannnnnnnnnnnnnnnnnnnnnnnnnnnnnnnnnnnnnnnnnnnnnnnnnnnnnnnnnnnnnnnnnnnnnnnnnnnnnnnnnttgtactgagcaaccatccaacgggggctgtaagcggcatgtaggctttgtttcttgggtaacctcccctccttaatccttctggcataggcagactcacagcaggtacccagtagaaggtaaggtggctgatcatttctccatagaaggtctccatggcacacagggtagaaagtgcattctgtgaattagaggcagcagagcatggcagctaatggaaactggctctgggaggtcaaattctggcttaaaaccaccagctgggcagccttgggaaaattatgacaattctcagggcattaatttttccttgtgcagaaagagaaggataatgacagctcctatttcccagggctggggaataaataagagaatgcccccataaagcaattagcaagcacagtgcctggcatggaggtgacgagcaacgagaagcagtcaaattaatcaacagccacatttgtgcctttgtctctttcaagtttacaacgtgctcttatatacatgctttagctgatctgggcctttgaacaacctgtcggtttttatcaccattttataggtaagaaaattgggtcagaggaaaaagtgctagctcacagaacacaactgaattttgctagaacttctggtgccctttctttcagaacacaagtgattattactgctgatatgaatcaaggtgatttggagctgggcatgcagtctcagctaccagagaggctgaggcagaaggatcgcttgagcnnnnnnnnnnnnnnnnnnnnnnnnnnnnnnnnnnnnnnnnnnnnnnnnnnnnnnnagacagagcaaggccctgtcttggggggaaaaaaaattaggcgggccccactggagccccagactctaaagtgtgtgcctagtgtaaggctgtggatggcaaatgaattccaaaatgaaatcagccagccagctacaggcttacaacctagtggtggcagggagtgtacgggctccctcatctgcagctccttctctggatgaggcttgagagcaagtctggacaggcaaaccatctctcagtccacccaggacttaaaacacttcattgttttcccaaaagggaaaaatagcaaagccctttctgtacagtttctcctgcttagagttgggtggcagctctatacagcaaatgctgactttgctgtttgagatctttgatacagtgtgacctctgagctctgaaccaggctgcccctgacaaaaaaagtgtttcctcccacaggtaaacaaggaagaaggcactgcaaggagctctgggcctggctcagtggaggctctgccacccctcgtgccgattcaccaccgagcctcgtacctga

SEQ ID NO: 16229 - DNA, 964 bp, Homo Sapiens
  misc_feature (840)..(898): n is a, c, g, or t
gggtgcatgatgtgagtctgctatgcagaaggattaaggaggggaggttacccaagaaacaaagcctacatgccgcttacagcccccgttggatggttgctcagtacaacagtcttgcattcagcaggtgttgttcatcacctactatgtgtcaggctctatgctaggtactggggatacaggagagaatcaagcgtaaagtctttgtactcaagggaattagcattctagaaagtagaagatgtaataaatgtactgtgggacatgttaataagtgctataaagaaatataaagggtttgggagcaaacaagagggagtggatctattatagatgagcccaggtaagacctctctgaagagctgtcatgaaggagggagggagacacattcctggcagagaaaacagcacatgcaaaggccccgagaatggagtgtgttcctgaagagcagaccaggaggaccagcatggctggagaggcaggcataggcagggaaccgagacagaaggtcagagcaggcagaactgacatactgcagcctggaaggacatgcgcaggaagcatataagtacggagagatacagggacgcctccctagggatacctgagcagaagaggggcactgagcatgatgccaccatcatgaaagacctaacctagctggaccagagctgaaggagagtggacgagaagcaaagggtgagacgccaacgacaccagacgaagagaaagacaaacagggtcgcaaggcagaacaaaggggatgatgagcacccataaacaaagatccagaagcccactaccacccaagagacacaggacaagcaatcgaaggacgnnnnnnnnnnnnnnnnnnnnnnnnnnnnnnnnnnnnnnnnnnnnnnnnnnnnnnnnnnntacgaccactgaaaacagacacaaggcataagccaacaaacgagaacagcaacagacagaacaacg

SEQ ID NO: 16230 - DNA, 812 bp, Homo Sapiens
tcaaatactagaattattatttaatgagaaaaaaatccacgtgtatacaacatttcaaaacagaagttaaatcattaaatagtactttttatttaaatgtttataaggcagatctatgagaatgatagaaaacatggtgtgtaatttgatagcaatattttggagattacagagttttagtaattaccaattacacagttaaaaagaagataatatattccaagcagatacaaaatatctaatgaaagatcaaggcaggaaaatgagtataactaattgacaatggaaaatcaattttaatgtgaattgcacattatcctttaaaagctttcaaaagaaagaattattgcagtctagttaattcagacagtgttaaatggtatcaggataaagaactgaagggcagaaagaattaattttcacttcatgtaacacacccagatttacaatggcttaaatgcaggaaaaagcagtggaagtagggaagtagtcaaggtctttctggtctctaatctgccttactctttgggtgtggctttgatcctctggagacagctgccagggctcctgttatatccacaatcccagcagcaagatgaagggatgaaaaaggacacatgctgccttcctttgaggagacttcatctcactggccaacactcagtcacatgtacacctaactgcaaggacagctgaggaatgtaatgggcagccgcttttaaagaagtagagtcaataggaagacaaattccagttccagctcagtctgggtatctgcaaagctgcaaaagatctttaaagacaatttcaag

SEQ ID NO: 16231 - DNA, 528 bp, Homo Sapiens
  misc_feature (517)..(517): n is a, c, g, or t
aaccctgcaggccgactgtagatagacgatcccccgctcgccgagcacatacacgtagcgtatagcaatatcacacagggaaaatgagtataactaattgacaatggaaaatcaattttaatgtgaattgcacattatcctttaaaagctttcaaaagaaagaattattgcagtctagttaattcagacagtgttaaatggtatcaggataaagaactgaagggcagaaagaattaattttcacttcatgtaacacacccagatttacaatggcttaaatgcaggaaaaagcagtggaagtagggaagtagtcaaggtctttctggtctctaatctgccttactctttgggtgtggctttgatcctctggagacagctgccagggctcctgttatatccacaatcccagcagcaagatgaagggatgaaaaaggacacatgctgccttcctttgaggagacttcatctcactggccaacactcagtcacatgtacacctaactgcaaggacagctgnagaaatgtatg

SEQ ID NO: 16232 - DNA, 735 bp, Homo Sapiens
gtccccggacttcccttcccccggtggttaatataatatgaaaagtgtgagagatataaaatactcaaacaaatacgaaaaaactttacaaccacagctaatgtaattttttccattgttcccagtcagctccaaacccattgtgtgcaaagcccatttttttccatgcatctaaatgatagatacaggctatgaaattctttattctatttgtagcagcttatgcaggtgcagccaaacacaaagcttcaggacaaattgtacaactttacaatgtgggatttaaatttaaaatatgaaacataaaaatctacacaaaactgataaaaatcaagcacagataccaggattgaaacttataataatccatgtgtgaaagggagtcttgtttcctttcaagtgctttattctgctatggaacagtcaaaatgaagatgtaaagctttgtggttagtttaaattatacactctgtagatactataccaattttaaaagttatacatagaccaacagatgtccctcagttcatctggattgataagacactccagctggattgctgagaacaaatcaggcaaatgtggaaagaaaatccacctgtgctatttgtttgcagagtttactgatggcacactgcactccaggtccatgatgctgctgctttcttcatcagagctatcattataggctggcacgcctctgaccactgcctgagcctgcgatgctatcaatcc

SEQ ID NO: 16233 - DNA, 523 bp, Homo Sapiens
actctagcaggatctcgagattggcgaccatttcaactgtgcagggtgattgtcatccctaacccccacatgtttaagggtcaaccggtactatatacacctatagctgctggtatactggggctatactatctaatacaaaactgattctgaaatttacaacttttaaaaagacaaatatatttccctggtgtttgataagcatcatgagaactattttgcctaaaaattaataagtattagttgcaacatggacatttatactaataaggagggcagaggcgaatatgtgagaaggtccaccacctcagagcttgaatcagcttcacgatgatggaaaggtaagctttatcactgatctcaacagcagactggtggcaaagagccagccataacaaagtactacaatcagaaaaataactctaaatcactgtagtctggatgtgggtgtatgttcatgtacacaactttagaaagttgcttgcagaacaaaaaggctacacaaaagcccactggctctcaa

SEQ ID NO: 16234 - DNA, 648 bp, Homo Sapiens
aagtgcaggggttgtcatcccgtaacccacatgtttaaaggtcaaccggtactatatacacctataggctgctggtatactggggctatactatctaatacaaaactgattctgaaatttacaacttttaaaaagacaaatatatttcccgtggctgtttgataagcatcatgagaactattttgcctaaaaattaataagtattagttgcaacatggacatttatactaataaggagggcagaggcgaatatgtgagaaggtccaccacctcagagcttgaatcagcttcacgatgatggaaaggtaagctttatcactgatctcaacagcagactggtggcaaagagccagccgtaacaaagtactacaatcagaaaaataactctagaccatctcatggaatctcaatctaaattatcatttgacctttcggcattatagcaaaataaggtctgtatacactggatactcccatgtcctatttctaaccattatgactatgtgtcccagaatggtgcacgccaccacatttaggaagaactggaaatgcaaatgattatctatgatgaagactcacatagtcctgaaaagcatcatttaattagaccttaaaatggtcgacaatccggttcatggttgatatggc

SEQ ID NO: 16235 - DNA, 863 bp, Homo Sapiens
gttccctctgccagccgtcgtactcggactctgaccacctcctgcccgctgcctctcactttatgactttgataagcaactcgctcttggatcagttcctattaataatgttccaaagattccaatatactccagaggtcctcaaccagggacagttataccccccaggggacatttggggatgtccagagacattaatggttatcacaattaggaaggtgctagtgtcatctaggggtcgagaccagggatactgctaaataacttgcaacacacagaacagctgcctgctcccaaaccccagacaatgaattatccagtccaaaatgtcaccagtgcataggaaaagaaaccctgtagcaacccacaaaatgaaaattttttgactttccaaaagttgtactttgcttagtcatgctctagaattccacaggaataaccacaatagccctacccacttttattcacacacaccacactgtcacttctttacacacctgttcctcctagaccacgaagtcatctctaaaccttgtgggagaggtatacataaaataccagaactccttatggccaagcataatgtcttacttgcatcccagcacatgccattagccactgttccttcaactccaatttctcagtagctcaactttgatgaagggcagcggacacataggcagcacgtcaagacttcccttatccaactgttcaaaacagagaaaaatggttccaatagtaagaagtgtcctgtttcattcagaaacgtcatgtgggaccatctgcaacttgcttagttagcattagcggcctcctgtaacaaggtgacaggagcacttcaggtcagcatcagcctgtacgag

SEQ ID NO: 16236 - DNA, 483 bp, Homo Sapiens
acgcctatttacggtgttctgaatgaaacaggacactaattactattggaaccatttttctctgttttgaacagatggataagggaagtcttgacgtgctgcctatgtgtccgctgcccttcatcaaagttgagctactgagaaatgggagttgaaggaacagtggctaatggcatgtgctgggatgcaagtaagacattatgcttgggcataaggagttctggtattttatgtatacctcaccccagagaaaatgacttcattgaaattgaactgaagagacaagaactgagttaccaaaacctactaaactgtgagttgctgtgaactggggattaaaccagaacgagtggagaagatcagaaagctaccaaacacactgctcagaaaggacaaagacattcgaagactgcgggactttcaggaagtggcactcattttaatacaaaatggcagctccagattgacagaacaccgtcgaag

SEQ ID NO: 16237 - DNA, 554 bp, Homo Sapiens
tagcggatcccttttgattattgctaggcagcgggcacgtggtcacaacatgctgcttaacaacaccccaaaagcatctgtcaatgccacagacagcaccgaacccacagcttcctgcagcacatcgacagcaacaacgcccaaccacagaacaggttggcaacacacacacagcacgcgacatagcacaaggcaatcatcaggcatcacggaacacaacaacacagggcaacagaacacccagcaaatacgatcacagtacatgccaacacacgacacgcagtgacctaatagccagcccggaaacatcccaagacacggtaaccacacaccaacacgtaatgccagcataccgctacataatcctgccacacaacacacgctagtacacagcaacccagcagacagcacagaacacacgatgtggcatcacaacacatacagtcaaggcagcagaacaaaggacacactatgcagcaacgcaacaacgttggcagccagcagatgacacaatgcaaaatcacatgcagtgcctgacaactctacaatctcac

SEQ ID NO: 16238 - DNA, 511 bp, Homo Sapiens
cacgccgatgggtgaagaatggaatgggtcaggaagacgcgatgtgcagcacaccagacctcatgcagcaacaccattaatttgcacaacatccgactcaaccatggcaacgtgtcttacggtgcaaacacgggcacatggtcaaaacatgctgcttaacaacaccccaaaagcatctgtcaatgccacagacagcaccgaacccacagcttcctgcagcacatcgacagcaacaacgcccaaccacagaacaggttggcaacacacacacagcacgcgacatagcacaaggcaatcatcaggcatcacggaacacaacaacacagggcaacagaacacccagcaaatacgatcacagtacatgccaacacacgacacgcagtgacctaatagccagcccggaaacatcccaagacacggtaaccacacaccaacacgtaatgccagcataccgctacataatcctgccacacaacacacgctagtacacagcgacccagaccagccttga

SEQ ID NO: 16239 - DNA, 683 bp, Homo Sapiens
ctggatatttctgggaaggtgtggggatggagaggatggtgcatttccagtgcttccttacctgtcaataacaatggtggccacctgggtcccagcactggctggtggagagatttttttcattatggagctagtaaagggtccctacgttttacattgattaatgaattatcacccagacatgtgcagatgaaatgtcaatataagaaaaatcaaggtatttgggaaacatgggcataatcaggtagttttgccaaaattcctcttccttggtctacataaagaagacatgggtctgtcatagaatggggacattagactgaaaactgggacaacccccttccttattttatagagactaggagttaaggggcctgcctaagattgcagtgataaagaactgaaccctaaatcagctcccactaatgaaaccctgctttccttgtatcttttaaactcagttctgcatccaacttgagaagaaaaaaagcttctttccatatcaagtaccatatgagttcatttaaactgcaccttgcagaaatgcattgccagaaagcaccagtagcctcctatctgcaagcagagtagtgctctgctctggggaggggtcattggaaaccataatgcagagtgggccccctactccaatcccgcccacgtacggggactcctctagactc

SEQ ID NO: 16240 - DNA, 604 bp, Homo Sapiens
gtcggttcatcagctcccactattgaaacctgctctcctgtatctttactcagttctgcatccaacttgagaagaaaaaaagcttctttccatatcaagtaccatatgagttcatttaaactgcaccttgcagaaatgcattgccagaaagcaccagtagcctcctatctgcaagcagagtagtgctctgctctggggaggggtcattggaaaccataatgcagagtgggccccctactccatttcccagcaaaaggctccagctggagggatgggttgtggggcaacctggttcctgctaactgccagattgaatgtgtgggctagaatgcctgcacatttagttaaactgggctcagcatgcttgtcctcaaaatgtccatcctggtcacagcacacaagatggctattggtctgcttttaccctaccctgtactatacatgaaaattccagttattaacacactcaaactggtggagcttgttcaccctaggaaggggattgtatatatggcaggcttccctgtgccgatgtaaggctacatttggaacattgacttcttggactcttaagtgcatactgtgcatgaagtaaaagggcaac

SEQ ID NO: 16241 - DNA, 581 bp, Homo Sapiens
  misc_feature (496)..(509): n is a, c, g, or t
tcgtcctgaagctgaaggtcaaataattactgttttatattgggacagtacatttcagatttcaaccaaaagacaaaaatgcagtttaactcaaaggcacaacaattgaaacacagaaaataatggcatctcttggatgccttatttctaaattaaacaaagaagtacacaaattttgttcccttccctcccccagtgcaagcccacaagcttttttcaaagtcttgagcttttgatgctgtcccgcattgtggacttgtgaggcgcttggatgtagcaatgaaacaaaatgcttgagaggtctagtgaatggcattcaaaagggacctcaaagtgcagacatatctttttcaaatatgttacaggctgaactggctctttgaacactatcactctgcttaaatccaggaagcaggctttaaaaatgcaaaaggcatacaagttgtatttcagtgcaaatctttagctggttattggaaaagattccaaaaatttnnnnnnnnnnnnnnttcctttgtgtcacctgcccctccccccacccaaagccaaaatgaagaaaagacagaacaaaacaaaaacag

SEQ ID NO: 16242 - DNA, 516 bp, Homo Sapiens
  misc_feature (220)..(242): n is a, c, g, or t
gatgtagccatggaacaaaatgcttgagaggtctagtgaatggcaatcaaaagggacctccaagtgcagacatatctttttcaaatatgttacaggctgaactggctctttggacactatcactctgcttgaatccaggaagcaggctttaaaaaagcaaaaggcatacaaagttgtatttcagtgcaaatctttagctggttattgggaaagattcccnnnnnnnnnnnnnnnnnnnnnnntcctttgtgtcacctgcccctccccccacccaaagccaaaatgaagaaaagacagaacaaaacaaaaacagaagaattacaggtgactttggaatcatttaggaatccactacttccaatcagaatgtttagaaaaatacattaaagaatcattttttaaaaaacacaaaagtaatcttgctttctgagactgctcttcgggtatagaatgagcttccgtgtggagtgcgtttgaactttgaccttcacctcagggatcctctagaatcactat

SEQ ID NO: 16243 - DNA, 510 bp, Homo Sapiens
caacaggttgatgcagatagggggctgtactagcctagtacggaaaggaccaacgatgctcatggctgccctcaggaattccaaatgaccgaaggaagcaaagcttcagggcgtatgggtggtgtctcccacgtattaagggaggtggtcggatggttccgcagcttcatttcgtccagtcatatccagttatctaaagttgttgtcaagatgctgcattaaatcaggcaggtctacaaaggcatcccaagcatcaaacatgtctgtgatgaagtaatcaatgaaagaggatttgggattgggggatgctgcaggtatttctgtcaaacactggcaggaagtccatcaataccctttgcaggggcactccagaccttgtgttttaccagaaactgaggcaaaccgtggtcctcatgtgcctttctgaagagctcctgcagcaggcccaggctacagtggccaagtctcacttgacagtaatggcattggatggtggctgcagaaggttac

SEQ ID NO: 16244 - DNA, 998 bp, Homo Sapiens
  misc_feature (679)..(747): n is a, c, g, or t
  misc_feature (944)..(953): n is a, c, g, or t
gggtccggaattcccgggatcagacatgtttgatgcttgggatgcctttgtagacctgcctgatttaatgcagcatcttgacaacaactttaaatactggaaaggactggacgaaatgaagctgcggaacctccgaccacctcctgaatagtgggagacaccacccagagccctgaagctttgttccttcggtcatttggaattcctgaggtcctttcagtactaggcagagctccttggtcctttcagtactaggcagaacagcccccgatctgcatagcctgtgaaagcccacggggacatcagtaaccttctgcagccaccatccaatgccattactgtcaagtgagacttggccactgtagcctgggcctgctgcaggagctcttcagaaaggcacatgaggaccacggtttgcctcagtttctggtaaaacacaaggtctggagtgcccctgcaaagggtattgatggacttcctgccagtgacagagcatgtctattgcaaacaattctctcagttacgttcagcacttaagaacggctaatggcaataggatctttagcaactttttcacatcatagaaggtgcaatcgctcacttgggaacactactgagagtgacttctcttttaaaattgagtagcagatgaaaaattaaaatttgaacttgattattnnnnnnnnnnnnnnnnnnnnnnnnnnnnnnnnnnnnnnnnnnnnnnnnnnnnnnnnnnnnnnnnnnnnnaaaggggcgggccgcttcaaaaaattcccttgagggggcccaaaggtttaccggtacccagctttcttggaaaaagaggggcccctaaaggggggccgtattttaacttagggccctgcgccgcggtttttacaacgctgtgacgggggaaaaccggctaacctgggaatctttggggaaaggaaccctaacttctnnnnnnnnnnacataagtgggacaaactcccccaccaaaatttaaggtccagggg

SEQ ID NO: 16245 - DNA, 330 bp, Homo Sapiens
  misc_feature (101)..(117): n is a, c, g, or t
tcccccgtgacacgctgtaatgcacggtatgagggtgcactgagctcgagatcgcgcttctgtactcccccccgggccacacaaatgagactccctctccnnnnnnnnnnnnnnnnnggaggaggaggacattccttgacagcaacagtgggtgtactaagacccacagatgtgaaaaggccttgtgtgcacagggagagatgagaggtctggaaccatccggagtttaaattagccggggcagaacgggagaaacagaaactgggcaaggagattgttagattgcagaaagacccttcgaatggtgagaaaggagcatcagcctgtcta

SEQ ID NO: 16246 - DNA, 611 bp, Homo Sapiens
aagaggatccacactcgagccgagcatgtggaaaaagaaggaggtaaaaatacatacaggcaaagcaaaactggaaaatgtgttagacgacgtccagaaaaccctccaggagaaggaactaacctgtcagattttggagcaaaagataaaagagctggattcctgcttagtaagacagaaagaagtacatagagttgaaatggaagagttgacctcaaaatatgaaaaattacaggctttacaacagatggatggaagaaataaacccacagaacttttggaagaaaacactgaagaaaagtccaaatcacatttggtccaacccaaattgcttagtaacatggaagcccagcacaatgatctggagtttaaattagccggggcagaacgggagaaacagaaactgggcaaggagattgttagattgcagaaagaccttcgaatgttgagaaaggagcatcagcaagaattggaaatactaaagaaagaatatgatcacagaaaggagaagagaaaatcaaacaggagcaggaagactgctagcaacgaagcacaattccacactgaaacaactgaagagagagtaaaaacacagactggcacaaaaggaa

SEQ ID NO: 16247 - DNA, 656 bp, Homo Sapiens
ggaagcctgcaaccaggacgctctccaggaggcgggcacattcaggcacaccctctggaagcgggtccaaggtgctgtcacccctctgctggcgagcatgatatcattcatcgacagagacggcaacctagagttactgaccaggccagatactccgccctgggcaagagatctttggatgtttattttcagtgacacgatgcttctgaacattcctcttgtgatgaataatgaaagacataaaggtgagatggcctacatcgtggtgcagaaccacatgaacctttccgagaacgcttccaacaacgtccctttcagctggaaaatcaaggactatctggaggagctgtgggtccaggctcagtacatcacagacgcagaaggactgcccaagaagttcgtggacatctttcagcagactcctctgggcaggtttcttgcccagctccatggagagccgcagcaggaacttcttcagtgttacttgaaggatttcattctcttgaccatgcgtgtgtcaacggaggaggaattaaagtttctgcagatggctctgtggtcctgcactaggaaactgaaagcggcgtcagaagcgcccgaggaagagtttccttaccgtgggtgcacctgccaaccatcgtcggaccggcccgatc

SEQ ID NO: 16248 - DNA, 724 bp, Homo Sapiens
tgatctagaggatcccatgcgcgagcttccatcaacgtccctttcagctggaaaatcaaggactatctggaggagctgtgggtccaggctcagtacatcacagacgcagaaggactgcccaagaagttcgtggacatctttcagcagactcctctgggcaggtttcttgcccagctccatggagagccgcagcaggaacttcttcagtgttacttgaaggatttcattctcttgaccatgcgtgtgtcaacggaggaggaattaaagtttctgcagatggctctgtggtcctgcactaggaaactgaaagcggcgtcagaagcgcccgaggaagaggtttccttaccgtgggtgcaccttgcctaccagcgtttcagaagccgtctgcagaacttttccagaatcctgaccatctaccctcaggttctccacagcttgatggaagcccgttggaaccatgagctggctggatgtgagatgaccctggacgcatttgccgcaatggcctgcacggagatgctgacaagaaacaccctgaagcccagtccccaggcgtggctacagttggtgaagaatctttccatgccgctggagctcatctgctccgatgagcacatgcaaggcagcgggagcctggcccaggctgtcatcagggaagtcagagcccagtggagtcggattttctccaccgcactcttcgtggagcacgtgctcctaggaaccg

SEQ ID NO: 16249 - DNA, 1014 bp, Homo Sapiens
aaagtcttgattgacgttcttaaagaactgaatccaagtttgaatttcaaggaagtaacttatgaactggaccatcctggatttcaaatccgtgacagtaaaggacttcataatgtggtttatggcattcagaggggtatgggtatggaagtgtacccagtagacctcatatatagaccttggaaacatgctgaaggccagctctccttcattcaacattcccttataaatccagagatcttctgttttgctgactatccctgtcatactgttgccactgatattctgaaagcaccaccagaggatgacaatcgagaaattgccacatggaagagcttggatttgattgaatctctgctgaggcttgcagaggttgggcagtatgagcaagtcaaacagctcttcagcttccctatcaaacactgtccagacatgctggtattggccttactacaaattaacacctcttggcataccttgcgccatgaacttatctccactctgatgccaattttccttggaaaccatcctaactcagctattattttgcactatgcatggcatgggcagggacagtctccctcaattcgccaacttatcatgcatgcaatggcagaatggtacatgagaggggagcagtatgatcaggccaaattgtctcgaatacttgatgtggcccaggacttgaaggccttgtcaatgctgctaaatggtactccatttgcctttgttattgaccttgctgcacttgcttcacgtcgtgaatacctcaaacttgataagtggctcacagataaaattcgagagcatggggagccttttatccaggcgtgtatgacttttttaaagagacggtgtccttctattttgggcggacctgccccagaaaaagaccagcccaaaagtgctcaacttcctccagaaactttggcgacaatgttggcctgtctgcaagcattaatgcaggagtgtttttcacggagctaacagaaaacatcttccactgtgtaagtc

SEQ ID NO: 16250 - DNA, 563 bp, Homo Sapiens
tacccagtaatatcttactgtttctcatggtgtatacttcattctctatccccatggttttcatgggctgaggatagagttagatcttcaggctcagttaaagtcaaccagtttcaacctcgtggggcaaaaataattcttaaagagagtgctgtggacttcaaacttctaatattaaaacatgacaccaacttggttttgtgcttacaagctggtatcacttattttgaaaattaatctgtatacttggattttcattgataaagcatgtttcttcctttctcgttaggaagagcttggatttgattgaatctctgctgaggcttgcagaggttgggcagtatgagcaagtcaaacagctcttcagcttccctatcaaacactgtccagacatgctggtattggccttactacaaattaacacctctctggcataccttgcgccatgaacttatctccactctgatgccaattttccttggaaccatcctaactcagctattattttgcactatgcatggcatgggcacgtaagatgtgacacgtggcatctctcaatacgg

SEQ ID NO: 16251 - DNA, 850 bp, Homo Sapiens
  misc_feature (59)..(59): n is a, c, g, or t
  misc_feature (708)..(708): n is a, c, g, or t
gacggtgttctgatgaatttcctcacacacatcacttggtgctctgtgcctgcatttcntgtgagatgttcctggaggtgggctgtctaggtcagagggggatctgtgcttaatttgcatcctgtgcaaaattccatccagtcatccagctccccaagggctcacatggtactgtcctctgtagacatcatcttctgcagatgatggcacgaccgcctctctttcttttactcacaccagtctgcacctcggtgtcctggggtgggggggcccagcccctacccacttgtccccgcagaccctgctaacggtccccccagcccctgctaacagggactctggcttccgagctctggcagactgcctcactctggagaagtttgctttctcaaacattcctgacaatgttactgcagatctcgaggcctgcctgtgccttcttcagtttcctcaaaagtaaaatggggataatgtgatactactgtctgcatcctaggagctgccatgagggttcagtgagatcactgttgacagcacgttcacggcgccggccttgtgcgcagtcagcacgtgtggggcagggctgttgctgatacgtggttgactgtcattgctagactgtggctttaccgggggcattgtcttagtgccgagcccagagccacccctagtacctgctgtgtttatagagtgattgagtggcaggtncagagactggggcaatggcagcaagaaacagaggaaagaagtggggcttctcagacataacatacaatctaattacttttatattaaagccacttccaggcaaaactagcatttgatgatagataccaggagatcctctaga

SEQ ID NO: 16252 - DNA, 491 bp, Homo Sapiens
tattcataatagcacaaaattgtaaacagtgaaatttccatccataggaaaatggatagacaaactacaatatagtcagtggaatactgttcatttaaaaaaggactgctgatacatgcaacaacctgtatgaatctcaaaaacattaagttgagcaaaacaaaccaaacataacatactatctaattacttttatattaaagccacttccaggcaaaactaatatttgatgatagataccagaacagtggctgcttagagtgagggcagggaattcaaattgaatggaaaaggggcctgaggaaattttctggggtgattgaaatgttttgtattttgatctggatgatggttatgtagctgcatatatttgtcaacattcctcatgctgtatgtttagatttgtgattttactatatgtaaattaattccttaataaaatactattataaaataagctgtaaattaaatggaattaacttcaagtttaa

SEQ ID NO: 16253 - DNA, 1080 bp, Homo Sapiens
ggggggacggcgaacgaaaataagacgctggtaccgggtccggaattcccgggatctcccaggtggcagctgcctccccaagacaggctcactcaccatgaccaagctgagcgcccaagtcaaaggctctctcaacatcaccaccccggggctgcagatatggaggatcgaggccatgcagatggtgcctgttccttccagcacctttggaagcttcttcgatggtgactgctacatcatcctggctatccacaagacagccagcagcctgtcctatgacatccactactggattggccaggactcatccctggatgagcagggggcagctgccatctacaccacacagatggatgacttcctgaagggccgggctgtgcagcaccgcgaggtccagggcaacgagagcgaggccttccgaggctacttcaagcaaggccttgtgatccggaaagggggcgtggcttctggcatgaagcacgtggagaccaactcctatgacgtccagaggctgctgcatgtcaagggcaagaggaacgtggtagctggagaggtagagatgtcctggaagagtttcaaccgaggggatgttttcctcctggaccttgggaagcttatcatccagtggaatggaccggaaagcacccgtatggagagactcaagggcatgactctggccaaggagatccgagaccaggagcggggagggcgcaccctatgtacgcgtggtggaccgagagaaatgaattggcatccccccaagctgatggaggtgaataaaccacgatgctgggccagcgccagggagcctgaaaggcgggccgtgccccgaaaaccggggggtggaagcccgggcaccttcaaagggcttgccacttccaaaactggtaaccccaatgggggtcctggaacctccccaaaggggggaaaaattcttggttgggcttgaaagggaaaaatcccccccacatacgggggcccacttgtaaccccaaagggaaacctgggcttcagatccccccgaagggaaacctgggttaaacaatcccctggggaaacccaggggaggggggccccctg

SEQ ID NO: 16254 - DNA, 987 bp, Homo Sapiens
  misc_feature (725)..(787): n is a, c, g, or t
tatccagaccacccagggggcagctgcctccccaagaacaggctcactcaccatgaccaagctgagcgcccaagtcaaaggctctctcaacatcaccaccccggggctgcagatatggaggatcgaggccatgcagatggtgcctgttccttccagcacctttggaagcttcttcgatggtgactgctacatcatcctggctatccacaagacagccagcagcctgtcctatgacatccactactggattggccaggactcatccctggatgagcagggggcagctgccatctacaccacacagatggatgacttcctgaagggccgggctgtgcagcaccgcgaggtccagggcaacgagagcgaggccttccgaggctacttcaagcaaggccttgtgatccggaaagggggcgtggcttctggcatgaagcacgtggagaccaactcctatgacgtccagaggctgctgcatgtcaagggcaagaggaacgtggtagctggagaggtagagatgtcctggaagagtttcaaccgaggggatgttttcctcctggaccttgggaagcttatcatccagtggaatggaccggaaagcacccgtatggagagactcaggggcatgactctggccaaggagatccgagaccaggaagcggggagggcgcacctatgtaggcgtggtggacggagagaatgaacttggcatccccgaagctgatggnnnnnnnnnnnnnnnnnnnnnnnnnnnnnnnnnnnnnnnnnnnnnnnnnnnnnnnnnnnnnnngtggagccggcactcaaggctgcactcaaactgtaccatgtgtctgactcccaggggaatctggggggggaggaagtcgccccaccgggcactgacccaggaactggctccttcacaaggaactggtaactcttgaaccaagggggggccttgaaaaacttccctgtgggaaaaaggaaaaaaagccccattgacccggg

SEQ ID NO: 16255 - DNA, 1809 bp, Homo Sapiens
  misc_feature (814)..(822): n is a, c, g, or t
gacctcctacccttcttgggtcattctctgtactgatgcgttagtcttataatacttcgcaccaacctcgaggaatcttctaggcttctctagcatcccctaagactgtggctatttcacgtctctctccctgcctgccttccttttcccttcctttcccctcctcatgttttctggttgtgcccatctgtaccagctcctttccatccaccttcgtatgcacccagatttttctgttcccatctgtcctatttgttattcatcccgctgctcaacttctccagtatgttgcttcccttaagttgccattcattctcttcatgactttactaactcacttcggtctctgtctgtcaactaaacttttctaaaggttaccagttatccaatcaccaaatccatggctttttctcaaagcttagtcttgtccttggcagaactggacactattgaccatccaaatggaaattcccctttcttggtgtctctgacaaatggtcctttgccttatcttgtgctggtggtgaagaggccctcaaagccaggcctctctattcctttgactgtctcctcagccattaacccattcttcatcctcggagtgagtgattcccaagtctttgtcttggcttaatccctaaagaacccagttctgctggtatcgaatagttcagcttggttgtcattgaaaggaatttctctcttctgtccatcagcctgtccctcccaactgtctaggacagtcttcggtcacctaaattcctaactgcagacttttgccctttttctctctcatcaacaaagtcccatccannnnnnnnnaataaaagatcctcagctacagtctttccattttccttgcttctcttattgcacacccccagcccattttgcttctctcttggatttgttttcagatccacatttattgggtttcctgtccagcttcttggaaaggagctcactcttggaaagactgatctttccaaaatattttccctggtctgaagctttggtgtgaacttctcaaggcttagagaatccagttacagaccttttggggttcaggatgctatagattgacaccctcctgcctgtttttctctgcatcccaacctggccaaggcccctcctgtggggtgcccatctgtgcctttattccggctgtgcctcgactttccagcttcccatgtttctttgggttaggtttctctcccttccttcttgctccttccccaatccgcctgtgtcgtcagggcccagtttggttcctcatacaccttcctcactaccccaccccacatggttgactctttccctcagctccaccagctcttcatcatgccactcatttcagaacttgagcaaaacagggcagtcaggatctgatgtctttctggtctccctaagaaaactaagctcttgagggacagcccttggcaatgctttcctatctgctgagcatggtgaccttccttaggacttccagagttcagttccttctggcagagaggttttctttctccatgccatatggatgtgactcaaatgaggggtcccacagcttttcctggctaccacttgctgtgaccttatacatgttggggtttgctcttaaagaggagagcaggaagaaaggttggtttcagaaaccaagagggtcggcagtggacgcgtacattttgtcacggagtccacagagctgagcttttgagcagactctgagaagtatcattgcttgtgttgaaagaatacaacaggatttaagtttctctttagaaattgcactgaagaaaggccgggcgcggt

SEQ ID NO: 16256 - DNA, 586 bp, Homo Sapiens
  misc_feature (235)..(235): n is a, c, g, or t
caacgatggcctcagctacagtcttccattttccttgcttctcttatgcacacccccagcccatttgcttctctcttggatttgttttttcagatccacatttattgggtttcctgtccagcttcttggaaaggagctcaatcttggaaagactgatctttccaaaatattttccctggtctgaagctttggtctgaacttctcaaggcttagagaatccagttacagacctttnggggttcaggatgctatagattgacaccctcctgcctgtttttctctgcatcccaacctggccaaggcccctcctgtggggtgcccatctgtgccattattccggctgtgccctcgactttccagcttcccatgtttctttggttaggtttctctcccttccttctttctccttccccaatccatgaacatggaatatctttctatttatttgtatcatctgttttctccttagtgttttatagttttcagcatactggtctttagcttccttggttgaatttgttcctaagtatttattttcggtgtggctatggtgaatgggattatttcttgatttcttttacgatag

SEQ ID NO: 16257 - DNA, 1310 bp, Homo Sapiens
gctgcccgaggacccagcgcgacgcttccatcaaatatacagtccatcaccttggctcagtgcatgtcaccaaaaattctccacggatttcatagtatggacctcggtggtgtggctggcccaggactatccatgcagggaggcctgcacctctgacagtcggctgcagctgggggtgcccatcttctgtgctctgtggtacatatctgtgtcgccaaagtagcgtgcccggtacagcaagccttccttctgctgcttctccttccagcagttgttccggaggttggcgatataatcatcttccacattccgctcgactgttttgaggctggagcctgtgtactcttcggagaaagtgtctcccacatagtagacgacacccaggtggtcagtgactcgcctgtggatgtggcccacggacggtcttggactcagactgtagggtggactggagaccatgagctggctgagagctgacacgagaatcaggatgaggataggcatcagctgcacaaacacccctagcccgccatcaccctggttgtccctgcggtcctgcctttgctggtaggtatagcgcatgcggccgttgctgtagacgtggacgttactagaagggaagccgccgccaaagaacatgttgaagaggtcttcaggggagatgtcggcctcaaagccacggtggaaatccccatgcccatggccgtgccgggccgcctggctcttgtcatcgccgaactggtcatactgcttcctcttctccgggttgctgagtaccgcatattgctgtgccaatggctttgaaggcttcagtggcaccaggtgcgtggttcttgtctgggtggaatttgagggccagtctgcggtaggccttcttcaggtcctcatccgaggcccctctgctcacccccaggatctcatagtaatctttacattgcttgacccttttcacagctgcaacctgttctgcagtgtagcctttggtgctctctcctccagcttcaccgttggccgagggggcatcggtcccacctgctttcctgtgggtggcatgggttgtgtctgtgggtgggggttggtcaccggcagtctgtggtttctggttgagggactcaatcagggcgcgaactcgcggcgtcggatacagccgctgtgccttctccaggaagcggagcgcccggtcgggctggttgctctggatggccttgagggcgatgctgatacagcgctcagcttcatccttgttggattccacctcgtgccgaattcgccacccaggcctcgctaccataggaccggttatagttacc

SEQ ID NO: 16258 - DNA, 925 bp, Homo Sapiens
cacgttaactataacgggcctttggtagcgaggcctgggtggcgaattcggcacgagggtcagctctcagccagctcatggtctccagtccaccctacagtctgagtccaagaccgtccgtgggccacatccacaggcgagtcactgaccacctgggtgtcgtctactatgtgggagacactttttccgaagagtactatcaggctccagcctcaaaacagtcgagcggaatgtggatagtatgattatatcgccaacctccggaactaactgctggaaggagaagcagcagaaggaaggcttgctgtaccgggcacgctactttggcgacactagatatgtaccacagagcacagaagatgggcacccccagctgcagccgactgtcagaggtgcaggcctccctgcatggatagtcctgggccagccacaccaccgaggtccaaactatgaaatccctggagaatttttggtgacatgcactgagccaaggtgatggactgtatatttgaggaaagacaaacaaagaaacaaaattaaacatggaattggaggccgaacgctgcacagctgccctctctctcacccagtaaatgcagaaagctcttaggacagacagaaaacctgccatggggctgcttccctccctcgcagggctggcggaggctccgcatcgcctctctcctaggatacagaaaccatggcaacgaaagtagaatgtaaaactcgcagcagatatcagtgggaagggctgggggagggggcacccagctgcctttcctccctcacaggagccaccaccagccacctctcaggagaagccagaggccctggccaaagataggaggaagaaagagaactctccatagaatgtaatttatagatgcgcgtatatgtatatatatctatttatatgtaaataggc

SEQ ID NO: 16259 - DNA, 665 bp, Homo Sapiens
ctagaggatcccttccttatggcaggccaagcaggagcaagccgcccaccaggccagcctgcggaaggagcagctgcgagtggacgccctggaaaggacgctggagcagaagaataaagaaatagaagaactcaccaagatttgtgacgaactgattgccaaaatggggaaaagctaactctgaaccgaatgttttggacttaactgttgagtgcaatatgaccgtcggcacactgctgttcctccagttccatggacaggttctgttttcactttttcgtatgcactactgtatttcctttctaaataaaattgatttgattgtatgcagtactaaggagactatcagaatttcttgctattggtttgcattttcctagtataattcatagcaagttgacctcagagttcctgtatcagggagattgtctgattctctaataaaagacacattgctgaccttggccttgccctttgtacacaagttcccagggtgagcagcttttggatttaatatgaacatgtacagcgtgcatagggactcttgccttaaggagtgtaaacttgatctgcatttgctgatttgtttttaaaaaaacaagaaatgcatgtttcaaataaaattctctattgtaaataaaattttttctttggatcttgaaaaa

SEQ ID NO: 16260 - DNA, 826 bp, Homo Sapiens
  misc_feature (274)..(274): n is a, c, g, or t
  misc_feature (302)..(302): n is a, c, g, or t
  misc_feature (386)..(386): n is a, c, g, or t
tggactctgccctccagatcgccagagcagagatcataaccaaggagagagaggtctcagaatggaaagataaatatgaagaaagcaggcgggaagtgatggaaatgaggaaaatagtggccgagtatgagaagaccatcgctcagatgatagaggacgaacagagagagaagtcagtctcccaccagacggtgcagcagctggttctggagaaggagcaagccctggccgacctgaactccgtggagaaagtctctggccgacctcttcaganagatatgagaagatgaaggaggtcctanaaggcttccgcaagaatggagaggtgttgaagagatgtgcgcaggagtacctgtcccgggtgaagaaggaggagcagaggtacnaggccctgaaggtgcacgcggaggagaaactggacagggccaatgctgagattgctcaggttcgaggcaaggcccagcaggagcaagccgcccaccaggccagcctgcggaaggagcagctgcgagtggacgccctggaaaggacgctggagcagaagaataaagaaatagaagaactcaccaagactctgtgacgaactgattgccaaaatggggaaaagctaactctgaaccgaatgttttggacttaactgttgcgtgcaatatgaccgtcggcacactgctgttcctccagttccatggacaggttctgttttcactttttcgtatgcactcaccgtatttcctttctaaataaaattgatttgattgtatgcagtactaaggagactatcagaatttcttgctattgttgcatttcctagtgctgttggagggtc

SEQ ID NO: 16261 - DNA, 293 bp, Homo Sapiens
gatctagcaggatctccgtgatgttatcgcccaacacagagctgctgcccattgagctggacaccctggtggggaaaggtcgctttgctgaggtctataaggccaagctgaagcagaacacttcagagcagtttgagacagtggcagtcaagatctttccctatgaggagtatgcctcttggaagacagagaaggacatcttctcagacatcaatctgaagcatgagaacatactccagttcctgacggctgaggagcggaagacggtgttggggataacataggaccgacta

SEQ ID NO: 16262 - DNA, 663 bp, Homo Sapiens
tggaaggcgggatcagccagtatgtttccccaagctccgtcttccgctcctcagccgtcaggaacggagtatgttctcatgcttcagatggatgtctgagaagatgtccttctctgtcttccaagaggcatactcctcatagggaaagatcttgactgccactgtctcaaactgctctgaagtgttctgcttcagctgggccttatagacctcagcaaagcgacctttccccaccagggtgtccagctcaatgggcagcagctctgtgtagtggttgatgttgttggcacacgtggagctgatgtcagagcggtcatcttccaggatgatggcacagtgctcgctgaactccatgagcttccgcgtcttgccggtttcccaggttgaactcagcttctgctgccggttaacgcggtagcagtagaagatgatgatgacagatatggcaactcccagtggtggcaggagcctgatgccggtcaacttgaaatatgactagcaacaagtcaggattgctggtgttatattctctaaagcctggggtcttcatcacatgagcagattcccagccagtgttttgacaagtgctcctttgcaatcgattgtttgaacctatatgtctgattttacatctaccttctgagaagatgatgttgtcattgc

SEQ ID NO: 16263 - DNA, 870 bp, Homo Sapiens
gtgaagcaaaggatatgcatggggtggaaggacggcttcgaacctgttactcatatgccttgagaacaaatagattgttacagccttgggctgctgcgtaatcacggttcctcgaggctcttcctgagcacatgcccaagcatctgcctcgtggaggagactgactccaaatgcaggtgcttccattggagctaggtcggaggctgctttatatgacgaactccagaaatggatgccagaatacggaggccaaacgttctgagtcctggactgaacagcacctacttgtggtctggacagcttaacccagagttcctggaagaataaatgctgttagcatctggttaatttactggcagacagaagcctacttacagtggctttcaactttttgaccacatctttactgtggaatctcatcaaagacttggaagcaagggtggtgagaggggcctggggcgtggtgtggagggtcgagttctttgtcgtcccacagtcacccccaggaccacttgcgaagccgaaaaatacacatctgcatttaccgacaaggaaacgcccactgcagaaagctgcagacatttggctggggtcaccgcattacacgtgggcagatcgaacttggatcgtaacataccgcgagcggcaagcagaaggacagggcattggaacaggaggcctgttttcccaacggagaactcctactaagtgccaagcagaacacagcaattgtgtggaaccacactgtgacacgccgggaacacgcaggggccatctcttcttgcgaaagccttgcttgcacccacgcgtcctggacccgccagccagccggagaagcacgcggccaggcatgcatgggaccactcctga

SEQ ID NO: 16264 - DNA, 903 bp, Homo Sapiens
ccgtcgcgtgttcaagctggaaacagctgaagaatgacctgaatgagctgaggaaagccgtggccgaccaagccacgcagaataactccagccacggctccccagatagctacagcctcctgctgaaccagctcaagctggcccacgaggagctcgaggtgcgcaaggaggaggtgctcatcctcaggacccagatcgtgagcgccgaccagcggcgactcgccggcaggaacgcggagccgaacattaatgccagatcaagttggcctaacagtgaaaagcatgttgaccaggaggatgccattgaggcctatcacggggtctgccagacaaacaggctgctggaggctcagctgcaggcccagagcctggagcatgaggaggaggtggagcatctcaaggctcagctcgaggccctgaaggaggagatggacaaacagcagcagaccttctgccagacgctactgctctccccagaggcccaggtggaattcggcgttcagcaggaaatatcccggctgaccaacgagaatctggaccttaaagaactggtagaaaagcttggaaaagaattgagaggaagctcaaaaagcaactgaagatttacatgacagaaagcccaggacctagaagctgcccaggcatttggcccagagtgagaggaagcgccatgagctcaacaggcaggtcacggtccagcggaaagagaaggatttccagggcatgctggagtaccacaaagaggacgaggccctcctcatccggaacctggtgacagacttgaagccccagatgctgtcgggcacagtgcctgtctccccgcctacatcctctacactgtgcatccggcacggcggactacaccaacgacgatctcaaggtgcactccctgctgacctccac

SEQ ID NO: 16265 - DNA, 705 bp, Homo Sapiens
ctgacggtattcggtgaggtcaacattcttaagacagtgttcattctgctttgcagtgtactgagtcatgaagccctcatccccgctgtactggtatcagacagtgaagaaggcggcaggtgttggataaccagaagtgacgtcatctcaaagtcatcattgtgcaaagttcaggactttcttaatgccgttgatggtggaggtcagcagggagtgcaccttgagatcgtcgtaggtgtagtccgcgtgccggatgcacatgtagaggatgtaggcggggagacagggcactgtgcccgacagcatctggggcttcaagtctgtcaccaggttccggatgaggagggcctcgtcctctttgtggtactccagcatgccctggaaatccttctctttccgctggaccgtgacctgcctgttgagctcatggcgcttcctctcactctgggccaatgcctgggcagcttctaggtcctgggctttcttcatgtaaatcttcagttgctttttgagcttcctctcattcttttccagcttttctaccagttctttaaggtcctggaagcagaggaagcagtgtgagaacagacatcagcccggcctgggatggtgggggtaaaatcctgcttgcagtcggaggtgaccagtgcggcccgtgggcagccgtcagaaatgcgccagtcagggacgctgccaggagagctg

SEQ ID NO: 16266 - DNA, 1048 bp, Homo Sapiens
cgagctcgtacccgaacccctaagtacgacgagcagtagcccaaacaatctcatatgaagttacactagcaatcatcctactatcaatactcctaataaacggatcatatactctatcaaccctaattacgcatcctgacccctagccataatatgatttatctcaaccctagcagaaaccaaccgagccccgttcgaccttacagaaggagagtcagaacttgtatcaggctttaacgtagaatatgcagccggacctttcgccatattcttcatagcagaatatgccaacatcatcataataaatgcatttacagcaattctcttcctaggagcatcccacgacccacacacaccagaactatatacaatcaacttcgtactaaaaacactcgcattaacaatcaccttcctatgaatccgagcatcatacccacgattccgatacgaccaactaatacatttactatgaaaaagcttcctgcccctaacactagctctatgtatatgacacatctcactccctattataacagcaagcattcccccacaatcatagaaatatgtctgataaaagagttactttgatagagtaaaaaatagaggttcaaaccctcttatttctagaacaataggactcgaacctaaacctgagaattcaaaattctccgtgctaccaaaatacaccacattctacagtaaggtcagctaagctaagctatcgggcccataccccgaaaatgttggttcatacccttcccatactaataaatcccattatctacactacccttatcataacagtaatatccggaaccatactagtaataatcagctcacactgactactcatctgaatcggattcgaaataaacctattagcaataatcccagtattaataaaaaattttaacccacgagccacagaagcagccacaaaatatttcctaacacaagccacagcctccatgatactaataatagccatcatcatcaacctcctatattctggacaatgaccaggcaggcttgttaaaagatcctggta

SEQ ID NO: 16267 - DNA, 1411 bp, Homo Sapiens
ggcactcttaaacctactaatgtacatacacaacaacactagcaatattcatactattaatccacagctcagcaaccacaactttatccctatcccatacatgaaacaagatacccatcatcacaagcctaataatagtaaccctactctcaataggaggcctgcctccactatcaggatttataccaaaatgaataatcattcaagaaataacaaaaaatgaaagcatcatcatgccaacactcatagcaataacagcactgctaaacctctatttctacatacgactagcctactcctcctcactgactatgttcccatccaccaataacataaaaataatatacaactcaaacatctacaaaactaacctttaccctaactacgtaaaaaccaccgtatcctacgccttcactctcagcctagtccccttactgatatttatacacacaggccaagaaataatcatttccaactgacattgaataaccctacagaccgtagaactctctcttagctttgaaatagactatttctcagtaatattcattcccgtagcactattcgtcacatgatcaattatagaattctccatatgatacatacactcagaccccttcatcaaccgattctttaaatacctactactattcttaatcactataataatcctcgtaaccgccaacaacctcttccaactctttatcggatgagaaggcgtaggaatcatatcattcctcctaatcggatgatgacacggacgaacagacgccaacacagctgcactacaagcaatcctatacaaccgcatcggagacattggatttgtcctatccatagcatgattcctaacccactcaaacgcatgagatcttcaacaaatctttatactaaacaatgaatgcccaaacataccattaatcggcctactcctagctgcagcaggaaaatcagctcaattcggactacatccctgattgccctcagcaatagaaggcccaactcccgtatcagcattactacactccagtacaatagtagtagcaggggtatttctactcatccgcttctaccccttaatagaaactaacaaactagttcaaaccataacactatgcctaggagctatcaccaccttatttacagcactatgtgcaatcacacaaaatgatatcaaaaaaatcgtagccttctcaacttcaagccaactaggcttgataatagtgacaatcggcatcaaccaaccccacctagcatttcttcacatctgcatgcacgctttcttcaaagcaatactattcatatgctccggatccattatccacagcctcaatgacgaacaagacatccgaaaaataggcggactgtataaagcaataccattcacaacaacagcactaattattggaag

SEQ ID NO: 16268 - DNA, 590 bp, Homo Sapiens
cccgtacgaccagccacatcctcaatctccatgttcattattgcaccaatcctagccttatccctagcactaacaatatgagttccactaccaataccctaccctctaatcaacataaatctaggagtactattcatgctagccatgtcaagcctagcagtctactctatcctatgatcaggatgagcatccaactcaaaatacgcactcatcggggccctacgagcagtagcccaaacaatctcatatgaagtaacactagcaatcatcctactatcagtactcctagatttatgttgattagagggtagggtattggtagtggaactcatattgttagtgctagggataaggctaggattggtgcaataatggacatggagattgaggatgtggctggtcgtaggggttctttggtgaatagttttagggcatcggcgatgggttggagtaggccgtaggggcctacaacgttgggtcctctttcgtagtcgcatataacctagcacttttcgttctactaggcgtgaggaatgctacgggcagtaggataggcataattaggcttagaatattaattatgtacatcc

SEQ ID NO: 16269 - DNA, 1510 bp, Homo Sapiens
ccctaattacgtaatatccggaaccatactagtaataatcagcgcacacagactactcatctgaatcggattcgaaataaacctattagcaataagtcccagtattaataaaaaattttaacccacgagccacagaagcagccacaaaatatttcctaacacaagccacagcctccataatactaataatagccatcatcatcaacctcctatattctggccaatggaccattacaaaaatatttaacccagtagcaataacaataataaccatggccctagccataaaactaggactctcacctttccacttctgagtcccagaagtaacccaaggcatttcactacaagcaggcctactgttactaacatgacaaaaactagccccattatcagtactatgccaaatctcacaatcaatcaacccaaacctaatactaactatagccatattatcaattttaatcggagggtgaggaggactaaaccaaacccaacttcgaaaaatcatagcatactcatcaatcgcacacataggatgaatgacagcagtattaccatacaacacaaccataacaatcttaaacctactaatttacatcacaataacactagcaatattcatactattaatccacagctcagcaaccacaactttatccctatcccatacatgaaacaaaatacccgtcatcacaagcctaataatagtaaccctactctcaataggaggcctgcctccactatcaggatttatgccaaaatgaataattattcaagaaataacaaaaaatgaaagcatcatcatgccaacactcatagcaataacagcactgctaaacctctatttctacatacgactagcctactcctcctcactgactatgttcccatccaccaacaacataaaaataaaatgacaattcgaacacacaaaacaaataaaattacttcccacaataattgtattatcaacactagtcctacctataacaccagccctctcgtccctaaactaggaatttaggttaacacagaccaagagccttcaaagctctaagtaagtacaaagtacttaactcctgaaaacctaaggactgcaggacttatcctacatcaattgaatgcaaatcaaacactttaattaagctaaatcctcactagattggtgggattacatacccacgaaacttttagttaacagctaaacaccctaatccactggcttccatctacttctcccgccgcaggaaaaaaaaggcgggagaagtcccggcagaattgaagctgcttctttgaatttgccattccacatgatattcaccacggaactggcaaaaagagggcttaacctctgtctttagatttacagtctaatgcttactcagccattttacctatgttcgtaaatcgttgactatactcaacaaccacaagacatcggcaccctgtacctactatttgtgcctgagcaggaatagtggcactgcttgaaccgtaattaggtttc

SEQ ID NO: 16270 - DNA, 839 bp, Homo Sapiens
  misc_feature (637)..(731): n is a, c, g, or t
gtactcgtgaagaagtagctccctagtatacctgcaggcccttggtaaaatgttatcgacctcctctttctgaatttagcatattctagatgcctcctattacgttgatatgtagtatctgacttacgtagggtagtattttaatcactctaaactttaacattagttgtaatgcaaatggaaggtgtatgtctttaaactgctgtgtgttatctctgtgtgacgtgtattttgtcttctaggcagaaaaaaacagagctgcagcaatggcaaacaatttacaaaagggaagtgctggacctatgaggctttatgtgggctcattacacttcaacataactgaagatatgcttcgtgggatctttgagccttttggaagagtaagtccaggttcttcaatgaatcttcagtaggttgttgatctgagtataactacataatttctgtatgtcttgctttgttatctttctgtgagttaatattaagaggataagggctggttttataaaaatttctgtgacaacatagattaaaataggtcacttgatagattcttaaaagaatgttactgttattcataatgccatgtgaaatgcataatgggtattagagttaataaaaagtccacattggctgnnnnnnnnnnnnnnnnnnnnnnnnnnnnnnnnnnnnnnnnnnnnnnnnnnnnnnnnnnnnnnnnnnnnnnnnnnnnnnnnnnnnnnnnnnnnnnncttactgccacttcactccaccttgggtaacagtgtgatcctgtgtcaacaagaaggaaaatttgttaaatcacacgatgatctactgcgtcttacgggatacctctg

SEQ ID NO: 16271 - DNA, 834 bp, Homo Sapiens
gaagaatagtcaaattctggatcaatagattctaaatcctgagtccaactggttgttcaagatacgcttatagaatggtaaagaaaaacccgtgtctatgaatttcccatggaacagagccatggcaataaatctgccaataaaacgaaaatatttcaggtgatctagattgatgtaagaagcggggtttatctgcaagcagtagttatccttccctgcatattcaaacaggcaatacattgggttcaacacttcatgtgacaaaagaaagaaccattctcttgctacacctccataatctaaaccttcttctcctggaaaaatcacccacaaacgtcttcgcagatcttggggactgaagctcattatctgttgaaaggaatcctcaaacaatgtttttcttgtcactgtaatctttatgtgctgtggcatggccagttgctgacaccagaaccggaaatactgaacctttgctttgaagtcccgaacataggctatctgaggtccattgtctagggcagattttcctgtgcggggatctatataggtggtagttcttctattgtggtccacaaaatatggaattccatccactgtgaatctcatttcccaaccttcaggtaagggcttttcatttaattgaccttgacttctggggtcttcccattgtgtcattcgtgtgttgtggttgacgatatatactctgccattgctgtctgttctcttctcccatcccggtggcgatggaccaagaggatccgattctttactttgtgacgttgcaactctatctctgagtcgccatagatgctatctcgtggtttactgctcctc

SEQ ID NO: 16272 - DNA, 551 bp, Homo Sapiens
ggaagaccccagaagtcattgtcaattaaatgaaaagcccttacctgagggttgtgaaatgagattcacagtggatggaattccatattttgtggaccacaatagaagaactaccacctatatagatccccgcacaggaaaatctgccctgtaagttttctaaacattgtagattaagagtaaaatactagtccttcagattttgatataaagatttgtattagcaaggagtggaagtcttagtatttcttgagttagcttgacaataggtttctgttcattaagtattttgcatttccatctccctcttggatattttatcctagagattttcatatttgttaccatttgttcacacagcactaaatgaaactatttagaatttataggtattgtactgctcagccaggatgtctcctcagtcactagacgttcgatgcatcgtcgatccacgaccacatgttttgacgtttgcagtctgattataagagatccccctcctcatgtaacggcgatgtatactatgtgcgtcttcataaacgggccgagct

SEQ ID NO: 16273 - DNA, 482 bp, Homo Sapiens
  misc_feature (307)..(409): n is a, c, g, or t
tgacctgaggatcccgcgcgtgttgttacgtcaaatgggggttagggcagagaggaggaggtgatcaggtacgggaacacagtgaccttcaaagacactgatagtgttctgtatctgcaactcagtggtgagaacatgtgtaatccttccattactattctctagattgaacatagataaataaagtcttccatatgtgtgatatgttaaactatagcaagaattatcaaaaacctacctttggaagtcaaggggctcagacagttttacaagtgagttcaaccaaacattagatgtcagattgatnnnnnnnnnnnnnnnnnnnnnnnnnnnnnnnnnnnnnnnnnnnnnnnnnnnnnnnnnnnnnnnnnnnnnnnnnnnnnnnnnnnnnnnnnnnnnnnnnnnnnnngtcgtcctccttataaactaactagagatcaaatataatagtaaaaatctgcaataattgaatctagaagcat

SEQ ID NO: 16274 - DNA, 717 bp, Homo Sapiens
acgcgtgttgtttacgtcaaatgggggttagggcagagaggaggaggtgatcaggtacgggaacacagtgaccttcaaagacactgatagtgttctgtttctgcaactcagtggtgagaacatgtgtaatccttccattactattctctagattgaacatagataaataaagtcttccatatgtgtgatatgttaaactatagcaagaattatcaaaaacctacctttggaagtcaaggggctcagacagttttacaagtgagttcaaccaaacattagatgtcagattgatcttgttctatttcaactgttctaaagcaaagaaaaagtatagaaaatatctacatttacttacaaagctatcacaatcttgatattaaaacctgacaaagatagtgtcctccttataaactaactagagatcaaatataattgtaaaaatctgcaataattgaatccagaagcatattaaaaagtattaaaataatggcccagtcatcttcaaaggcccttggtaactagaagccataatacatccaatatactaagaaagggccacttttgagtcatacttattttcttggcatgcttagcttttaactcccttcattaaaaattatgtgagttgtatagatattcatctaaacctgaccacattcatgctggtcaattgtctagtaaacaacaaccgcgcgggatcctcagagtcactctagc

SEQ ID NO: 16275 - DNA, 572 bp, Homo Sapiens
ttcagttccttctctaaatttcctaattctccactatgctttaaaacaaaccttctactccactcacagtatatcctttctgctcaaatactccaagtagaggctcttgctcttaatttacagtgctaccaccatatttgtcacctttctgcaattatactcggacaagatctgccccattctctcaagaccttgagagctttgtctggaggtttctagcaggtaaagcacagctactcatatacccttgaccgaagactggtcctcctctatcgaggatggtcgttctctttgactgagcacacagcattgggagggacgcacatggagtggtgagggaggaaggggacaaccacctagccagccagatcagcgaaatcaaccctggtgatcaatggggtgacagatatcacagccagatcaccctcacattcgccattctctcaagaaacagctgaagtactatctccttcatgaaactttgtctgcaactgtctatatccttttctctatttgccatggaaatataccacaaaccacatatgaaatttagagaaggaactgaatcctcg

SEQ ID NO: 16276 - DNA, 251 bp, Homo Sapiens
gccctccagcctgggcaataagagctctgtcaccccattgatcgccagggttgattcggctgatctggctggctaggcgggtgtccccttcctccctcaccgctccatgtgcgtccctcccgaagctgcgcgcacggtcgaagaggacgaccatccccgatagaggaggaccggtattcggtcaagggatacgagtagctgtgctccctgctagaacctccaaacaagcttctcaagcccaaccagcccac

SEQ ID NO: 16277 - DNA, 529 bp, Homo Sapiens
aagctttgaccgccttacgttctgcctaataggcattcgactatgcaaccctagtttttgttagtatgctacgctggttgacatggaccaaatcgaccacacatcaatcataagcttagttggtgatgacctcaacggaataacgtgacataagtattgtgacaatacttcttgcatgtatctgcaggtggaattgtaaacctggtggtccgagatggtctaattccatcttcctatgtatctccttatattaatagtggtaacatttgtggtggtgattcagcatttcaatgcctcttctcatggcaacaacaaacgttttccttctgaatcaacattaacctagatgttactgcggatcaaaattagactctacattttcaaccacagaaataccgggcagtaaaaatttttctgagaaggccagttgcctctggttttggagatccccacaggatatgacaagacagacatcaaatgtgattgaggtgagcttgatctagttacattaatgataaaatagctgacg

SEQ ID NO: 16278 - DNA, 552 bp, Homo Sapiens
caggcaatagctcctactgaaaaagcagcccgaacagccgaaaaggggtggacccatcataccccagtcaaaacagcatcaccatcttcagagtcatgggctattgttccaggaccaatttctaccaacctaaagctacgaaaactttaaccctcttatactgccttgtcttctttcctctctctaccgtcagctattttatcattaatgtaactagatcaagctcacctcaatcacatttgatgcctgtcttgtcatatcctgtggggatctccaaaaccagaggcaactggccttctcagaaaaatatctctgcccttccaagataaattctaaatcctcacacaatgcttgcctaatcgaaactaaatccattacattctttgcagtttgggaatgggaagggtttgaggagaggttctgcccatcccggaatgacgtcctatggaataccgatcctcaagggtagacttccccaaaaagctgcatctctctacaaccctaccttcgtttcaaagggaaggtaggagctttgcctggaatcctctgagg

SEQ ID NO: 16279 - DNA, 430 bp, Homo Sapiens
ttcgactcattatagggaaagctggtacgcctccaggtacctggtccggaattcccgggtcgacccacgcgtccgggtacatcgacagttgtgggtgttgcggttggttggggagaggatcgagctcagatttcccgtggcgcttgtcgacggcgagcattgatccttggtcggagaagctcggggtgcgtccccggccgatgcgccttcatcgacgtcttcatcccgtcctcagggacgggtgactattgcggctcgtttgaaagcaatcttgcgatggggcttctccagatctgcggcggccatgatgtcttcttcgacggcggcgaccggcgacggatcgacgatggcggtcgttggaggcttctggcgatttggggaatcacagggtccagggtcctcaatgaaatttatgtttttcttaggggcc

SEQ ID NO: 16280 - DNA, 495 bp, Homo Sapiens
acgactcctatagggaaagctggtacgcctgcaggtaccggtccggaattcccgggtcgacccacgcgtccggcgcgctcaagacatggagctgatcacaaatgtcaccgagtatgagaagctcgccaaggagaagctgccgaagatggtgtacgactactatgcctccggcgcagaaaatcagtggacgctcaaggagaacagggaggccttctccagaattctgtttcgaccacggatactgattgacgtctcccatatcgacatggccacaaacgttctgggcttcaacatttccatgcctatcatgattgctccttcagccatgcagaaaatggctcatcctgatggagagcttgctacggcaagagcagcagcctctgcaggaacaataatgacattgtcctcatggtctacttccagcgttgaagaggtcaactcagttgggccagggatacgtttcttccagctctatgtctacaaggacaggaatat

SEQ ID NO: 16281 - DNA, 222 bp, Homo Sapiens
tcaggatcccgcagtctctcccatcagaaattctatcactatcagcattctccgtaacagctgctgaactaccagagacttcttctttaactgtagccaacatagaagatgactctttcttcttcataattttttgagacttttgatcgtttttattgccactttcttcaatcactgaaacatttagaatctttcctttttcagctgatgggagaagatgcg

SEQ ID NO: 16282 - DNA, 428 bp, Homo Sapiens
gagtggtcagtgtcttcggatgggaagtagaaaacccaacattatgctttaacaagccgtttgcgtcaaattgaagtgcttactactgtggccaatgcgttttcttctttatattctcaagtctccgggacgcccctgcagagaattggaagtatgtcctcagtgacctctaacaaggagacagacccacctccacctttaactcgaagtaacactcaaatcgtttttattgccactttcttcaatcactgaaacatttagaatctttcctttttcagctgatggagaaggactactactttctcctttctctgttttatcaacacataaattcagttttgagagtgtattcattaaacgatttgagtgttacttcgagttaaaggtggaggtgggtctgtctccttgttagaggtcactgaggacat

SEQ ID NO: 16283 - DNA, 717 bp, Homo Sapiens
  misc_feature (620)..(620): n is a, c, g, or t
cggtaccgcatcattcgtcccatcggcataggctccagccaaagaagctcccacccaaaataagggagagatccaaagggaggcgatacaatgacgtgaaaccatagaggtaagaagcaaggcctcctaaatactatgactactatgctcaaactgtactagaacttgtagggtagatacttctttggtaacaagaatgatgcacgatcttggagagcctctgttgtaccaggaatacaatgctggtgggaggattcgtgctcctcatctgcttatttgctctcagaatccattcttcactcttcctctccctactctgtctcacaggagctactccggtaaattacatttctcagctcccatgcctgttggtttccagttagatttggtcaagtgggaggctctggtgggagactggaggtgagaagagggcagagaagtcaggttttttctctccctacctcctctggcacgagcggcagtggcagtgactattctgtggttctagcttttgcaggtggccccagctcctggactcccacctgctcccttggtctctcctatcctagaggtggtagcagcttcctgctgttgaatcactgtcctctatgctcatttantctgccaaaacttttgtatctcacccccatgttaaattttttctgttgaactacactggatctgacttgatagaactattaaaaatagtttttaaaa

SEQ ID NO: 16284 - DNA, 448 bp, Homo Sapiens
agttttattgtatacctatatacaaaggaatgtgatataagggttatacacactccaccagaattatatatgcaatgtttgcagaatttaaaaaagaagcaatcactgttagttagggtgatcaagaaaaggcttcatagaggaggtactatttgaaaaatagtttttcaataggtgaatataggcaaggaaagaaaggatgtttcaggtataggaaccaggaatgagataccacatcacaaccactaggatggctgtaattttttaaatggacaaaaacaagtgttggtgagaattgaagaaactggatcccatcagaacagtttagcatagagtcaagtattaggagtccttgcttcttacctctatggtttcacgtcattgtatcgcctccctttggatctctcccttattttgggtggaggagcttctttggctggagcctatg

SEQ ID NO: 16285 - DNA, 577 bp, Homo Sapiens
ctcgcgaacgtgttatccctcgcgaacgtgttatccctcgcgaacgtgttatccctcgcgaacgtgttatccctcgcgaacgtgttatccctcgcgaacgtgttatccctcgcgaacgtgttatccctcgcgaacgtgttatccctcgcgaacgtgttatctctcgcgaacgtgttatccaagaaaaccataccccttgagattttacctagaggctaaccaagagcctaatatgtttctctgggggatgactaaagccaaaaaggctgtgagatgaaacatgtgaaataatattcagtttccttaccattaccagctcagaagtagctagaggctttctacccaaaggatgccaaagtatagcagggcaggcctggagctagggccttcacatggtggtagcaagtttttcaaatctaatacaatcaagtacaatacttcctttaaatgcttctgtggacctggcatgaaagatccctagattgaaaggaataatacctccatgtctcctgtatgttgagtctagaattgctgtgttgtacttagaagcagtctttgggcaacaacttgaaagggg

SEQ ID NO: 16286 - DNA, 233 bp, Homo Sapiens
tcgcgaacgtttatccctcgcgaacgtgttatctctcgcgaacgtgttatctctcgcgaacgtgttatccaagtaggagaggagcgagcgaccaaaggaaccataactgatttaatgagccattcgcagtttcactgtaccggccgtgcgtacttagacatgcatggcttaatctttgagacaagcatatgctactggcaggatcaaccatgtaggataacacgttcgctgag

SEQ ID NO: 16287 - DNA, 670 bp, Homo Sapiens
  misc_feature (290)..(290): n is a, c, g, or t
  misc_feature (545)..(605): n is a, c, g, or t
gaggaggaggtggtggtggtggttctataatggtagcggtaggcacagcacctcgggcctgaactggctgcaatgagggagcagtcactccaattgggacaggaacattctgcataactcataattgcaggggctgccgctagtccaaggtaatttgactgcaggctcattcctctggcctgatgaccccattcctgctgctggaaggctaactggtattgtctgatgtccaattcctgttgcctggtttccaatccctgctgcctggtgacctgtagctatagctgacntggctatagagaactggagaactgccaatggtagctgacctctgaaccactgcagtgctaatttctgtagctttcctctttattcctttagtggaagaagaactagagatggtggaatcaactgaactctggctagttacaactgtggtttgtgctgaaggtttcaaaggggtatcttcctctgttcctggggcagggggctcctcacttccctcatcctccatctctacctcctggatctcaccatcttccgcnnnnnnnnnnnnnnnnnnnnnnnnnnnnnnnnnnnnnnnnnnnnnnnnnnnnnnnnnnnnnatttccaagggtaatggaggttgaagcacaggaacatttgactgaaggagggtccagaatggagt

SEQ ID NO: 16288 - DNA, 849 bp, Homo Sapiens
  misc_feature (484)..(531): n is a, c, g, or t
taaaacagtatgaaataaacgccactcctaaaggctggtcctgccactgggacaggacctctggaagcaactactcctgattaacctcggtgaagttaaggaaaacttcgtggctgaagatgtgaatgaagaacaagattactatcctctgccagcagggatcatagacggtatttctatgtaaacgaacagtcgggcgagtctcagtgggagtttccagatggtgaagaggaagaagaagaaagccaagcacaagaaaatagagatgagactcttgccaaacagaccttgaaagacaaaactggcactgattcaaattcaacagaatcctctgaaacttccacaggttctctttgtaaagaatccttttctggtcaagtttcttcttcatcactcatgccacttactccattctggaccctccttcagtcaaatgttcctgtgcttcaacctccattacccttggaaatgccaccacccccannnnnnnnnnnnnnnnnnnnnnnnnnnnnnnnnnnnnnnnnnnnnnnngcggaagatggtgagatccatgaggtagagatggaggatgagggaagtgaggagccccctgccccaggaacagaggaagatacccctttgaaaccttcagcacaaaccacagttgtaactagccagagttcagttgattccaccatctctagttcttcttccactaaaggaataaagaggaaagctacagaaattagcactgcagtggttcagaggtcagctaccattggcagttctccagttctctatagccagtcagctatagctacaggtcaccaggcagcagggattggaaaccaggcaacaggaattggacat

SEQ ID NO: 16289 - DNA, 272 bp, Homo Sapiens
  misc_feature (145)..(153): n is a, c, g, or t
cgccgatgatactaagctgaaagggctgaggagctcatgtgagcctgagttgacctactctggagcacggtgtcttccttgtaaactgagtgactgtagtactatctgtgcctctgatggtaataaaactgacaagatgtctaannnnnnnnnaagtaggaccaaaggaaaacaagatttagatagtctgactttgcttttgaacaacagacattgcaagtcaaaattgttgtcaaaagcaaagtcagactatctaaatcttgttttccttt

SEQ ID NO: 16290 - DNA, 539 bp, Homo Sapiens
  misc_feature (313)..(321): n is a, c, g, or t
gataagtatatacctggacatagtgattctagttgcctacctactctaactcgtaaactctgctgctccccaacacaactagagtgcaattatggcatcttaggagggaaaaaggacagtttacaactgtggccctatttattacacagtttgtctatcgtgtcttaaatttagtctttactgtgccaagctaactgtaccttataggactgtactttttgtatattttgtgtatgtatattttttaatctcagtttaaattacctagctgctactgcttcttgtttttcttttcctattaaaacgtcttccnnnnnnnnncttaagagaaaatggaacatttaggttaaatgtctttaaattttaccacttaacaacactacatgcccataaaatatatccagtcagtactgtattttaaaatcccttgaaatgatgatatcaggcttaaaattacttgtattgtttctgaagtttgctcctgaaaactactgtttgagcactgaaacgttacaaatgcctaataggcatttgagact

SEQ ID NO: 16291 - DNA, 1118 bp, Homo Sapiens
  misc_feature (914)..(922): n is a, c, g, or t
  misc_feature (952)..(952): n is a, c, g, or t
  misc_feature (989)..(1019): n is a, c, g, or t
gatcagaggatccccagtgcagtcaccgcccccctacacgatgaagcaaatagtgaaatctctttccctattacttttacagtttcctaaaataagctgtgacttactttaatcatctgaggaaaaagtggcaaaaatacgtatacacttagtactgattacaaaattatcggctatggccaagaaaataatttatctaatgattattagtgacttgcaaacaatttactatttctagactaaagaaataaattagtgtacaaattagtgtagcaggttaaaaacacctcagggatttcagaccaaaattgacctatatatatttttaattcatcatatatctgtcctgtttcttcatttttctcaatttccacacgctataaatttaggtcggccaataaagtactaaccgtataaaattatgtttaatcctataatatcttaattcattttactaatattaaagatgacaaattattacctgtccaatacttatattagctagcaggctcaccagaataaagcagagtattttaattccatcaagacttgttgagtacagaatcaggaaaaagagaaatataattccttttccaaactcccttaaactaagatctgcttttgatactttaaaatatttctattcaaaataactcggcaacaggcatttcatgagataacaagtagccttgctcagtctcaaatgcctattaggcatttgtaacgtttcagtgctcaaacagtagttttcaggagcaaacttcagaaacaatacaagtaattttaaccctgatatcatcatttcaagggattttaaaatacagtactgactggatatattttatgggcatgtagtgttgttaagtggtaaaatttaaagacatttaacctaaatgttccattttctcttaagnnnnnnnnnggaagacgttttaataggaaaagaaaaacnagaagcagtagcagctaggtaatttaaactgagattnnnnnnnnnnnnnnnnnnnnnnnnnnnnnnngtacagtcctataaggtacagttagcttggcacagtaaagactaaatttaagacacgatagacaaactgtgtaataaatagggccacagttgtaaactg

SEQ ID NO: 16292 - DNA, 1165 bp, Homo Sapiens
aattcccgggatggagccggcgcgggcgggctgctgaggtggctgtcgccggctccgagctgcggcttcccgggccgagcccccgatggaggccgaggccgcggacgctcccccgggcggggttgagtcggcgctcagctgcttctctttcaaccaggactgcacatccctagcaattggaactaaagccgggtataagctgttttctctgagttctgtggagcagctggatcaagtccacggaagcaatgaaatcccggacgtctacatcgtggagcgcctcttctccagcagcctggtggtggtagtcagtcacacaaaaccacggcagatgaacgtgtatcacttcaagaaaggcacagagatctgtaattacagctactccagcaacatcttgtccataaggctgaaccggcaaaggctgctggtttgcctagaagagtccatttatattcacaacattaaagacatgaagctgttgaagaccctcctggatattcctgcaaacccaacaggtctatgtgctctctctatcaaccattccaattcttacctggcctatcctggaagcctgacttcaggggagattgtgctttatgatggaaactccctgaaaacagtctgcactattgctgcccatgagggaacactagctgccatcaccttcaatgcctcaggctccaaactagcaagtgcgtctgaaaaaggcacagtcatccgggtgttctctgtccctgatgggcaaaagctctatgagttccggagagggatgaaaaggtatgtgacaatcagctctctagtgttcagtatggattcacaattcctctgcgcctccagtaacaccgagacggtacacatcttcaagctggaacaggtcaccaacagtcgaccagaagagccttcgacctggagtggctacatgggaaagatgtttatggctgctaccaactacctccctacccaggtgtcagacatgatgcatcaggacagggcttttgccactgcacgcttgaacttctccggacagaggaacatctgtaccctctcaacgatccagaagttgccacggctgctagtagcgtcatccagtggacacctttatatgtacaatatggatcctcaggatggaggagagtgtgtcttaatcaaaacccaacgcttgatt

SEQ ID NO: 16293 - DNA, 784 bp, Homo Sapiens
gaccggcgacccggcccgtggagccggcgcgggcgggctgctgaggtggctgtcgccggctccgagctgcggcttcccgggccgagcccccgatggaggccgaggccgcggacgctcccccgggcggggttgagtcggcgctcagctgcttctctttcaaccaggactgcacatccctagcaagtggaactaaagccgggtataagctgttttctctgagttctgtggagcagctggatcaagtccacggaagcaatgaaatcccggacgtctacatcgtggagcgcctcttctccagcagcctggtggtggtagtcagtcacacaaaaccacggcagatgaacgtgtatcacttcaagaaaggcacagagatctgtaattacagctactccagcaacatcttgtccataaggctgaaccggcaaaggctgctggtttgcctagaagagtccatttatattcacaacattaacagacatgaagctgttgaagaccctcctggatattcctgcaaacccaacaggtctatgtgctctctctatcaaccattccaattcttacctggcctatcctggaagcctgacttcaggggagatagtagctttatgatggaaactccctgaaaacagtctgcactattgactgcccatgagggaacaactagcatgccatcaccttcaatgcctcaggctccaaactagcaagtgcgtctgaaaaagtatgtgacaatcagctctctagtgttcagtatggattcacaattcctctgcgcctccagtacacc

SEQ ID NO: 16294 - DNA, 316 bp, Homo Sapiens
ggcttctgaggacctgtgtgagatggccctggacccagaactgttgcttctgagggatgatggagaggaggagtttgcaggagccaagctggaggattcggaggtccggtccgttgcctcaaaccagtcagagatggagttctcttcacttcaggacatggtgaggcctcttctcgaccactctgggtctcagtggtggtgaggcttggcaaggcctctggcccactcctgggagaaggatgcttaccagtgacttcctttcttgatggaccccacacacagtgtcgtacctgcctgagatgggtcctctggtcgc

SEQ ID NO: 16295 - DNA, 877 bp, Homo Sapiens
ggctacagagtcagaggccccgctgaaggaggatgggcttttgcccaaaccactctcttctgggggagaggaagaagaaaaaccccggggcgaggcttctgaggacctgtgtgagatggccctggacccagaactgttgcttctgagggatgatggagaggaggagtttgcaggagcaaagctggaggattcggaggtccggtccgttgcctcaaaccagtcagagatggagttctcttcacttcaggacatccccaaggagctggatccctctggctgtgctccccttagactgtctgcttgcttttgtgttctttgatgccaactggtgtggctacttgcaccggcgagacttagagaggatcctccttacccttgggatccggctcagtgcagagcaggccaagcagctggtcagcagggtggtgacccagaacatctgccagtaccggagccttcagtacagccgccaggagggcctggatggtggccttcccgaggaggtgctcttcggaaacctggacctgctgccccctcctgggaaaagcacgaagccaggtgctgcccccacagaacacaaagccttggtgtcccacaatggcagcctgattaacgtggggagcctgctgcagcgcgcggagcagcaggacagcggccggctctacctagagaacaagatccacacactgggagctgaagctggaggagagccataaccgtttctcagccactgaagtaaccaataagacgctggcggcagagatgcaggagctgcgagtccggctggcggaggccgaggagaccgcccggacggcggagcgacagaagagccagctccagcggctgctgcaggagctccgcaggcgtctgacccccc

SEQ ID NO: 16296 - DNA, 271 bp, Homo Sapiens
cgtggtcgtctgtgatctgtggctggaatggagggagcgcctgcttcttctccagcttggaaaaacaataggagaagggtcagctccgcgcggcatcatccctaccagattgagtgttttgcacgcacttcaatcacaaaatgaaacagtgagaaagtcagcatttcaatctgcctagtattggactgccaaggtgttttttcttacaacacaaaatctagaaaatatccaaagtcagaaaaattgttgtcgagctgagaaatgccagtgt

SEQ ID NO: 16297 - DNA, 521 bp, Homo Sapiens
  misc_feature (35)..(35): n is a, c, g, or t
  misc_feature (51)..(51): n is a, c, g, or t
  misc_feature (59)..(59): n is a, c, g, or t
  misc_feature (61)..(61): n is a, c, g, or t
  misc_feature (74)..(76): n is a, c, g, or t
  misc_feature (79)..(79): n is a, c, g, or t
  misc_feature (100)..(100): n is a, c, g, or t
  misc_feature (165)..(165): n is a, c, g, or t
acgggcttcgctggtgaaactgtgtttcaaagttntcccagaccgtagtcntctgtgantntgtgtcttgaaannnagngagcgcctgcttcttctccancaagtcccaagtctatgctgcggaaagaacgcgtgggacttgatgtcagaaaatccagtctgtgnccggcagccgagcctctctttggggtccttatttaaaaatccttttaaaacatgggaggctttgacggacaggaaccgggggatccggatgggcttctccaggatcacttggaaaaggtagtcctctgtgttcatgtccgggttgtcggtgatgatgtcgaacggggagcgcccggccatcatctcaaacatgaggactcccagcgcccaccagtccacgctgaacccgtactcctctccccgcaggatttcgggggcgatgtaattcggggttccgcagaaagtgctcgttgtgtcaccagggcccaggccttccttgcacatgccgtagtctgtgagcttgatgtgcccgtccg

SEQ ID NO: 16298 - DNA, 485 bp, Homo Sapiens
atcctttttcctttgcctcttgggagaaattaatctagctttacattaattatgcatgttatcagatttcaagctccttgagagcaggtatttttaattctataaagcctctacgtggccttggacatgggtaggtgctttaattacccaagatgctccttgaatacagatggtacacgacctacacagacttagatctttaccacttcccccctctccccaccctgacttgctcaatcctgaaggaactggagacgtctaagtgtctgaggttcacgcttccacacagaagcttgggtctgtgtgggagggaaaaaggaagccatctgtccgcaggccagaccaggccacaccctgctagcacccagaaccctttgtcccaggcccagccctgccattttactttccttgcatctggaaagcacagggaatatagtagtgacaaaagaaggaagggttgtttgagtttaagaatagtttactct

SEQ ID NO: 16299 - DNA, 366 bp, Homo Sapiens
ccggcatactggaacttcttaagcgtgggagagattaaaggaaacttcttaagggtaagggagactacaaaatagattgagcaagtcagagtggggagaggggggaagtggtaaagatctaagtctgtgtaggtcgtgtaccatctgtattcaaggcagcatcttgggtaattaagcacctacccatgtccaaggccacgtagaggctttatagaattaaaatacctgctctcaaggagcttgaaatctgataacatgcataattaatgtaaagctagattaatttctcccaagaggcaaaggaaaaaggatggggttgatggatttatgtaagatttaaaaattcacccagaaggtccaggtatg

SEQ ID NO: 16300 - DNA, 483 bp, Homo Sapiens
  misc_feature (389)..(389): n is a, c, g, or t
tgtataattgtacaacctttgaaagttacataagttgtaatgatctaatactattaatagccattcagaaaacactttccctccctcccaacaaccatccagggggaaataaaagtcctgaaaagaggccagttcaacatggcctctaccctggtagaaacaaaaagtgaaaagagaagaaaacagaaatcaactaagaggtgttgccagtgtctctcaggagtggggccctggctgttgcctggggtcatgaaaggcagagctgcagcatgcagtaatggcagccgggagaccttgcagccacatcttcctcaccccggcacatccacatcccaacttaaggtgtcatggaaatctttcagcagggttctcctccgctgctccgtatntgcatctggttctccaagtcccctctgtcatagctgtctgcacgctccactttccatgagaggttttcgatctcagcctccagctgagccttgc

SEQ ID NO: 16301 - DNA, 462 bp, Homo Sapiens
gcgtgcagcacagcccactcacctttgacctcctgctctgcctatacagtttgaataccagcaggctcagctggaggctgagatcgaaaacctctcatggaaagtggagcgtgcagacagctatgacagaggggtaagtgcctactgtcctcttggattctatattgcaggtagaggactggcatggtaataggtgacagcgttgttggcttgtgcactggtagctgctgctaagaatgggaagggcagtgttttcgactccttggaggtcctggagggtgtttgtggctttggctactccttgctcccaggcctgggccatgcaagcacacaccttgtttctctgatgcaggacttggagaaccagatgcatatagcggagcagcggaggagaaccctgctgaaagatttccatgacacctaagtcgggatgtggatgtgccgggctgaggacgatgtggc

SEQ ID NO: 16302 - DNA, 933 bp, Homo Sapiens
cgagggactcactggtgcctgccttggggctccgggactgtgggctgtctccatccggagccgcagcaatggcgctgagttcctctgctggagttcatcctgctagctgggttcccgagctgccggtctgagcctgaggcatggagcctcctggagactgggggcctcctccctggagatccacccccaaaaccgacgtcttgaggctggtgctgtatctcaccttcctgggagccccctgctacgccccagctctgccgtcctgcaaggaggacgagtacccagtgggctccgagtgctgccccaagtgcagtccaggttatcgtgtgaaggaggcctgcggggagctgacgggcacagtgtgtgaaccctgccctccaggcacctacattgcccacctcaatggcctaagcaagtgtctgcagtgccaaatgtgtgacccagccatgggcctgcgcgcgagccggaactgctccaggacagagaacgccgtgtgtggctgcagcccaggccacttctgcatcgtccaggacggggaccactgcgccgcgtgccgcgcttacgccacctccaagcccgggccagagggtgcagaagggaggcaccgagagtcaggacaccctgtgtcagaactgccccccggggaccttctctcccaatgggaccctggaggaatgtcagcacccagaccaagtgcagctggctggtgacgaaggccggagcttgggaccagcagctcccactgggtatggtggtttctctcagtggagcctcgtcatcgtcattgtttgctccacaggttggcctaatcatatgtgtgaaaaagaagaaagccaaggggtgaatgtagtcaaggtgatcggtctccgtccagcggaaaaaggacaggaggcagaaggtgaggccacagtcattgagggcctgcagggcctc

SEQ ID NO: 16303 - DNA, 848 bp, Homo Sapiens
  misc_feature (676)..(702): n is a, c, g, or t
  misc_feature (791)..(791): n is a, c, g, or t
gtgccctgtgcctccctgtaggctcaggccctgcccccaggtgtgccgtcagccctgtcccgcaggtgcagtcctgcctggccgcagggagcactggccatgctgaagccttggcatgaggctccaaggggacagagccgttggccgccatggacaggctctgcgctcagtgactcaaaggccacctctgggtcctggttcccctttctgtctgcctggactcaggtgggcaccagcctccaggtgacctcttcccctgaggtcacagggggaaccaatatctgggtcacacatttggcactgcagacacttgcttaggccattgaggtgggcaatgtaggtgcctggagggacagggttcacacactgtgcccgtcagctccccgcaggcctccttcacacgataacctggactgcacttggggcagcactcggagcccactgggtactcgtcctccttgcaggacggcagagctggggcgtagcagggggctcccaggaaggtgagatacagcaccagcctcaagacgtcggttttgggggtggatctccagggaggaggcccccagtctccaggaggctccatgcctcaggctcagaccggcagctcgggaacccagctagcaggatgaactccagcagaggaactcagcgccattgctgcggctgtgggccnnnnnnnnnnnnnnnnnnnnnnnnnnntccgcctcggtgtgacaacgctgtgcctcagaacccgagcagcaggagagtgggcagcaggggctgtctggcacgcagagaggggctcnacgcctgctgggtggacggcgctggggtacacaggtggcacctgcgggaggcaggag

SEQ ID NO: 16304 - DNA, 575 bp, Homo Sapiens
  misc_feature (201)..(201): n is a, c, g, or t
tcatctgtagatgagtgtaacagtctagaacactcctctcagggatcatatccacaagtgctcgtgctgtgcgaggatctcactggttgtttattgaaaggctaagcaagtaggttgaggtccctgggaagcaggggtggatcctgtgtcaccagggctgccccttaccctaaaccgttggccccgacaacccacccaccntgcccagcagtgctgactctgggacgatgcccgggacgacaagaactccaaggagaagctggtgctggagttcaccttcaccaagccagtgctttctgtgcgcatgcgcaatgacaagatcgtgatcgtgctgaagaaccgcatctatgtgtactccttccccgacaatccccgaaagctgtttgagtttgatacccgggacaaccccaaggggctctgtgacctctgccccagcctggagaagctactgctagtgttcccgggacacaagtgtgggagtctgcaacttgtggacctggcgagcacaaagcctggcacctcgtctgctccattcacgatcaatgcacatcagagtgacatagtctgtggtaccg

SEQ ID NO: 16305 - DNA, 1618 bp, Homo Sapiens
tgtaaacacccgagccgggctccaaggcccgggaggtcagaaaaccgggccgcgggcggcaccgacagctggggcccgggtcagggacacgcggaggtcaggccggtgaaggcggcaggaagctggagcacgatcccaggaggaacaatcctgcaccatgactcaacagccacttcgaggagtgaccagcctgcgtttcaaccaagaccaaagctgcttttgctgcgccatggagacaggtgtgcgcatctacaacgtggagcccttgatggagaaggggcatctggaccacgagcaggtgggcagcatgggcttggtggagatgctgcaccgctccaaccttctggccttggtgggcggtggtagtagtcccaagttctcagagatctcagtgctgatctgggacgatgcccgggagggcaaggactccaaggagaagctggtgctggagttcaccttcaccaagccagtgctttctgtgcgcatgcgccatgacaagatcgtgatcgtgctgaagaaccgcatctatgtgtactccttccccgacaatccccgaaagctgtttgagtttgatacccgggacaaccccaaggggctctgtgacctctgccccagcctggagaagcaactgctagtgttcccgggacacaagtgtgggagtctgcaacttgtggacctggcgagcacaaagcctggcacctcgtctgctccattcacgatcaatgcacatcagagtgacatagcctgtgtgtctctaaaccagccaggcactgtagtggcctcagcctccccagaagggtacccttattcgcctctttgacacacaatccaagggagaaactggtgggagctgcgcccgaggcacctgaccctgccacccctctactgcattaacttcagccacgactcctccttcctctgcgcttccagtgataagggtactgtccatatctttgctctcaaggatacccgcctcaaccgccgctccgcgctggctcgcgtgggcaaggtggggcctatgattgggcagtacgtggactctcagtggagcctggcgagcttcactgtgcctgctgagtcagcttgcatctgcgccttcggtcgcaatacttccaagaacgtcaactctgtcattgccatctgcgtagatgggaccttccacaaatatgtcttcactcctgatggaaactgcaacagagaggctttcgacgtgtaccttgacatctgtgatgatgatgacttttaaggaccctgggggctgtgctagggacctgcagtggcagaactgcagagctgagccttggcagtggggcgtgcttggaagccaccagccagcaagcattaatggggctggtgcccactttccactcagcagagctatgtctaaataaagagctcacttccccccagcacttcttgatgactgtgttccccaagggccaggccagagacccaggaaggcagcgaccccttgggatccctaacctggaggaaattgccagggacccagagggagtgccctaatccaacctggggattttttaaaagcttcctaggaagagatgatctccgatgtgatgaatacgaataaaaggcccttaatggcatttacggcttg

SEQ ID NO: 16306 - DNA, 784 bp, Homo Sapiens
ttacggctaggtgcgaggctgggtggcgaatcggcacgaggaggacttcctagtgggtgtgaaaggcagcggtggccacagaggcggcggagagatggccttcagcggttcccaggctccctacctgagtccagctgtccccttttctgggactattcaaggaggtctccaggacggacttcagatcactgtcaatgggaccgttctcagctccagtggaaccaggtttgctgtgaactttcagactggcttcagtggaaatgacattgccttccacttcaaccctcggtttgaagatggagggtacgtggtgtgcaacacgaggcagaacggaagctgggggcccgaggagaggaagacacacatgcctttccagaaggggatgccctttgacctctgcttcctggtgcagagctcagatttcaaggtgatggtgaacgggatcctcttcgtgcagtacttccaccgcgtgcccttccaccgtgtggacaccatctccgtcaatggctctgtgcagctgtcctacatcagcttccagaacccccgcacagtccctgttcagcctgccttctccacggtgccgttctcccagcctgtctgtttcccacccaggcccagggggcgcagacaaaaacctcccggcgtgtggcctgccaacccggctcccattacccagacagtcatccacacagtgcagagcgccctggacagatgttctctactcccgcaatccagctatgatgtacccacaaccagacatccgaagcgtaacatcaaccaccag

SEQ ID NO: 16307 - DNA, 1001 bp, Homo Sapiens
  misc_feature (22)..(22): n is a, c, g, or t
gctggaccggtccggaattccncgggatctacaaaggacttcctagtgggtgtgaaaggcagcggtggccacagaggcggcggagagatggccttcagcggttcccaggctccctacctgagtccagctgtccccttttctgggactattcaaggaggtctccaggacggacttcagatcactgtcaatgggaccgttctcagctccagtggaaccaggtttgctgtgaactttcagactggcttcagtggaaatgacattgccttccacttcaaccctcggtttgaagatggagggtacgtggtgtgcaacacgaggcagaacggaagctgggggcccgaggagaggaagacacacatgcctttccagaaggggatgccctttgacctctgcttcctggtgcagagctcagatttcaaggtgatggtgaacgggatcctcttcgtgcagtacttccaccgcgtgcccttccaccgtgtggacaccatctccgtcaatggctctgtgcagctgtcctacatcagcttccagcctcccggcgtgtggcctgccaacccggctcccattacccagacagtcatccacacagtgcagagcgcccctggacagatgttctctactcccgccatcccacctatgatgtacccccaccccgcctatccgatgcctttcatcaccaccattctgggagggctgtacccatccaagtccatcctcctgtcaggcactgtcctgcccagtgctcagaggttccacatcaacctgtgctctgggaaccacatcgccttcccactgaacccccgttttgatgagaatgctgtggtccgcaacacccagatcgacaactacctgggggtctgagggagcgaagtctgcccccaaaaatgccccttcgtccgtgggccagagcttctcagtgtggatcttgtgtgaagctcagtgcctgacaggaggatggacttggatgggtacagcccccccagaatggtggtgataaaagg

SEQ ID NO: 16308 - DNA, 515 bp, Homo Sapiens
  misc_feature (98)..(195): n is a, c, g, or t
agctcggtaccctccactagtgtaggccatgtcaagttttaatgtggaaataacgttttcaggtattttgatttatgcctaaaagtagaatttctgtnnnnnnnnnnnnnnnnnnnnnnnnnnnnnnnnnnnnnnnnnnnnnnnnnnnnnnnnnnnnnnnnnnnnnnnnnnnnnnnnnnnnnnnnnnnnnnnnnnctggcatggtcctttggaataacgttcagtggtcttgtgtgtggggatgttggtagagctgcaacagtgactgaaccaccttgttctgaggcattaggatggtgctttctcccagcttgagggaaggcaagctgatccacctggcctggtttcgttgcggcctcctccctctgcctccttcagggcccctgggctctccctgttctccctgcaggtggccatgaacatcctcaacagcggccggttcagcatgggcagcgtcgcgcctgggctgctcaagagattgattgaaatgactgctgagtacgcctacactagtg

SEQ ID NO: 16309 - DNA, 1048 bp, Homo Sapiens
tgcggcgctaagaaggggagactgaggctgaggctggggaacatcgggcagcatgagcggctgcgggctcttcctgcgcaccacggctgcggctcgtgcctgccggggtctggtggtctctaccgcgaaccggcggctactgcgcaccagcccgcctgtacgagctttcgccaaagagcttttcctaggcaaaatcaagaagaaagaagttttcccatttccagaagttagccaagatgaacttaatgaaatcaatcagttcttgggacccgtggaaaaattcttcactgaagaggtggactcccgaaaaattgaccaggaagggaaaatcccagatgaaactttggagaaattgaagagcctagggctttttgggctgcaagtcccagaagaatatggtggcctgggcttctccaacaccatgtactcaagactaggggagatcatcagcatggatgggtccatcactgtgaccctggcagcgcaccaggctattggcctcaaggggatcatcttggctggcactgaggagcagaaagccaaatacttgcctaaactggcgtccggggagcacattgcagccttctgcctcacggagccagccagtgggagcgatgcagcctcaatccggagcagagccacactaagtgaagacaagaagcactacatcctcaatggctccaaggtctggcattactaatggaggactggccaatatttttactgtgtttgcaaagactgaggtcgttgattctgatggatcagtgaaagacaaaatcacagcattcatagtagaacagagactttgcgtggagtcactacatgggaacacccgcaagcatacaattaggcatccggggctccaacacttgtgaagtccatctccgaaaacaaccaagtatacctgtggaacaacatccttggagaggtcggagatgggtctaaggtggccatgaacatcctcaacagcggccggttcagcatgggcagcgtcgtggctgggctgctcaaagagatgattgaaatgactgctgagtacgcctacact

SEQ ID NO: 16310 - DNA, 444 bp, Homo Sapiens
gtgatgctgagggtgctctagagcgatcccgttacaccgaggggtggggagggagggaaataaggctcaggtgggggttgcaccccctctagtggctggtgaagagcagtgggcccagagcagccacccgccaggttgctcccaccctagcctgggtagggatcctcatcccagagacacagctgcctctggggcacgtagaagtcgaagctgtagctcttctggcagctgcggatgccacacttgtagggcgtgggccggtcgcggctgtggcagtacttgagcatgcaggggtaccaggccaggctcaggccatagtggcagacgcagggcttcccgcggtcccccacctgcctgcagcgaggcagctccgcctgctctgaggccttgggcagagcctcgaacacagaactgtccaccccgtcggtggagcggatcctcaag

SEQ ID NO: 16311 - DNA, 1288 bp, Homo Sapiens
  misc_feature (352)..(392): n is a, c, g, or t
  misc_feature (1198)..(1198): n is a, c, g, or t
accaacaccccaaacaaaaacaaaaaggagcaaccggtccggaatttcgcgatgaaaacacaggctcgcagcgctggagcccggggccgcggagccgggccggggcagcgccgtctccgcctcggggccgccgggggcgccctgctgagcgctacccacgtgcgtccgcgccacctcgcgggcgaccccgcggccaaggcccccggcggagcggctcccgggcgccccgaactagcccccaactttgggcgaagtttgcctgcgcctctccccgcccccacgcggcgcgccggggccgcggacggcagcggcccccggggatgcgccttcccggggtacccctggcgcgccnnnnnnnnnnnnnnnnnnnnnnnnnnnnnnnnnnnnnnnnnggaacgggtgcgccggccgagctgcgggtccgcgtgcggctgccggacggccaggtgaccgaggagagcctgcaggcggacagcgacgcggacagcatcagcctcgagctgcgcaagcccgacggcaccctcgtctccttcaccgccgacttcaagaaggatgtgaaggtcttccgggccctgatcctgggggagctggagaaggggcagagtcagttccaggccctctgctttgtcacccagctgcagcacaatgagatcatccccagtgaggccatggccaagcctccggcagaaaaatccccgggcagttgcggcaggcggaggaggttcggggtctggagcatctgcacatggatgtcgctgtcaacttcagccagggggccctgctgagcccccatctccacaacgtgtgtgccgaggccgtggatgccatctacacccgccaggaggatgtccgggtctggctggagcaaggtgtggacagttctgtgttcgaggctctgcccaaggcctcagagcaggcggagctgcctcgcctgcaggcaggtggggcgaccgcgggaagccctgcgtctgccactatggcctgagcctggcctggtacccctgcatgctcaaagtactgccacagccgcgaccgggcccacgccctacaagtgtggcatccgcacgctgccagaagagctacagcctcgacttctacgtgccccagaggcagctgtgtctctgggatgaggatccctacccaggctagggtgggagcaacctgggcgggtggctgctctgggcccactgctcttcancagccactagagggggtggcaacccccacctgaggcttattttccttccttcccacttccttggcctagagctgggcccttttggcccat

SEQ ID NO: 16312 - DNA, 1176 bp, Homo Sapiens
  misc_feature (56)..(56): n is a, c, g, or t
  misc_feature (63)..(63): n is a, c, g, or t
  misc_feature (72)..(72): n is a, c, g, or t
tgagctccacaaacaagaatactcactcaacacaaggcatcgatggaatcatcccnaatcagntggtgtcancagcgaaatgccaagccctggatacctgcatcacgtgaactacaccggagactatcgctcgatcccacgcgatcagacctcacgcgatcgcccgacgcgttcgcacagatatgggcactagactgacatgaatactgcatggacgcaatggatcacgtggcgttttccatagctatgaaacttatcaagactgaagctacaaggatatcagctaccctctgcacttccccccgtcatgaaacagcaaccagttgctatttctagcgcaccagcatttggtatgggaggtatcgccagcatgccaccgcttacagctgttgctccagtgccaatgggatccattccagttgttggaatgtctccaaccctagtatcttctgttcccacagcagctgtgccccccctggctaacggggctccccctgttatacaacctctgcctgcatttgctcatcctgcagacacattgccaaagagttcttcctttagtagatctggtccaggatcacaactaaacactaaattacaaaaggcacagtcatttgatgtggccagtgtcccaccagtggcagagtgggctgttcctcagtcatcaagactgaaactaccaggcaacttattcaatagtcatgaccaaaactactgagtggacacttaacaggtccccaagcaagaactattcttatgcagtcaagttaaccacaggctcacctggcttcaaaatggaatctacctgacattgatcaagatggcaacctcccagcaacaggacatatcctggcaatgcaccctccctgcatgtcacccaattcctgacccaaccaccgacaccactcctacctcccaaaaaacttacacaatactttcaaaacactcaaacctgcccagcgacaatccatgcatacaggaccacactatcagaccaacacacaggcacacagcgaccccacgtacacaccagaccagagatcctcaaacgagcacctcccaacaactcgcgctgcaaacacccacgcaccaacctcaacactgccacccggacagcaaacaaagcaagacccagagacacaccgcgacgacgccaaacagaaaactaaatcgtag

SEQ ID NO: 16313 - DNA, 468 bp, Homo Sapiens
tcgggcccgtttatagcacgtggtagggcaaagaagagaccatcatgtgacaggtagagctttgtaacctgggaaggagaaggatgaaaccacactgcaggggcgtaaaaggaaatgagcagcaagaaagtggaaagatctgcaaaaggaaagagaaggaccagagtgaggggcctcgggaaagcaagaaccagccatgttgccagtggagatgggaatggaaaagtgaagtgtcagaggatatagttggtataaggcagaaaacattaaaagcacagaaaagacaggagtctttttcttcctttagtagatctggtccagggtcacaactaaacactaaattacaaaaggcacagtcatttgatgtggccagtgtcccaccagtggcagagtgggctgttcctcagtcatcaagactgaaatacaggcaattattcaatagtcatgacaaaactatgagtggacact

SEQ ID NO: 16314 - DNA, 532 bp, Homo Sapiens
  misc_feature (496)..(496): n is a, c, g, or t
cacagttctggctcagcgtcaggctcctaggccttttgtctggggcactgcatcgtgttggtccagaccctgagacggccagtgtcgctttctgcacagcaggacagccatgcccatctgtacagggcctcagcctccctctcttgcggtgcgtctccttgagctctgtcctggaggtgccaggtgtggtcagtgacagccaccccctcacccttctgcgttctgggctgtcttaggtctgcggttgttgtccataccaagagagtccacggaccgtcccgagtgggcgcctctggccgcaggcccttccttccttgtgcctgctccatgtgctaggctttgactccatttctgtggcgacacgttgtgtattctcaacccctgcctttggttttttcaggcctagctctgctagccccagcgcgaagccctctggatcagcagttaacatgggctctgtgcagggacactacgtgcaacaggtagaagatggctntccagacccttcagccctggacacttaggcccgtct

SEQ ID NO: 16315 - DNA, 993 bp, Homo Sapiens
attcgagctcggtttccctgaaggaccagagctctccaggcggcgctggctcaggcatccagcctccatcctctgtgggtgcctccagcggggtcaactacagctccttcggtggagtgtccatgccacccatgcctgtggcccctgtagcaccttctgcttctatgccaggcagccacctcccgcccctgtacctggatggccatgtgcttgcaagtcagccccggctggttcctcaaacgatacctcagcagcagagttaccaacaggccgccgctgcccagcagatcccgatctcccttcacacatctctgcaggcacaagctcagcttggactgaggggtgggcttcctgtgtcccagtcccaggagatcttcagctccttgcagcccttcagatctcaggtgtacatgcaccccagcctgtcaccgcccagcaccatgatcctctctgggggcacagccttgaagcctccatactcggcgttcccaggcatgcagcccttggagatggtgaagccgcagtctggctcaccctaccagcccatgagcgggaaccaagccctggtctacgagggccagctcagccaggctgctggcctgggtgcctcccagatgttggactcccagctcccacagctgaccatgccactgcctcggtacggctccgggcagcagccactgatcctgccccagtctattcagctgccacctgggcagagcctctccgttggggccccccgaaggattcctccgcccgggtcccagccgccagtcctgaacaccagtcagagagccctctcagatggagatgaaaggcttccactttgccgacagtaaacagaatgtcccttcaggaggccccgtgccatcgccacagacctacaggcctagctctgctagccccagtgggaagccctctggatcagcagttaacatgggctctgtgcagggacacacgtgcacaggcaaaacaacgagtggatgagaaacc

SEQ ID NO: 16316 - DNA, 379 bp, Homo Sapiens
  misc_feature (136)..(136): n is a, c, g, or t
cggaagtatctgctgggggaggggaaggagcacagtcaccctcattgagaaatccctgcctcagataatgctcacaacaatcttgcgggtaggtcttatctccatttctgcagatgaggaaactgaggcccagggnagattaaatggccacatggctagggcatggcagaagtgaggcttgaggtcatccccatatgttcagtccttcatcttcagttttccaatggtcgccagttatacgcagctaatctttgcagtgaaagttgtctttggagaatgtgctttcttggtcccgggtggtcctggtcttgggctggaatctacgtgagctgctttgaagtaagctgacaatacacaattatgaaggctattttgacct

SEQ ID NO: 16317 - DNA, 943 bp, Homo Sapiens
  misc_feature (497)..(506): n is a, c, g, or t
aaaggtgagcctgctggaccggggagctttcctcaaggcctccgcctggctatgatggcgttagggttgaggggaagcttcatccaaaatgcacagtacttggatgtcaagatgatgttgctgctctcaggatgagtcactctccaccactgacttcctttgatgttctgagctcagcctggagtctgacctgggactatagcacttgttctcccaaggtaaggctggcggccaaacccagctgcgcacacctgaacctgctccttggcagagatgaagggcgtcatgtttcgtagccactcaacacccatggacaatttggctccttgtaaagacttagtcatgcctttgaactgacttacttgaaatataattgctcctattttgctccaaagaccagtggcatgatgggttagagttatttgtatttattgagattgttgtaattagcaatctcagggctcagtctaactgcattatccatgctggaaaacttnnnnnnnnnntacagtccttcatcttcagttttccaatggtcgccagttatacacagctaatctttgcagtgaaagttgtctttggagaatgtgctttcttggtcccgggtggtcctggtcttgggctggaatctacgtgagctgctttgaagtaagctgacaatacacaattattaaggctattttgacctgcaagtatggtttcttaaaaaggaacaattaaataccatgtagcagttatttagactttagcattgactaaggaaaggagaaaatggaaaaagaaccccctcctgcttagatgtagtcatttttttaaaaagtaatcttttggggaataaacttaaccaaggaggtgagggacttgtaaacaaaatgttaaaactgcactgaagactagaaaatgttgatgaaagctgttgtaactggagctgttgtaactggag

SEQ ID NO: 16318 - DNA, 284 bp, Homo Sapiens
  misc_feature (23)..(23): n is a, c, g, or t
  misc_feature (66)..(66): n is a, c, g, or t
  misc_feature (254)..(254): n is a, c, g, or t
agaaaactctatagggtgttgtnttcatgagtggtagaaggtcaaaactatgtgtaagtcattttnaatctcaacatttgatcttaaaaggagaagcaagaggaagagttgctcactacgttacccccaccaacaccctcccagataaatgcagttggcattgccattgacaaagtggtacaggaatttggcttacacaatgaggaacttggaacagaggctagaaattaaacgtatcatgggaaaatgtgttnccaacacaagttaccaggtatttttctagg

SEQ ID NO: 16319 - DNA, 505 bp, Homo Sapiens
gaaggccctgtgatcgatgagtctgtactttcaacgaaggagctgctaggcttacagcaggctgaggagagactgaagagagactgcattgacaggctaaaaaggcgaccacgaaactaccctacagcaaagtacacctgcagactctgtgatgttttaattgaatccattgcatttgcccataagcatatcaaggaaaagaggcacaagaaaaacattaaggagaagcaagaggaagagttgcacactacgttacccccaccaacaccctcccagataaatgcagttggcattgccattgacaaagtggtacaggaatttggcttacacaatgagaacttggaacagaggctagaaattaaacgtatcatggaaaatgtgttccaacacaagttaccaggtattttctagatttgtttttctatttaactacctaaaagtacctcattcatttctcctaccaatagtaattttcatcaaataaaaatttatttaccatgtcatg

SEQ ID NO: 16320 - DNA, 585 bp, Homo Sapiens
ctgcaggctttcggacagtcctttctccagcccgacatccacctttttaaacaaaatctcttctacttggagactctcaacaccaagcagaagctgtaccacaagaagatcttccggactgccatgctgttccagtttgtgaacgtgctgctccaggtcctggtccacaagtcccatgatcttctgcaggaggagattggcatcgccatctacaacatggcctcagtcgactttgatggcttctttgccgccttcctcccagagttcctgaccagctgtgatggtgtggatgccaaccagaaaagtgtgctggggcggaatttcaagatggatcgggacctgccctcattcacccagaatgtgcacaggctggtcaacgacctgcgctactacagactctgcaacgacagcctgccccctggcactgtgaagctctaggcctgctactgcctggggacacggacttctgctgctgccacctgcgccaaccctaccttccaccacagatgtctcccagatgggccttggtcaactctgcttctcccaccgcaagcacgcgcctgcctctccgctaactcgctggac

SEQ ID NO: 16321 - DNA, 376 bp, Homo Sapiens
attgcagcagtgtctggcacccgagaggccctagggacgtattcctcttgttctttttctcccacagcgcctggcacagagtctctgtgacacgcagtgcaacagtgaatagaagttttgagttttagaaagtgctcccctatcttcagtgcacactctgggatggaagtagctgttggggtctggtgggtgggtgacctggtgtgttgttggctgcagctatgcccctgccttccaggacctgccctcattcacccagaatgtgcacaggctggtcaacgacctgcgctactacagactctgcaacgacagcctgccccctggcactgtgaagctctaggcctgctactgcctggggacacggacgtctgatgct

SEQ ID NO: 16322 - DNA, 495 bp, Homo Sapiens
ggcgctcggtcctctggatgcaagtgtcatgctggagtccctcagctccttagctgaaaagagctgaaggggcctggaacctgggggagctgcttactttgcaaggttttgcccagctgctgctgcgtagctggatgggactgtctctcattaacttcctctctggtgctattttctgtcgtgttggtagctatgagcgctcccatccccctttcctcttttgcagtcagtggaaccgttttcatttcaactttggtgagaggtttaggcagaatttgctccatgggaacatctttgccttgaagcagctgagtcactaaaggattattagcagggagttacagccactggcacactagcatctgtctttgatgaggctgaagggttaggtatattcttactaggacctgctttgagctcaactgtgccatcagctgcacaatgaacaggtgaggcacctgagattagagcaggacctgttggagaaggtgcttt

SEQ ID NO: 16323 - DNA, 697 bp, Homo Sapiens
tgggctgtctctcatgactgcctctctggtgctattttctgttgtgttggtagctatgagcgctcccatccccctgtcctcttttgcagtcagtggaaccgtgtgcatttcaaccttggtgagaggtttagcgcagaatttgctccatgggaacatctttgccttgaagcagctgagtcactaaaggattattagcagggatactagaggttggtcttaaagtgggtccattcatgtttaaagaagttcctggggttttaaggctagaagctgctggcaaagtgctcgagggtggagctgatccagcaggtgctgtagttgcactgacctggggtacaggaagcttttctaaagtggctgtggtcaataaagatgttaaaggggagggagttacagccactggcacactagcatctgtccttgatgaggctgaagggttaggtatattcttactaggacctgctttgagctcagctgtgccatcagctgcacaatgaacaggtgaggcacctgagattagagcaggacctgttggagaaggtgctttctcctgtctgcaactactgggcccttgtggatggctgacagaggccactgtggctgttgctctggtggggttcagtttttcattatcccatttccctatgtgggctggtgatgggacacttgcatccagagaggatcctctagacgaccc

SEQ ID NO: 16324 - DNA, 478 bp, Homo Sapiens
  misc_feature (458)..(458): n is a, c, g, or t
ttgaaatgggcacagaaattcaacactaatgtcataatgtaagctttaaacaatttcattttacagcaagaaagagatgaccgacacagaaaaataaagattcttctaaccccttatctgaatacaacacagataactatttgcctgcacctaagcccagacacagaaaatgttcattcaactgcactagatataatggcaatgtatgaacaagactgttctacctcattcatctgcttggctaggcactgtcttttcttctttccattactgcccaaacctctattgtctcttcattatttgagttcttccagttcttagaaagagggtagtttcttcaagagcctcatcataatagcaggctgacaggcaggtgtccctgcccacagactgcacacggatcaaaatgctgtttacaccatacttctgaaacaccagaaaatttctgtgcccatttncaggtaccgagctcgatcta

SEQ ID NO: 16325 - DNA, 580 bp, Homo Sapiens
  misc_feature (38)..(38): n is a, c, g, or t
aggacccctctattaagtgcctgtaaagcctgtaatgnctgtaagcacatgaacccagctgaggatgcgcttagttctgcttggctctgctgcagcaagtccttcgggagacctgtgggaacatatggagctacctgagcaggagctgatattttaacagaaatataccatatctggttaggttcttttcttctttcaatctaatttggaataataggggccaagaactgtccaaactatttctgttcttgacttacgtatatgatacttagaagcagaaagactgttaacaccaatgtgacattatcaagggggattctatttgcattctttataaatgttaactatatatggaggcaggaacgggcagtgaatgaagttagcttaaaacatatttgacatttaaatgccaaattcacctccccctttccgaaccagcttgttttagtgaaatatttttacctttaaaaaatgggtgagggaggattaatttattaagtgagaaagtcataagaccattcagtatacatctcccaaaatctgtaaatttctgtgccctttcaggtacgagctcgatcta

SEQ ID NO: 16326 - DNA, 551 bp, Homo Sapiens
  misc_feature (441)..(510): n is a, c, g, or t
cccgcaagacgggggcaggggcttggccgcggctcatggctcttcctgcagaaagacatcacattctgggcatcagcatcgtggggcagagcaacgaccgtggagacggcggcatctacattggctccatcatgaagggcggggctgtggccgctgacggccgcatcgagcccggcgacatgttgctgcaggtaatgacgtgaactttgagaacatgagcaatgacgatgccgtgcgggtgctgcgggagatcgtttcccagacggggcccatcagcctcactgtggccaagtgctgggacccaacgccccgaagctacttcaccgtcccacgggctgacacggtgcgttggcccaacacggtgcgttggcccaacacggtgcgttggcccaacacggtgcgttgggttgggccaacgcaccgtgttagccaggatggtcnnnnnnnnnnnnnnnnnnnnnnnnnnnnnnnnnnnnnnnnnnnnnnnnnnnnnnnnnnnnnnnnnnnnnngcgccccgcctgcttttctcctttctggctacattgtgaat

SEQ ID NO: 16327 - DNA, 526 bp, Homo Sapiens
  misc_feature (345)..(462): n is a, c, g, or t
ttgggccaacgcaccgtgttgggccaacgcaccgtgttgggccaacgcaccgtgttgggccaacgcaccgtgttgggccaacgaccatgccacactgggagttgatttttcggctacagccgggacctatacagcttaagcaagagagcctgcttgcctgggggccagggagccccttccaccaggcccaccctaaactgctcattcctgaccttggtgcagtgggggcagttaagataaccccccaacatcatgatgagcaaatcccactaaggggtgttgcttttacacgggcctgtctcccatggtggctgtgcagataatgatggtgatgacgataacggnnnnnnnnnnnnnnnnnnnnnnnnnnnnnnnnnnnnnnnnnnnnnnnnnnnnnnnnnnnnnnnnnnnnnnnnnnnnnnnnnnnnnnnnnnnnnnnnnnnnnnnnnnnnnnnnnnnnnnagtgatggtgatggtatgagtggtgaatgatggtgataatgatagtgacgtcgggaatgcatgc

SEQ ID NO: 16328 - DNA, 479 bp, Homo Sapiens
caccccaaagtcgagggatgtacagcaacagaatgagaagctacaaacaagaaatgggaaaactcgaaacagattttaaaaggtcacggatcgcctacagtgacgaagtacggaatgagctcctgggggatgatgggaattcctcagagaaccagagggcacatctgctcgataacacagagaggctggaaaggtcatctcggagactagaggctggataccaaatagcagtggaaaccgagcaaattggtcaggagatgttggaaaaccttagtcatgacagagaaaagatacagcgagcacgtgaaagacttcgggaaacagatgctaatttgggaaaaagctccaggattctgacagggatgttgcgaagaatcatccagaaccgcatcctgctcgtcatcctagggatcatcgtggtcatcaccatcctgatggcgatcactttttctgtcagaagacactgatgtatctgctct

SEQ ID NO: 16329 - DNA, 431 bp, Homo Sapiens
  misc_feature (373)..(373): n is a, c, g, or t
ctcgcccagcagataccaccgtagagtcgagggatgtacagcaacagaatgagaagctacaaacaagaaatgggaaaactcgaaacagattttaaaaggtcacggatcgcctacagtgacgaagtacggaatgagctcctgggggatgatgggaattcctcagagaaccagttgataaaattacgtgaagagagggcacatctgctcgataacacagagaggctggaaaggtcatctcggagactagaggctggataccaaatagcagtggaaaccgagcaaattggtcaggagatgttggaaaaccttagtcatgacagagaaaagatacagcgagcacgtgaaagacttcgggaaacagatgctaatttgngaaaaagctccaggattctgacagggatgttgcgaagaatcatccagaaccgcatctc

SEQ ID NO: 16330 - DNA, 528 bp, Homo Sapiens
aatctcaggggcgatgctgcgggccctttgagcatcgtggatggtgacgtcacgtgtgccagctgctcggaggatccagaatgggcaacatccatctgaaaccttccttctcctgacggcctcaagatggacgcgggcatcatctgtgatgtgtgcacctgcgagctgcaaaaagaggtgcggtcagctcgctgcagcttcaacggagacttcgtgtgcggacagtgtgtgtgcagcgagggctggagtggccagacctgcaactgctccaccggctctctgagtgacattcagccctgcctgcgggagggcgaggacaagccgtgctccggccgtggggagtgccagtgcgggcactgtgtgtgctacggcgaaggccgctacgagggtcagttctgcgagtatgacaacttccagtgtccccgcacttccgggttcctctgcaatgaccgaggacgctgctccatgggccagtgtgtgtgtgagcctggttggacaggcccaagccgactgtcatcaacgcgggcc

SEQ ID NO: 16331 - DNA, 529 bp, Homo Sapiens
ctgagatgacagtcggccctgcctgcgggagggcgaggacaagccgtgctccggccgtggggagtgccagtgcgggcactgtgtgtgctacggcgaaggccgctacgagggtcagttctgcgagtatgacaacttccagtgtccccgcacttccggggtcctctgcaatgaccgaggacgctgctccatgggccagtgtgtgtgtgagcctggttggacaggcccaagctgtgactgtcccctcagcaatgccacccgcactcgacagcaatggagggcatctgtagatggacgtggcgcactgtgagtgtggccgctgtcactgccaccagcagtcgctctacacggacacaatctgacgagatcaactaactcggcgatccacccagggcctctgcgaggacctacgctcctgcgggcaatcgccaggcgtgagggcaccggcgagaagaaggggcgcacgagtgaggaatgcaacgttcaaggtcaagatggtggacgagctaagagagccgaggaggtgggccga

SEQ ID NO: 16332 - DNA, 378 bp, Homo Sapiens
tatatattggtgggtcagctcactcatgtgtagaggaagcaacagtcttcagagctctggctgccaggtggggaggaataggctgctgtctccccggagtgttggctcccactccgtgagtcaggattgcataagaggactcggacaatgcttgccaaaggcaataccagtgatgctctgcgaatgccccacaaccttcagaaatagagacagatttcttattactaaaaaatctcaacacattttagtgcacaaacacacacattacttgggatgtactctcaaaggcaattgtaaatccatttaactgaaatccagataccagtgtatgccaatggccaaattatattaggatacctttgccctgataatgttagc

SEQ ID NO: 16333 - DNA, 503 bp, Homo Sapiens
gcagggacggatggctgtttatatttgggggattcagcctccctcatgtgttaaaggaagcaacagtcttcaaagctctggctgccaggtggggaggaataaactgctgtctccccggagtgttggctcccactccgtgagtcaggattgcataaaaaaactcagcaatgcttgccaaggcaataccagtgatgctctgcaaatgccccacaaccatgctggtcctgctcagtggtgcatacctggctccaacactcatggttttggatgaaagcacttgctgcaatgattcctactgccaacagcatgaagtcttccttcactgaagtaaacttttccccttgcagctgactgggagtggagttctcaattgaagccctcaacaggctctcatatatgggttcatgcagaagatagaccaggtcgagcagtgtcaggcaggttgcatgcagcctcatggctggaaccaaacagccattgtatcctaaaacctctaggagcgt

SEQ ID NO: 16334 - DNA, 520 bp, Homo Sapiens
ttaagattatcgtcacatcatatggacgttaagggcccacatgtagctagcacgtgcgtccgcctgagagtaggtatacagctgttaacggcaacttgaattgacgggtccgtatggaaaggaccatgccaaacataatgcacaatgattgtaatctctagcttgctaccccgaacctgagtgaactcccacatttactcctcgtacttttgggtcttgctacttgctcgctgcttagctgcacttttcgcaatgccatgcctctcccccctcgggtttctgctgagtaattccaaatgcttatttcgtttgaaattcattgcatatcattcccctgggaaggacttaaacgagcctgcctccgcggacccgtaattcaagcggacccgtcaattcaagttgccgttaacagctgtatacctactctcaggcggtcgcacgtgctagctacatgtgggcccttaacgcccatatgagtgacgataatcttaactcaggccgacgataatcttcgacgagt

SEQ ID NO: 16335 - DNA, 423 bp, Homo Sapiens
tgcttggcagtgggccagggtgtaggtatccgttcaagagtacttcgtagggctgcccttgaattgataagatccgctaaaattgacgcgtacgctaaacattaacaagtccgctcgaatcgaccaggccataaatccctcagaacttcagcacatccgaagagggccccataggtcatcatcataccatcaactttgaacacgaaagttataaagcatcatcctccttgtacagctccagcggcggtacctcccgggcacgcgccccggacccgtcaattcaagttgccgttaacagctgtatacctactctcaggcggccgcacgtgctagctacatgtgggcccttaacgcccatatgagtgacgataatcttaactcaggccgacgaaaatcttcgacgagtcagggttcttccaggag

SEQ ID NO: 16336 - DNA, 404 bp, Homo Sapiens
ttgtatggtctgacgtgtactcatgatcggcgccaagagcaggttacggcaacttgaattgacgggtcgcttgaattggcgggtccgcatcggctcacctcctgtgaaaccacaggtcaacgcccagccctggctatgaactcctacaaatcgggaccattctcgagcgcgtgacgggggcacgcttcgtttgccgtcgaggcgcttagttggatgttggccggcgcgcacgcaggccgcggagaggtacccgtggccacacctgaccgccgcgggcactcctccaggacccgtcaatccaagccgccgttaacagctgtatacctactctcaggcggccgcacgtgctagctacatgtgggccctttaacgcccatatgagtgacgatattcttaactcaggt

SEQ ID NO: 16337 - DNA, 360 bp, Homo Sapiens
cggccggtgctcctgcccatgtgcagcgttcccttctccacagcaaatccttagaggaagcgttcacgatgaagggctggcccatagaagatgctacgcaaatatctgttgcattaaaccgacaaaagttcacagcacttctgagaaccctgggaggtgtttctttcaatcttaagttttttagtaatcaggtgctctgacaatcttcactcatcttaacgtttccatctcctcttatccaagttggggccacccctctctctttaacagatgtattagtctgttctcacactgctaataaagacatacccaagactgggtaatttataaaggaaagagttttaatggactcacagttcc

SEQ ID NO: 16338 - DNA, 507 bp, Homo Sapiens
agaaatttcttccaccagatacctaaatcatctctctcaagttcaaagttccacagaactctatggcaggggcaaaatgccaccagtctctatgctaaaacataacaagagtcacctttgctccagttgtcaacaagttcctcatctccatctgagaccaccgcagcccggaccttattgtccatatcactatcagcattttggtcaaagccattcaacaaagactctaggaagttacaaactttcccacatcttcctgtctcctgagccctccaagtctctaggaagttccaaactttcccacattttcctatcttcttccgggtcctcgaaactgttccaacctctgcctgctactcagttccaaagttgcttccacattttcgggtatctttatagcagtgccccactacctggtacctatttactgtattagtctgttctcacgctgctaataaagacatacctgagactgggtaatttataaaggaaagagttttaatggac

SEQ ID NO: 16339 - DNA, 779 bp, Homo Sapiens
cggtggcgggctgggggggctggggacactcctggccaccggtgaggttgcccgagtctgggtggatgatgaatgtaccattcacgtttcccctaaagatgctgtagatgatgggctggttgatgccgcggtctccgtcctcagcgtagatgggtccgggacgcaggacgaggggagatggcagtatgtgccccgtggggacagccccgtggtactgagcttgaatgcagacgtagccatctgagaagggtgcagggcaaggaaccacgggggccgcaggtcggcgggcaccacgttcagcactagtgtggcggtggcagtaacctcggaaatccccacggttgctgaagatgggtcggatctggaccacctccccacaggcctcgaagagtggcctgagcttcgtgtccggctcctgcatgctgtagggcaggttgctgacaaagacggtgatgctgtccttgctgctgtcgtgcagaaccttgggcatgtccctcttcagggaggctgccttctccttctgcttcgaagggggctccacatctacggcagcacatttcccagcgggccctgctgctacttctacattttgtgtttctccagctgcagggatgctgttctcgacccttctgcgtttggaaggctgctttacaggttttcaaaagtaaagtagccatgattacctgttacttctcttcagggagcttgtacagagctgtgaagtgaaagtgctccgcccaagggttttccaaaccacgacccgccacagtctccacggt

SEQ ID NO: 16340 - DNA, 828 bp, Homo Sapiens
ggacgaggggagatggcagtatgtgccccgtggggacagccccgtggtactgagcttgaatgcagacgtagccatctgagaaggtgcagggcaggaaccacgggggccgcaggtcggcgggcaccacgttcagcactagtgtggcggtggcagtgtggctgggttccacattctcccccggagtgtcccgcaccagcagccagaaggtcatgttcggccgctcgtagaagtccaggggccggtccagcctcagggcgggacggtttacactcaccagggagaagtagtcactggcacctgctgtcatttcctggagggtgtagaacagaatgtcgtccttgtcgcggtcctcagcctgcagttgcgtctcggggattgacggtggagttcactttcgtgtcctcctccacccttatctccttggtcttaaaggggaattcgggggcattgtcattgacgtccagcactgacacgaacacccttagctgggtcaccaatgtgcctccgctctgacacagcagctgagcctcaagcagtgacttctcctcgtaatcaggagtcacgttgagaaacagctggtttccgtggatccgaaatgcaaagggggtggacaaggctccgagggtcacctccatggccctccgggacgtggatgtccaccagcggctcggtgacatttgtgttctcctctacttcaaagatgtccttgttcacagagcagtactgggcctgggccatggtccccgggggtcggacgagcagcccggtgaacagcaggggagtccacagcaggcccaagaccccatcttggcggctgtcacctggcag

SEQ ID NO: 16341 - DNA, 1089 bp, Homo Sapiens
  misc_feature (105)..(106): n is a, c, g, or t
  misc_feature (113)..(113): n is a, c, g, or t
  misc_feature (585)..(585): n is a, c, g, or t
ctccccacccctccaggcccggggctgaaacagcccgaggacagcccaaggggctggccttcaccagctgcagggtctgcttttacttggggtgggggggcgggnnctacccntgaaccctcccccccgccaggtcggggaggggtcccaccactcaaagtgcctctaaagaaaccagctttttgcactaaagccaaaccacaccgctgtccccttagccccaagggccctgggggcagccaccctcccgcctgtcggcccgtagatttatcaagggtgttatgggcccagctttggggggccagtcccgatgcactttgaggggtgttggagaggggactcccccactcgcacttaactcaacggctctcgggccctggggctgtttttaccatgtttgtttttgaagctcaggtgtctcacgtctgggctgcaccaggcgaagagagaaattaaagatttgaggtttttccagaagctttgtctgcctctcgggaggaaggccgtggggctgggaccctgtggtgggcaagtgggtggagtctggcagctgcccacagagggccgagggtcacccgtcggccngccgcaccccaggcgaggccggaggaaggatcatctgagacgcaggaggcatctgctggagcagcaatttcccaatttattgaaagtgatcgctttgcaaggatgtctaagctaatcccgtcacagaaaggaaacgcacaggcgcctaggcagaaacttggagactcaccgcagaggccacgtgaacccacggtcacagagaggcaggacggcagagccatgatttcccaccgagcgattacgagaacctcttcccccaatagtagacacatctccaatacaaacacaggtttcatactcaagttaactaggggaacggtcccattattaacttattagaatttagtccccccagaaaaacacacatccaagcaaatctttcaaagacactgtacacaacaaaaccccaacagtccagtccatcacacaaccaaaccacaccacaacttcaacgacaaatactcacccccaacctcacgcgggggcgccctctaatactccccc

SEQ ID NO: 16342 - DNA, 555 bp, Homo Sapiens
  misc_feature (420)..(436): n is a, c, g, or t
gcgaccgcctgccccgaccctgcccccgccccctgtcctgagcaccgttgctaacccccagtcctgtcacagtgaccgtgtctaccagggctgcctgacgcccgcccgcctggagccgcagcccacggaggtcggagcctgcccacccgccttgtcctccaggatcggagtcaccctgaggaagccccgcggcgacgcaagaagtgccggaagtgtatggcatggagcgccgggacctctggtgcacagcctgccgctggaagaaagcctgccagcggttcctggactaagtccggctcgttcaagaacataagctaccaccttctccctccccaccccctccaggcccggggctgaaacagccgaaggacaaccccagggctagctttacaaccagcttgcagggtctgcttttacttnnnnnnnnnnnnnnnnnctgaccctgaaccctcccccccgccaggtcggggaggggtcccaccactcaaagtgcctctaaagaaaccagctttttgcactaaagccaaaccacaccgctgtccccttagccccaag

SEQ ID NO: 16343 - DNA, 863 bp, Homo Sapiens
  misc_feature (311)..(432): n is a, c, g, or t
ctgctccgcccctctctgtacccacagctgggggccaggcagcccccctctatccctcccagcacctcatccctctccacgtacacaacagatcccccaagtgctgagaatcaagctcccacctgcccacagcgtgcccacagatggcatccctggatggcagctcaggtggactgagacacttgagtcatcgctcaggaggtccttctgggatctgggcaggtgactgccccaggtggcaggacgtccccacccatcttagactgatcagggtcagtctaggagaacaaccctctgagctgggcatggtnnnnnnnnnnnnnnnnnnnnnnnnnnnnnnnnnnnnnnnnnnnnnnnnnnnnnnnnnnnnnnnnnnnnnnnnnnnnnnnnnnnnnnnnnnnnnnnnnnnnnnnnnnnnnnnnnnnnnnnnnnacaagcctctggccagggctaccttgtctgtggggccttccctttcctgtctgagtctcagttttcctccagcagcctgaggaaactcaaaggcacagttcccagatactccgagagaacctccatctctggcaacagtttccataacaacaggaatcagggatgtggagggcgatgtagtaggtgccccccgccctcctccccttctctccttcctcctcattctaacgcaagctgctggccatgcccctccagactgccccttgggggtgagtttcttgttagttggagttgctgggtgctggagtgggtgccgtctggcaggcctgatactgcacggagcctagggcagcaagctgacactagggacagaggagggaggggagcagctggggtggtggggagctagtctgccgaaaatgtgccagaga

SEQ ID NO: 16344 - DNA, 588 bp, Homo Sapiens
  misc_feature (235)..(363): n is a, c, g, or t
cctgctcgcccctctctgcgtacacatgagagtcccagtgctgagaatcaagctcccacctgcccacagcgtgcccacagatggcatccctggatggcagctcaggtggactgagacacttgagtcatcgctcaggaggtccttctgggatctgggcaggtgactgccccaggtggcaggacgtccccacccatcttagactgatcagggtcagtctaggagaacaaccctctgnnnnnnnnnnnnnnnnnnnnnnnnnnnnnnnnnnnnnnnnnnnnnnnnnnnnnnnnnnnnnnnnnnnnnnnnnnnnnnnnnnnnnnnnnnnnnnnnnnnnnnnnnnnnnnnnnnnnnnnnnnnnnnnnngacaaaacaagcctctggccagggctaccttgtctgtggggccttccctttcctgtctgagtctcagttttcctccagcagcctgaggaaactcaaaggcacagttcccagatactccgagagaacctccatctctggcaacagtttccataacaacaggaatcacgaccgtgcagggcgatgtagtaagtgccccccgccctcaatatccctgatcctggtggt

SEQ ID NO: 16345 - DNA, 843 bp, Homo Sapiens
cagagtcaaggtctatgtggtgggcagtttgagctggctggatactagagggaggctgcacctgaagcatttggtgggtgagcagcatgggctttgaggagctgctggagcaggtgggcggctttgggcccttccaactgcggaatgtggcactgctggccctgccccgagtgctgctaccactgcacttcctcctgcccatcttcctggctgccgtgcctgcccaccgatgtgccctgccgggtgcccctgccaacttcagccatcaggatgtgtggctggaggcccatcttccccgggagcctgatggcacgctcagctcctgcctccgctttgcctatccccaggctctccccaacaccacgttgggggaagaaaggcagagccgtggggagctggaggatgaacctgccacagtgccctgctctcagggctgggagtacgaccactcagaattctcctctaccattgcaactgagtgggatctggtgtgtgagcagaaaggtctgaacagagctgcgtccactttcttcttcgccggtgtgctggtgggggctgtggcctttggatatctgtccgacaggtttgggcggcggcgtctgctgctggtagcctacgtgagtaccctggtgctgggcctggcatctgcagcctccgtcagctatgtaatgtttgccatcacccgcacccttactggctcagccctggctggttttaccatcatcgtgatgccactggagctggagtggctgcgatgtggaggcaccgccaccgtggctggaggtctgagccagcccttctggacagggggcgtgattgctgctggcactggattgggtacct

SEQ ID NO: 16346 - DNA, 1042 bp, Homo Sapiens
  misc_feature (862)..(863): n is a, c, g, or t
  misc_feature (903)..(903): n is a, c, g, or t
  misc_feature (942)..(942): n is a, c, g, or t
  misc_feature (948)..(949): n is a, c, g, or t
ctcccacctccagagtccaagggtctatgtggtgggcagtttgagctggctggatactagagggaggctgcacctgaagcatttggtgggtgagcagcatgggctttgaggagctgctggagcaggtgggcggctttgggcccttccaactgcggaatgtggcactgctggccctgccccgagtgctgctaccactgcacttcctcctgcccatcttcctggctgccgtgcctgcccaccgatgtgccctgccgggtgcccctgccaacttcagccatcaggatgtgtggctggaggcccatcttccccgggagcctgatggcacgctcagctcctgcctccgctttgcctatccccaggctctccccaacaccacgttgggggaagaaaggcagagccgtggggagctggaggatgaacctgccacagtgccctgctctcagggctgggagtacgaccactcagaattctcctctaccattgcaactgagtcccaggtcggtatttacataatccatctggaggtggaatgtcggtggaggcagtctccctgggaggcagcaggtcgaggccttccttgggaagcaagctgaggctgcaggactggggacgggacaaagtttcctattccccaagctggcgtgaatcgttgggcaggtttattatctggcatggagtgggatctggtgtgtgagcagaaaggtctgaacagagctgcgtccactttcttcttcgccggtgtgctgggtgggggctgtggcctttggatatctgtccgaacagtttgggcggcggcgtctgctgctggtagcctacgtgagtacccctgggtgctgggcctggcatctgcagcctcgtcagnntatgtaatgtttgccatcacccgcacccttactgcttcancccctggctggttttaccatcatcgtgaggcaccggganctgggnnatggcttggatgtggaacccgcaacccgtggctggagtcctgaacacacctttggggaaagggggccgtgagctgccctggccactggttggg

SEQ ID NO: 16347 - DNA, 1133 bp, Homo Sapiens
  misc_feature (1015)..(1024): n is a, c, g, or t
ggtccggaattttcgggatgccgccattgccgggcctgcctggccaccctgcgcagcggccttgcgtcctctccgggggcggagcgggtcggcgggcctgacagggaacctccctgaccgagcccacgtctccccacggccagagaaatctccggcccggcccgcatcgccagcccccaggcccggaggaacggcccgagcccaggagaaccacatcttcgtcccagccccggaggctcctgtgggcaagatcgtgagccaacgggttcctgaggcccctcctggccaggcagggtttccccgcgcgtttccgaggagccctgcctggccgggcggctggacaaacagtgcacttgccggcggtcccaacccagcaggagaagtggacatgaggttggcaggccctctccgcattgtggtcctagtcgtcagtgtgggtgtcacatggatcgtggtcagcatcctcctgggtgggcctggcagtggctttcctcgcatccagcaactcttcaccagtccagagagctcggtgactgcagcgccacgggccaggaagtacaagtgtggcctgccccagccgtgtcctgaggagcacctggccttccgcgtggtcagcggggccgccaacgtcattgggcccaagatctgcctcgaggacaagatgctgatgagcagcgtcaaggacaacgttgggccgcgggctgaacatcgccctgggtgaacgggcccctccctcctgaaacagggggtcagcgggcgagctcatcgaggccccggccttttgacctggggggccggaaatggcaaccaacccgggttgaaagtttattcgggcccctgcacaaagggcaccccgggggtttcgtggaatccctacaacgaaccatgcccccaaagattgattgaagaggacccgaaaggcccctttcaggggagccggggcagcacgggaacgcccagggaacctgggcccttccggggaaaagcctggggtggttttggcgcgggggccaannnnnnnnnncaaaaaacaaaggagccccctttggagcacctcacgtgaaagaaaacgggtaggccacaaacacacaatatacccaaggggcgggggcccccagagggcccttgggaaa

SEQ ID NO: 16348 - DNA, 1082 bp, Homo Sapiens
  misc_feature (783)..(783): n is a, c, g, or t
  misc_feature (936)..(950): n is a, c, g, or t
caccaccctcggctgggaccggtccggaatatccaaaacggtgcgcagcggccttgcgtcctctccgggggcggagcgggtcggcgggcctgacagggaacctccctgaccgagcccacgtctccccacggccagagaaatctccggcccggcccgcatcgccagcccccaggcccggaggaacggcccgagcccaggagaaccacatcttcgtcccagccccggaggctcctgtgggcaagatcgtgagccaacgggttcctgaggcccctcctggccaggcagggtttccccgcgcgtttccgaggagccctgcctggccgggcggctggacaaacaggtcgtagcaccgatcgcgcccgcccccagcaggggtcccgcacaggcttgcccctgacccccacccaaacctgtccttccgctttgcccccaaacagtgcacttgccggcggtcccaacccagcaggagaagtggacatgaggttggcaggccctctccgcattgtggtcctagtcgtcagtgtgggtgtcacatggatcgtggtcagcatcctcctgggtgggcctggcagtggctttcctcgcatccagcaactcttcaccagtccagagagctcggtgactgcagcgccacgggcccaggaagtacaagtgtggacctgccccagccgtgtcctgaggagcacctggccttccgcgggggccaccggggcccgccaacgtcattggggcccaagatctgcctcgaggacaagatgctgatgagcagcgtcaaggacaacntggggccgccgggctggacatcgccctgggtggaacggggttcagcggcgaagctcatccgagggcccgggccttttaaatgggggggcccggagaattcaacggacccggttggaagtttatttcgggcacctgccacaaaaggcacccctnnnnnnnnnnnnnnncatcctaccgaacgaccccagcccccccaggaatgaattgaaagaaaacccgaaaaggctccttccgatgaagccttggggcagccagggaaacgccccaaggaactggggcctttccccgggaaaaagcct

SEQ ID NO: 16349 - DNA, 1124 bp, Homo Sapiens
cggaagcgccgcagcccggtactggctcctcctgggctccctctagcgccttccccccggcccgactccgctggtcagcgccaagtgacttacgcccccgaccctgagcccggaccgctaggcgaggaggatcagatctccgctcgagaatctgaaggtgccctggtcctggaggagttccgtcccagcccgcggtctcccggtactgtcgggccccggccctctggagcttcaggaggcggccgtcagggtcggggagtatttgggtccggggtctcagggaagggcggcgcctgggtctgcggtatcggaaagagcctgctggagccaagtagccctccctctcttgggacagacccctcggtcccatgtccatgggggcaccgcggtccctcctcctggccctggctgctggcctggccgttgcccgtccgcccaacatcgtgctgatctttgccgacgacctcggctatggggacctgggctgctatgggcaccccagctctaccactcccaacctggaccagctggcggcgggagggctgcggttcacagacttctacgtgcctgtgtctctgtgcacaccctctagggccgccctcctgaccggccggctcccggttcggatgggcatgtaccctggcgtcctggtgcccagctcccgggggggcctgcccctggaggaggtgaccgtggccgaagtcctggctgcccgaggctacctcacaggaatggccggcaagtggcaccttggggtggggcctgagggggccttcctgcccccccatcagggcttccatcgatttctaggcatcccgtactcccacgaccagggcccctgccagaacctgaactgcttcccgccggcactccttgcgaacggtggctgtgaccagggcctggtccccatcccactgttggccaacctgtcctgtgggaggcgcatgcccccctggctgccggactaaaaggccccgttacatggctttcgcccatgactcattggcgacgcccagcgccaaggatcgcccatcttcctgtactatgcctctcacaaacccactacccaggtcagtgggcaaagtttgcagagcgttcagccggggccattggggacccctgag

SEQ ID NO: 16350 - DNA, 796 bp, Homo Sapiens
gcccggtaccggctcctcctgggctccctctagcgccttccccccggcccgactccgctggtcagcgccaagtgacttacgcccccgaccctgagcccggaccgctaggcgaggaggatcagatctccgctcgagaatctgaagggcctgccctcctgaccggccggctcccggttcggatgggcatgtaccctggcgtcctggtgcccagtctcccgggggtggcctgcccctggaggaggtgaccgtggccgaagtcctggctgcccgaggctacctcacaggaatggccggcaagtggcaccttggggtggggcctgagggggccttcctgcccccccatcagggcttccatcgatttctaggcatcccgtactcccatgaccagggcccctgccagaacctgacctgcttcccagccggacactccttgcgactggtggctgtagaccagggacctggtccccatcccactgtatggccaacctgtccgtggaggcggcagaccccacctggactgccctggactagaggcccgctacatggctttcgcccatgacctcatggccgacgcccagcgccagggatcgcccctatcttcctgtactatgcctctcgaccaaaccaactaccctcgagttcagtgggccagagctttgcagagccgttcagggccgcgtggccatatgggggactcccttgatggcagctggatgcagctgtggggaccctgatgacagccataggggacctggggctgcttgaaggggacgctggtcatcttcactgcaggaca

SEQ ID NO: 16351 - DNA, 899 bp, Homo Sapiens
gaaaaggttattatctttgctcattaggggcattggtgagctgcaaaggagtgttttagtacaagacaatgagtaaatgctgaagaagtagatgccttataaattctggagaatgttggaaatgaggggaagcagagaaaggggacaacagtattatagaaaatattttttagagaaaatataggctaaagcttataataattaatccttatagtttctatgaataccatgccctaaaagtggattgcacaggaggggaaagagttacaatttgccctctttgaggaccttgccttctgtatctgtatttctctctggtggcacatgtggtgaggaatcagcagagattgtcaagtcctttttctctgacagattttcaggcattacatataatttgataaatgagacatagagcagtctgccattatagcaaaacatcctaggtttggattaattgagtaagacctaatcctagcattataaattctggatcatcaagaatatctcagaatgtttcactctggatactagagaggaataggtaaaatacatgacttaaaatagattggagtacagggatccaaagtatgtacaattctaaactgaattattctctttagaaaaaggcagaccctgtctgagttagcacacacagctgtcagccataaagctcagtagataagggcacgtggacaaagtttctcctgttttattgtcttaaaattatagcacaaagataaataaaggcaggtcagggcctcatgactaatcttatgtctagtagccacttgaatagatcattgttttaaaatattttgttctgataagaaatttctcaaaacctcagattcactcagacatttgtagatgaacatttttcttggaaaactacaaatacc

SEQ ID NO: 16352 - DNA, 1006 bp, Homo Sapiens
gcatgagccatcatgctcagcctaatatggtcttaaataaatacactaaaatgtatagattttctattatcttgttaagaagcaacatgagggaagagttatggtagaaggacagacagtttggctctccttttataatgattctggaaatactactttcacagacagtttctcaattctccctcaaccttgattctacctcactaagtacactattaggacaaaaaaagttatcatggtgtttgcaaattctgcaaattctggaatgaacaatattacaactctgaaactcaacagtgttaccaaggaatgtcataagagctttttcttagaagagttttaaaataacatttgattggcaaagttacatatgacttcatttagaaacctggaagcaaggaaatcaatatgtgctattatcaattatgaagaacaaattctattccttttttgtcacgtatgtgctacaacatttttgcaaaactagtattggtatctttcatcagttttaagatattttcagccatcagttcttcaaatattgcctataatccttttataaacgctctcctcttgatactctgattacattttggttagatgctctctcattctaccctccatgtctcttcaacttctttgtcttacattccattttctctttctttctgggttgcagtctgaatatttttttctgaccctctttttaattcacaaattcttaagatgttaaacctgttcagttagtatttaatttctattgtatcttttgattttagaagctctatttgattttttcagttgacttattctttcttatttcaacactttcattttttgaactatattaatcaactattaatatagatatttttcatttaacttgttctttctcattttcacactttcatttttgaactatataatcaaatataacactttaaaatattgctcctcattttcaatgtggaaattatttccatcaaaaccatggtgaaattccccc

SEQ ID NO: 16353 - DNA, 913 bp, Homo Sapiens
gcacgagggtgaaatcagtgattttcacctgtcttctatgctgcactagggttctgtagaaagagctgatgggatcagagggatgtttgctctcctattgcctaagccaacaagaaaccctatatttttacaatgaaaagacatacatttagagatggcacaaactggtatttatgatgtgtatactatagtggactagggtgcgtgtataggagagtaactttccagatgaaataatgaattagcatctcattacgaaatggccccaaatatctgcttttactggtcagctatcaaaagaatatgtgtaaataaaggtacatattagaaatagtacacagttatgctagaaatgtttgccatagagacaaaatgtgcacaagatctcctcttcaacaaatatttacctaaaaatcaaatttaaaaatcgaaggatttcatttcttttagatccaattgattgcagttgagcattcagaatttcctttgaccctgagaccatggacaattggtaatataactgtaaaaaatgcataaagttagtgctataagaggacttagaaatacttcagctaattaccctcccttttcagtggggagctgaatctcaagggtcaaagtttatgctggaactggaacctaggtcatctcctgactcctagtcctgtgctcttcttagcacacacataatgctgatttcaaggcctctttagcaactcctctgaaatttgcaattaaggcagaaagcaacactcacatgtgatcttcctattttcctaatgcattaattttacattaatacttttcctattttcccacagttctaaaggtcatctttgctgttgccttttgcctgatatctgctgtcctaatggtactactgtttatccacattcgccgtggactctgctgg

SEQ ID NO: 16354 - DNA, 839 bp, Homo Sapiens
gcacgaggacccaatacccatgggccacctggtctgtaccagtctcactagccaccgcacctgctgagcctgttgtttatcaaatatttactgagccccagaggtctcagagtgttgggggctgggcagcacttttcctccctatgagaagatgaattctagaaccttccatcaaccacatgaggaaggaaacccctgttgggggctccatctgtacccaggcatgctccagggtcactgggtccgcgtgaaatgtcccatcctgcctccatgcattgctggtggcttttgtttgtctgattctggcttcatttcctggagcgaggccaccagtttccactgggcctgactgctccgtgaaagctcgtcctgggatttggctcttgtgctgcaaatcagcgggagtttacctggcaacttggatccagcaaccctggtcccacaggagctggagcggacttcccgccaggttgaaaccacaggtgcaggggaaggggcgagagtgttcctcaggcacccacctcccagccacgcccactcccagcctgccttaaggatgaaatctgtttcctcagtgaacttgccccagtgcatggcgtgagaagctaaatgacacacatcctacattcactgcttctggaataaccagagatcacgcgcctgtccccacccccaaatgaaaaccaggacgtcgcagccctggaaaatctgagccactcttggaacactttctggggtgtgggcatctcctcgtgctttatcttcccttccttgatgacagtgctatttgataacaggagatgtgcaaaattacttcttttttaaatttctctgaagac

SEQ ID NO: 16355 - DNA, 867 bp, Homo Sapiens
tcctttgacaggaatgactagttggttatatgtttttacctatgagcaaacacatgatttttgcatgtgatacctatgattacgtctctatagaaaacaggaatgaagggatctcccttcattcatataagtggaaacatacagtttttaaaagaaaggccaggttggttaacactgaactttgaattgaagtcttccaggaactatgttcatgagggccaaaaaaaagatttccgtctattctttaaaggaacttttacaagcttaggtgaaagaagacaattggaaataaaactatgaaaatacaatacctttcactttaaacgttttaatgtaaagctttcagaaattgcattaaacttaggcgattttcagctgatgtcccttaaccacatagttatatggcaagcatatgcatatgactttttttgataggtctatttcattacattttgtaaaccatcacacggtacctcaagatagtgtggctcatgtaatgtttaataattttacttttcaggaacttttaatgtaatctaccaaagttttacattggaagattaaatcttcttagttgtgggagtgggggacagaaagtggcaggatatgtttggaaacatttgattattcttcacacttgctgacctgaagagttcctcttgcaagtgaaaaccaaccagtgaaatgaacaaacaaaccccaaccccacagatgtgactcaggatctagaagaagtcatcctgacacagataagggaaacttaacatttttaaaaagtaacttcaatggcttcagatagtttggcttttaaagggactatcccctgaacttggacataatatatttattctctactatctccctggg

SEQ ID NO: 16356 - DNA, 554 bp, Homo Sapiens
  misc_feature (83)..(120): n is a, c, g, or t
cccgggctgcaggaattcggcacgaggcttaaaagggtttttgccttcctacgtatggctaacctctttttgttttttgaaannnnnnnnnnnnnnnnnnnnnnnnnnnnnnnnnnnnnntcccaaccaggaattttttaatggaaatgtatattccaaaaagtgaaattcagcaaagtctattgtagccgattttcttatagtcatcctgataaaattggatctattttcttataatttgccgcttcctccaaaaagagaagggtgatgctcaacaaatcttaattgtggttacagcatactgagtttttgtttattattttttctcttgaatgtggagatatacctacatgtaagggaaattttcacaagaaaaaatagtcgtgcttgagattcattgaaaaccatttctaaaactgaagccatgtttacatgtgcgtgtgcacacacattctaagcatgaagcatttcaacagtttttgggttaaaatgcttgtatggactagtccagggtccctgtaaataagaacctaaacatttgtttattccattac

SEQ ID NO: 16357 - DNA, 949 bp, Homo Sapiens
gcacgaggattgataatggcacatctcctggaattaattctacaataatgcgtttttcttctgggagaggagaatgtgcatttttgacctcaacaagaatggcaactattgattgcattcaaacgtacaattgtatctgtgggaagagaatagactctattttctctgattcggtgtgcgccaagaagaaaaggtgaaaatggaatgttttctttttttgtttcccataataatttctgattataaatcattgcttttaactgtgggacttagttaattcttcaaaagataaagatgaacaggaagaaaaagaaaattattttggactatgactttaaagatcagatgccatctttcttcctggagaagaggagattttctcttttgagagtggttgttccttcctttaatgtccctgaggaattattcattctttctaattctcagaactacctatacaaccagttagagaactctgatattatatcctgggtcttttttcttatcaataggataaatcattccagcatcttctggttttgaaagcagttgtgaactagaatgtagttatttttttcttcccatctagaagttacctcatcttttaaaacatttgttttgctacaaaatataacttcaaacttactgaaagttgcaagcatagtacaaggaacttctatataacctttactcatacttactagttgtttatattttgctctgctttatatttctctctttctatcttccacttaataataaattgaggacttcatgtccctttgtctaaatattttccaagatcaagggctttgttttatataatcacagtgcaattatcaaactcaggaaatttagcattagtacagtactatgatctaatctgtaatccatgttcaaattttgtcaattgtcccaataatgccatttatatgtatttcttaaaaat

SEQ ID NO: 16358 - DNA, 1253 bp, Homo Sapiens
  misc_feature (41)..(49): n is a, c, g, or t
  misc_feature (674)..(703): n is a, c, g, or t
gcacgaggctgtactttgaatatggagtagtttacagctannnnnnnnncttactggtaatcttaactaatatgattcccttgttagagagcctctcactcccccacccccaaaaatgtctactattcatgacagtaaccaattattctggacaaattgcttctttttaatttgagctatctgccatggactttctaaaatggaaacacagcctgagtgtatcttagggagagtttgattgaaaaaatccaaatcactatccatatagatcatggatataaagagatacctgatttttattaaaaagatactttttcaaatttaagagttaatcttggaaatttggaacaagtaaaggggcaagtaaaccttttgatgaaatataaaaggaactcattgcatgaagttgactatcaaattctgtgatgtgtggcttcttaaaaatattctcagtgtcttttgtgtgcgtgcagcatgtacatttgatgttatgtgaatgttgagttttttcttctaattttcacttcagcagtgtttagggctttcagatgccttattccagtgtgaacagaaaaagttcatattttatgtggttaatgctttgatgtgtcacataaagagtagtttgtagaaaatgttggcacaattttaacttcttagtggcttgtgacatnnnnnnnnnnnnnnnnnnnnnnnnnnnnnnctttataacattcctgtgtttagtagtgtaaatgttctgggcaagttttaatattttgaatgcctttggatattccagcaataaaggcatcatgttctgcaataggatttcttactcatttacctattttaacactaaaatagaccacaactgagcacaaattccttttataaatgttatagaagcagggaagaataataaacacatttgtgaattgtggttcagtttatttatctttagggaaggctgatcatttatcttatagcagataaccccagcctcttattcattatggttaacttttataatttatcttattttataatttaagaatatagtacatatcagttgggtttggttttggtcatcgagactaaaagctacatcaaaacagaactttgtgttttctgctaacttatttaatgacacaagttttaagagaaccacaattcattgattcacttattcttttccctaattgtgaattttagtgataaatacaccctgtactactgaagaaaatattctgacacttcacgtgtgcaaagta

SEQ ID NO: 16359 - DNA, 963 bp, Homo Sapiens
gcacgaggcctccgccttctaaccagctcagccccactccccgcattatctccactcgtgccggcgcgctgctggctcctccctgtccgtccccgccccattccttccctcttccccaaaccatggaaaggcaaagtgcagcggggaaaagaggtcagtggggtactgtctgatgagcgtgaaaggttgtttcaccgacttccacatcgactttggaggcacttccgtttggtaccatgttttccggggtgggaagattttttggctgattcctccaacgctgcacaatttggcgctgtacgaggagtgggtgctgtcaggcaaacagagtgacatctttctgggagaccgtgtggaacgatgccaaagaattgagctgaagcagggctacacatttttcatcccttccggttggatccatgccgtctacacccctgtagactctttggtgttcggcggaaacatcctgcacagctttaacgtgcccatgcagctgcggatctacgagatcgaggacaggacgcgggagaaaaacaaattgtaggacacttccacccactctcacattttgactttttcaagtccttgagacctgggagttctagatacactcgagaaaccttttgttgtcatctcctgaggtcactcagcttgaagatgacttggacctccgaggaagggctgaggccaggtgccgctgagtgggccctgaggtcctctggtagacggatgacctgcaggctgggagcattgcatgccttgtgactgccttgccttttgttttgaactgacgttggttaactcaatttggtgaggctccgagtctgtcaacaataatggtgagcaaccgtatgtttaatgtcctcaggcatgtggctgaaaccttttgaagcgaagggtggaagggcgaacctgtttgtagtcaattctttggcaaattttgtttccgcagtcctctcttgg

SEQ ID NO: 16360 - DNA, 989 bp, Homo Sapiens
atcccccgggctgcaggaattcggcacgaggatttgatttaagagggtttaaattatatgaactgtgtgaaaacatttagatctaaggctgaaaacaattatcaactcaatgaaattttaatatggtatttcacaactgtgacttcatgacagctgttacaagtgtcaggaatggtaaatatgtactatttactaatgccaacactgtacagaagtgctttatatacaataaatcatttattactcacagcaatccttaccagtagatgctatttctatctgaggtttgtggttaaggaaaaagagtgaactgagtaactggtgtgagttcactcagtgagtaagtaccagagcgttgtcaagagaaccaagtgtagcatccttcgtaccatagtcacagtcctacagcagaaatttaagagagcatcaagagagatgcttgcttacccgctttgtatttacttgctctctgagaagtctacttctcatttatttctggaacacaattaggtaaactctatctatttcaaatgttctcttcagttgtctagtttgaagcctttgaggattagcaccttccagtttattcaagggaattggacaaagaaatgagaatgaactataggattaaaggataaaactaaagaaggtgagttagaagagtttgagttcatggcgcagatttaacataaaaataatcgaataattagtaggcataaaaaggtggatatcgacctaactagtaggcatggagatatgtgtatttgtctaaaactcattttcttcatttggggaaaaaaagtattgctataattacttttcatgagaaattatcaaatttatgtatccagaacactgattattattaaatgtttgaccagagtgggaaattttttttatcattctgaacctctttcctaattttattcctgtttaattcaggatggtttcaaatttaaattttactttgtttaaaattaataatttcc

SEQ ID NO: 16361 - DNA, 840 bp, Homo Sapiens
aatctgtagctctggatgcaacatgcagacataccaaaaaaataataataaagcaaggtactgaagagcaatgttaacagaatgctttatatccagaatgctatgtttttttcaagccacattttagttgaatgaagtaaagttattcaatcttttattttaaaatattggaaagtcacaaatgattacctctttgatatgatgaacctataagtctattcatctctgttatttcatttctcaaatgtgagccttgttgaggtccattatcaaatctacactttggttgattatatgatgtttaggacaaggcagaatttaaaacctgcatgtttagtgcatcacatgtcaagtcaccatccttctgacagtgtaacttccataacgttattttgagagccatttaataatcatatttgaaaaagtggatttcttgagtctgttgtagtttagtacttacagcagtgcctaaaacagcaactaatatgaactgcctgagtcctacaacataaatgcataaagcttttttatgtaaaagccacaggaggggttcaaaattgaacttttccaaagtttatttctcttgcgttagatgaaaaactatttaaaaggactgaaaaccctgagctttttgctcgtcttggtagcagatatctgtaaaaacctacccagaattgtgattttacttcattgtttttgcatccttgaggctacagtataaatcatctccaaacttgactactattgggaagatgtgtataaaagcatcgctttgggaattttttaaaaatatgcaaaataatattgaataaatctacattaccataaacacccaaaatg

SEQ ID NO: 16362 - DNA, 784 bp, Homo Sapiens
gaaggggagcgatcacgtgcatccctctgctgagatgggagcagcagcgtggggttgggctttgaactggcatcgtaggcattttgttttctacatttagaggaaaaatatacatcaaatattcaagtcccctgggcacagataaaagagttttcagatatctctgcagccaaatcccaaatgggatgcagaagggagaactgtgtaaaatcacgctcttccagaagctgggctttgtaatggggctggcaaaaattcccagggcatcgtttgtggcctcaatgtgattttcatgtaagtcatggattttctaaatctttgaggttagtggatctaaagaaaagcttggtaaacatccagatgttgtcaaacatatttaggtcattgttctctgacagttcgtgatattcgttcctactccaggaagctcttaggagaatccaaatccgacttccctgtgctttgagaaggaatgtctgcatgaagaccatcgtacagatggcgatattagaagagttccctcccgtgaatcctgtagaggaaaatgttaccaaataggcctgttcccctgtgcacccaatactaggaagattagacagtgatacagtgatgtcccttggcctctgctggacagagaaagaggcgccagggaggcagctctgagttgggatggaaaggatgcatgacagtcagcttctctacagctggaggggaagttccagaaagaaaggatggccaacctgggacttgtgggcagggaaagggctttggaaggccaagattg

SEQ ID NO: 16363 - DNA, 384 bp, Homo Sapiens
gcacgaggcccagaatactttatgcattcaaaaccttacttgtttcagagtatctgatgctatgcatcaactgacgtttgacttatacactaataggagatgcttcaaaaacaatagttgatttaatgtcaaatgacatgagtatatccattcactgtggagatggctttgttctctggtcctagctccttcctatatggtggcagaagttttattgcaaagctatgactgcagccttttgtgtgacttgcggaggatgtgtgggggtcccatatttcttaggtgtgtaggtgtcttttgtagaaaattttgctaaaaggaaattttgattgaatcctgttttctaattttgattataatacctaaaccaaattgtggttttta

SEQ ID NO: 16364 - DNA, 604 bp, Homo Sapiens
gcacgaggctcctctcacccctgtgaaggaccagtactcagagtgattttagtaggatacggatgtcctcacctcaattcttgcatctgtacattcttgcttctccaatgtgttcagtctcagagctaagtagacacaggactgaaatatatctatacagtcatgttctacttttaaattgtcatttggattaaaagagaaagagaactaaaatggaaaagtattagttccaaaggactgatgtcttctgagagagtcagggcagctgaagactgggtgagggtgagggaagccgctggtgtcctcctcagtcacccgtgagaggactcctctgtggagctaatcaactgcaaggaagattgttcccagtgtccagacctgaaggagtctggacccatagtgcagtgagatttggggaaggaaggattccggataggggtgagctttctgatgataagcaaatgtgaacacgtgagcagcatcctactttaaagcccctccacatgctctgaaatactaatatcttatgtttatagcacaattttatagctgggaaaaaaaagaaaggatattttaacatcttagtgttttgtgtaattttcag

SEQ ID NO: 16365 - DNA, 417 bp, Homo Sapiens
aattcaggcccaggtatctattcacatgaaattgtatgacaaaaaagcactaccctaattaaatgccagatgagagttggtcacatatcttgaagttccaaggctgcttgcctgactcccatattttaagtgacaactgtctttaaatgttaataattcaactttgaaacaatttctactacttctcttttcagcctccatctcaatttacattaaaagcaacttagagtgcttggtaagttattctttaaaatgatagccactcccattcataattggatgaatatggactgcttctaccgtgaaccaaaacacagtgcagaaatcaactgggtgctaaccttgcattgactgcacaacctcttaccaaactcctggttttgtgctcaccacagaaccacatctccctggtctaac

SEQ ID NO: 16366 - DNA, 683 bp, Homo Sapiens
  misc_feature (623)..(639): n is a, c, g, or t
gcacgagggtcaaggggaattccctctccccaacacagaacatgagagggaccaggaagctgaggccgaggaaggtgaagccacttgcacagggccactcagatagcaaatggcagaagctgaactggaatccgggtttctcggactccagagagagatcaccatcgtccccatctccctctccctatcccgacccggttgcctcccaagggggacccttcactcctctctactccctggattcaccaggacttcagcctccacctcaaatcaccacctgcccccatcccctgccccgtctccctctccacatgagtctcctcatcagacaccctgtagctcccccatctagctgtagccttcctgctaccgctagggaaaggggtaggggagggaagaagttgtccaggccaccaaagctgatgattctggggaaaaattcagccaaacaattctgcccgaatggagagtgtgctggagggcaggggatagtggtggtgactgtgacttcaaaggggtggcaggaaggagttcactttgtgggcaagaagcagttctgtatcttcactgtgggagatccacaagtctgcatctgtgacaaaatggcaattaaccgcccctgnnnnnnnnnnnnnnnnngtgcacagagtgcatacaaaaactcgtgaaatcagctgggtgtt

SEQ ID NO: 16367 - DNA, 257 bp, Homo Sapiens
agtgaatgaatgaagagcttagtgagctctggttataatgtgccaacaaattttaaaatatggcaagattaaaatgggttgctgggtgtctattttgcagtctaaatgcaaaatagtaaaggtagcataagaatgacaccactataggattaagagagaaagaaagtgtgcctaatagaagaaccttggaaagttaaacaagaaatcccttcttttgaactcctgactataggtctggaccctaagcctgtttaaaa

SEQ ID NO: 16368 - DNA, 307 bp, Homo Sapiens
gcacgaggccgcgccgggctctagctgtttccctcaggcggcctgttccacgccaggattagttttgcttcgcagatgggccgtggtggtgagaggaagcaatcagtatggaaatggagaaatggcttagctaataaccttgcaggggtcttcaggcttttccactggctcacctttaggcttctgacacttttacctacgattgaaaaaagacgagattccatgagactagaaatgtaggagcatctcagaccttcacagaacgctctgttagaagatgagaaacataacgttgcttgtgagaggt

SEQ ID NO: 16369 - DNA, 911 bp, Homo Sapiens
gcacgaggagcaaaaacaaaatacccatctggaaaatatccaaaaaatgactgcagactctcttagttggcaatgccaaatgctttagaaattattcatgtgttaaattcagttatgccagttctcactaactactttatatccatgtctgtggggaattcttgcagagggcattgttcagctattagaattactggggtggcagttccccttttcccagttcattgtggaccaaactacaggctcttctgatcttactgctttctgaagcagccagcagcgtagataattccttgacttgttttatttaaaaaatatcactggagatttagtaggagtgttgtatcacaccaattctcattctgttttcaaccaaggattctggagtactctgatagcattggtttcatttctcatgtcgtcctggcaagcataattttgtagtttatctcagtttcaggtagaagctgcagaagcagagagcagcctacccacaaaaggggtccagttggttctctagcccctgagctgagtggcaggcagtctatatgtttgctcatctctgcactgtgcctggtgctgtgcttagaggagaagcaaaggaaggagcgtgtagtccaagtggaaagccaggatagacagctggtaaaactcgcccatctcttgccttccttcttgccttctggataattgtgtttttgcaatagcttctcatttcccttctaaagaagaaaagcaaaaagcaaaagccaaacaaatatacacatattttatatcaaagatgtttgcaaagttgtttctgtactcattgcttagcaatggtaccgtaagggaatttcatactgggctacagaatacttatgcatttttgtagtttattaaaatctctaaaaggcaatgtgttaaaggaa

SEQ ID NO: 16370 - DNA, 914 bp, Homo Sapiens
gcacgaggcttctttcttaaaataattttcctgccccccttccttcaacagtaatcaatgtctacgaccgcctctattaattctgccactgattttgtgataactcttcacaaatattgaatgatgtaacttgaaggcagtttttgttgtctgaatctgcttgatgccagcttatggttggctataatgctcagaaatagaagcaatgattagacaatacaaagagatactagtttaatgtaaggaagaatattttcatccttatcacttactgtatttactttatattccacattacaaggagccacttcaacatgaacaccaagccatcttaagtttattaagaacctaataatgtttaagcattggttatgtgaatatagaatgatgatcccactttggattttacattcaagtataagaaatatctattaatcaacttctttcaggagtgttacagatggtagagtctgtttcaactttgggtgcagggcttaacacattctttaacacaataaatcaacattactgagaaacaaagtaattataagaacccttctaattctaggaatcaatgattttatatcaatcatatggaaagaggtaaaagtgcatgcttcatgttatgttactttcttttgcttgagaatgctaaatttgtaaaactatataatatgacatacttgtgacaactgaattgtaagagattttatctaatattgctttagaatacagaagtaattgtttcaaaggataaaggatggaagattctgataaagcttgcttactttttgggggaaggcgtggggggaaatgtctcagtgcccaaggtcagtggccttcctgactgaagactttcccagagtagaggataagagtgggaacaggaagagcagtttaaagtcatcttcaca

SEQ ID NO: 16371 - DNA, 406 bp, Homo Sapiens
gcacgaggggaacatacaaactcatgtgaatgtcatgggttcttcaacctatgagcatcaataatcttggccaataaaataatgaactttattaacagctccacaccttactgggtggagagaacaaaggtgagaagcaaaactcaatcattatgctggatctgtgtggaatgcctttaacagaggcatatatctgaatagaggccacacacttgctcaggatgaccaaaggaagtaacataattttagccagaaaaaaaaggcacacagaaagacctaacttggagtaatgaaactactgagatgaaatgtccagcaaggtaataagatgagatctgttaaaacgatttttaaatgggtaaaatatttgaagacactttgcaaaagaagttgatgccataagaac

SEQ ID NO: 16372 - DNA, 822 bp, Homo Sapiens
aaattgatggagaattaattaatatttagaaagtgcttgaaatataacctagcacacagaaacacttaatacattatgttattatcattataataaataatcaagtaatctgttttatagctaagaaggaagaaattaagactagctcatcatagtgcatataatttaagtatatatactattgtgtgaccaatccaataacttctcaatctctctggaaaatatcttccataaagtctgcagaaataaaatagttacattcatagccccctagttgctagccatggccataggacaaagttttgcccaataaactataagcagaaatctgagagaggtttctggaaaacctttgctgactttgagctgtctatataaaccattcttaaactaacaatattttgagattttcacatccgtatttcctatggcagttgtaaactcttgcaggaaaagaatgtttaaagtgcaacttgcattttagtactgttaacacacagtgctagcagtgaattaaacaaacgaaatacagttgtttttattccatcctcagtgttaccttaatacagctaattgatatggagatgttttttaaaaagcaaaacaagtttcacctttacagtacatgctttaaaataataggtcttcagaatgatcacacgatgctaaattcagcttgttttctttatttactttctgggaaacctacgaaggtgcatagagaattctttaaactggagacttgtaagcattgttaatttgccctctcaatttcccttggagctatgttttaaaagaggaaataaatatttatgtatggtg

SEQ ID NO: 16373 - DNA, 958 bp, Homo Sapiens
gcacgagggacaaatttaaaattatgaaaagtaaggaaattcttatttaagcaaggttattaattggacattactgtatttttggtacctattgtatctgagagtctagagagagtaatagaatcataacattactattctaaaatagtatcttcattgtttaaaccctattcacctccttttcctattgcatttggctttttcatagataaatctgaagttattatttttttaaataatcctttctacatgggagcagtgtatattaggaaattttcaattacttcagacctgcacctttgcattgtaggtcagaacctacaaaaattccatcttggaaaacattttagatttaccttgtattcacacacccctgcaaagtgggtctttgcaaacaggaaaggtaaaagatttatttttactgcaaaatcatgcctttatataggattagtctgtggattatttcaggcaacaatgagtagatttttgaaggaaacttcataacacagttttggagccctatcttctgtaacacatttccaacctttggaaatagccttgattttccaacttttaacctgataccaacaaaaatggacaaagataatatcacatggaattattctgaagagccagctgctgagaagttccaggagctgtaaattagacaaaagcatccatttatttgggagtaagttacaatatggctatagcttaaaaatatataatgattcagggaggtattttaatgaacttatgtggcatttattgtgaactattgtatgtttagtattacactgtttttcttctcatgatgtaaaggttcaagcttctgctatcctttgatgtgtgtttgtttttatgaagacagtgcaataattttgtttccctgcattttaagattttttaaaataacatttgtaatgaatatgaaattaaaatagtacatcagtttttc

SEQ ID NO: 16374 - DNA, 757 bp, Homo Sapiens
gcacgaggctttgcagggaagctttctctcagacccccttccattacacctctcaccctggtaacagcaggaagactgaggagaggggaacgggcagattcgttgtgtggctgtgatgtccgtttagcatttttctcagctgacagctgggtaggtggacaattgtagaggctgtctcttcctccctccttgtccaccccatagggtgtacccactggtcttggaagcacccatccttaatacgatgatttttctgtcgtgtgaaaatgaagccagcaggctgcccctagtcagtccttccttccagagaaaaagagatttgagaaagtgcctgggtaattcaccattaatttcctcccccaaactctctgagtcttcccttaatatttctggtggttctgaccaaagcaggtcatggtttgttgagcatttgggatcccagtgaagtagatgtttgtagccttgcatacttagcccttcccaggcacaaacggagtggcagagtggtgccaaccctgttttcccagtccacgtagacagattcacagtgcggaattctggaagctggagacagacgggctctttgcagagccgggactctgagagggacatgagggcctctgcctctgtgttcattctctgatgtcctgtacctgggctcagtgcccggtgggactcatctcctgggccgcgcagcaaagccagcgggttcgtgctggtccttcctgcaccttaggctgggggtggggggcctgcc

SEQ ID NO: 16375 - DNA, 933 bp, Homo Sapiens
gcacgagggattctcaggaagatttctgaaactggaaagccatagcataactgaatcaaaatcgttgattccagtagcttggacatccctgacacagatgcttttggaagcacctggtattttcttattgggtcaaagaaaaagattctcaaccatgccagaaacagaaacacatgagagagagactgaattgttttcaccaccttctgatgtccgaggcatgacaaaacttgatagaacagcttttaaaaagacagtcaacattccagtgcttaaagtgaggaaagaaatagtcagtaaattgatgcgatccctaaaaagggcagcattgcagcgcccaggcataagacgtgtgattgaagatccggaagataaagaaagtagactaatcatgttggatccctataaaatatttactcatgattcctttgagaaagcagaactcagtgttttagagcagcttaatgtcagtccacagatctctaaatacaatttggaactaacatatgaacactttaagtcagaagaaatcttgagagctgtgcttcctgaaggtcaagatgtaacttcagggtttagcaggattggacatattgcacacctaaaccttcgagatcatcagctgcctttcaaacatttaattggccaggttatgattgacaaaaatccaggaatcacctcagcagtaaataaaataaataatattgacaatatgtaccgaaatttccaaatggaagtgctatctggagagcagaacatgatgacaaaggttcgagaaaacaactacacctatgaatttgattttcaaagtctattggaatcctcgtctgtctacagaacacagccgtatcacagaacttctcaaacctggggatgtcctatttgatgtttttgctggggttgggccctttgccattccagtagcaaagaaaa

SEQ ID NO: 16376 - DNA, 860 bp, Homo Sapiens
caggaaaaaacataccatgtttattaaatttgagatcccacacataatggacttgttcatttcatgataacagttatcttctacagaattttatctgaatgttttatctctgtaattcatcaattctgatttattcattattaccttcactgataccctctcttgatcatactgtttcacatatcatgaatatgaatctagggatgactttttttaacagatttaaaagttaattacaaagtaaaaatataggaccttaaagacttaagggttgggggtgttgaaaaaaacatggtcctaccctcatggagctaaaataatccctggtaacttcagtcattcttgagtgaccttaccttatttctttctggcctatattcagttcaaaggctcctctgatgcccttagtatcttttatttttccagtgatacttatcactcaatactatgaacatttacatgtgtaaaactgtacattctgagaaaatgtggactttgtcttttctggctcacaattgcacactcattacttggcacaatgcttggcaaatctgttgaatgactgagtaaatagatgaatgatcggatgattgaatatacgaatatatttaaccccaggacaacttaagtatatcaacatggcatcacacaaatctgctcaaataaaagaagtaaaacaattttggttaaggagcaaatggagttaatcattaattgtatacaggaaaaagtatgctttgaatacagaggatctcagattgttagggggacactttgtgaaaaataagttggtgagataattccatgttttcattctaggctttctgttatgcttttctttcagccaaaatgtcctccac

SEQ ID NO: 16377 - DNA, 335 bp, Homo Sapiens
cccccgggctgcaggaattcggcacgaggcaggattctaggttggctgctgtgtcatctttgaagtcaagacaaagctgggctcgaccttcaagggtcctcgttttgataatacttcagaatagggaactcatgtgaatactactatgtagaaataaaacctagaccttgagcgaacatctgtatattggttgaaaacgatagtggtaaccattgatcccccttcatttgatgtttggaaaattccagtaattatcatttttgcaacgaatatggataccacatagtactttggtgttacctgcttttgaaaaataaagtctttggttcacccgg

SEQ ID NO: 16378 - DNA, 857 bp, Homo Sapiens
gcacgaggcctcttgccggtccattttctgttttccaggcccagtctgactctgtctgtaatacctgattgtattggagaactctagacacgcataaacatggacagtttttctaaatgtgagacttaagcctgtgatgtaaaataggaagttctacttggaataatataaaggaaccactagaatttacaattattttgaagttacagggattagattttgaatcttaaaatcctttaggtaatttttagaatttttaaattaagattaatgtgaagagaattaagtgagcagcaggtggttcacttgagcaaactgcccattaagtcagattaaaccatttgaatgatagtagagatgttttaagtaatactggatttttacagtaagtttatggtgtactttgaatcgataggtgtccatgcatattttatgaattcgtggagaatgaatgcaatgaagaaagtaagtagtcttgaaaattatttaaataaagttgtagatttttttagtgccccctaggaatatattagtgaactttggaacttttaccaaagttatgtaacctcagtgtaaataattttaaatatttctatttttatattttaaaatgttgaatatactctggaaacaacatttgaagatttgctctgatgtcaactttttctggttataaaacctattagtattgtgtataattctcacggtaggtatactctaataagtgttttgtcaattgctttatttttgtaaaggctagagttagtgcatattgaatatatttatgtacaaataattccctgttgtacatttagtggacgcgattatctgtatacctccaattttaatttaagaaa

SEQ ID NO: 16379 - DNA, 934 bp, Homo Sapiens
gcacgaggcaccggccaaggctgcattcttaacccaactagattgtttactgaatcccatatgacagcgatacattgtccttacatatttatttttagacattgcaaagttattaaaaacagttaactatagtttttacacaacgtaggcaacaatgaagagtatagactgtaagattttcatctatgactcataaatctgggagaaaaaaattattaagactaatgagaaactgaaaaccttaaactaatgaatattatttctgctgctaaaaatatgaaactttctggtctgtagttgaaatttgtatgatcctctagacttgggtatacttttcatctggtgccattaaagcatctctaatattgatcctaaatatttgtaagtccatgagcagtgaactttggaataagtttctgtgtagatacccaaagtttaataattatgagagcacctgatttgatagacagaaaatacagttctttagtcaaaacacaagatctgaattttgttcaggtgctagaccatactaaatgtatatatttttaattatagtgatttgtttcatgtttttagattggctaattctgtaattttttccccaaaaacatgtgaagaaaggaaaagtaaattaaattccttagaactgttttaggttaagattctctgtgtctgcccatattctgcagtccttaacttgttttcaactctttacctcactcatgaacttgtttttacccatttgctgccaaacataggtgtgttcccttcaagagaatcagcatatacaggttatgataggctcccaccatttatgcttcttcactgatagggttgcattactttctgcagcagaactataatacttcatatagtactgctgtgtctcaactggaaggtcaggaattttatgttacgttgtggtctttgaaaa

SEQ ID NO: 16380 - DNA, 995 bp, Homo Sapiens
gcacgaggctcaaatggaaattatatattcaaaagcccagcttctgggccctagcatggtatcaggtatatgtgaaaaagtggcagctactcttttgggagtgaactaaataacccatttcactacctgaagtaaggtcactggctcaaaagggccctcagttcacagtggtttccctaaatgcctgggccaggctgctgggacgtttagctaagttaacagctggtgggctcttcgggctgcctctgctaccatttcaccaggcataagccttgtaaaaccaaaagctgaagtggtcactctactcagtgggcagaactcaaggccgtcatcctctccctgaacaaaatctgaccccttggttaaatataatacattcatactgactcttgtgctgttgccaatggcctacctgtctggtctgccacttggaagactacagatgggcagcttaaaaataccactccttggggcttgcacactgtgaaagtaatttgcacttgcccatctgacagtctggtttactcctttagatgtacatattatagacccattccctgataagtgtgaatagagacaaactgactatgccaagaccgtgtgaggccctgactgctctttaccatggccttttctcggggtgttttcagtgagtgactttgagggataagtgagtgtttctccctgggacaaagggcaacttacttactgcttgttattaaatgatgggtttcccacattcagtgttctttagatgtgatccatacccactgcctgtgtagaattcttgtgggtccatcatacttctccctatggaatgtgggcccatggggaacccatgtaaacatactaatgttcatgttgcttgctgtgccacaagtaatcaagctccttgactcaaaatctctgtcttttgccagaattcatgaaacaatgaaaagctaacttattagcttgaagtagggtaaaacattctaccgtctgaacgaaacttt

SEQ ID NO: 16381 - DNA, 780 bp, Homo Sapiens
gagcaacataatgagtttttatttcttaatatacagggtttaatttgttaaccacaccagaaaaagaaatgttcaaacagtcgactttctacttgaaattaaaatggaaattagcccttaggaaacagtgatgactttaagtttatacatcagtggctggttcatgaattattaactgattttaatgatcctggctatattttatttgaagttattctcctacttgcaacgacttttgaacccacaaaactctttcatccattctccacagacacagtacactttcatgagcactgacatttgaaaaggatccatatactcacagaatgtaaagataatacacatgcatataattgatacaaaggactctggtcatttgttaaagagagaaatgaatgaaaccctattattcacggtttgtaaataaatttaaagataagcgctaactttcacttgttaagcctagagccaagagttcggtgtttcttctaaagtttcccagatggtcattaaaacaagagagggaagaaacatactttctttgaaatccatcatttcccatccagaaagataatacatgtcatcaaaagttaagtctttagagattaattaataatgtgagtattttcaaataaaataatgcatgtctttatatgctagtttttacttttcagtataaacctatattgaacagcaccacttcagacacacaaattagctgtgaaacaaatgctataaacctttaattagcacttgctgccttataaacataaagtaata

SEQ ID NO: 16382 - DNA, 931 bp, Homo Sapiens
gcacgagggttacattaagtaacatgcagtagcaaagtaagcagtatcacagagtcatatatgacaagtgttttgagtccataacaagtcctcgttcttgtcctcgcagacttgttgatcccaggcaaggcacttttcctttctgggtcttttatcagtacgacttttgattcagcagcagtagtcttgtttagggggcaggggcagaggttaagggggacagggaagtatataaaggacttttattcttatgaatccaaacagagggcagagttgtctgtgctttgttttggtgccatggatgtttaaaaggataccattgtcttctgttcatttaagctacccattttatcttttctctgttacccagaatatcagtcctgtttaacaaatatgtaatgattcaaaattcatttgcaggtttttaaactttgacagtggtctcctctagcagagatttcagatactatgtattcagagacagaaacatcattctgtgcttatctcagtgaaagaaacccaggaaaggaatcccagcccctcctacatcctctccaagctacaggcatgtggctcatccaggaggggagaagggagcagagaagccaccctggtgtcttctcacccatactgctaatcctgacctgacctgaaatttaatataatcaaggcaaaatcagattaaaatggagccaaatagttttacacttcaaatagtttttacatacataaaaaatatatggtgttcgttttaaattattcatattatttgcatatgctaaaaaagaaatcagcatgcttcttgaaatgtcctaacaatttaaaatatttataatataactgattcttaaacttttatataatgcagtatatttgaaattttaaaagtccattatttaccttctccttgggaactacattttatatattc

SEQ ID NO: 16383 - DNA, 964 bp, Homo Sapiens
gcacgaggggaatttgtaaaataaaaatctttattcatttctccactttatgaatcagttcttcaaaattccagacagaaaataatgttcaaaattcaaggctttggattcacagacttttttttaacagaaccagctggcatatgacatccatagtaactgttaacagcaagacactctcagaaaagcaccacctgcaaaccagctggttcactagaggacagataaacaacctcaaggaaaaaagcaggaaagaggtctaacagaacaggtcacagagaaacaagagcccatctgatggcacccatatggcccactatgtccagcccaactttagaatagaaaataagcaaggacccttcctaagactacagtgtaaatattcatcagcagagaaagcttatgtattttaacatttactcctaccaagaactctgaagtaaatgctaccgttattcttcatttatagattaggaaactagggtacagaaaggttaaatcaactagtaaactgcagggtctgcaccttcggtagtctggctcctaggtccacactcaaggactctcccatgatacattaagtggaacaaaaatgtcacagagaactctgggtagtataattcctgctttatatgtacatgtgtgtgtgtgcgtaagtaaacatataattccactttatatacaaagggtgcacatgttcacagatataagaaatgcctaaaagacgacaccaatacacatcaaacttttaagtgcagttcttccctccgagcaaagcagggggattttccattttctttgaatgtaaaatctccccttgactaagaatctttcacagtgcttccagtccaacacaatgtatcaagcatatacaattataatctctccttctgaagagtccataaaagtgaattaaagaacttaatatctacatctctacctatgatctttgggtttctggttc

SEQ ID NO: 16384 - DNA, 1666 bp, Homo Sapiens
gcacgaggcagatcttctggggcttaactcaaatactgttgtgtctgcaccagtcttttagtgtctcaaaatagattattaatacatccataagtctgtggttcttctcattctcatctataatccaccactaccaagagagatttctgtgtcttaaatgatttggtgcatattttgcaacattgagagaaaactgcccccatctcaagcaagaatggcgttggtttcttccatttcaaactaatcagcattctccagcaatgacaaagtgccagagtgtatatatgaaagctaaggaaagcacaaaacaatggttcagagataaattggctaatttgtttaacagttggagactgtgcaatgtacgacttggaggagtttgtttggcataatgattttgtaggtctgtcagcattttgatatattgtggattagccaggtgaatgatccttgaaacatctctttcaggtctggagaaagagacagaatgcccttaaagtgtgaaataaccttatacctgaattacagttttgtgatataaaataaagctgagtataaaataaaaccaatcaaacacagaatttgattggatttgttattcattggtatacaacaatttttattcttatgtgtgctttaagggctgtgttttgctcttagggtactcaattttatgtttccttttggcattctttgtgcaaaaagaagcatgtggtggctctcatttaaatttcaaaattattagttttatctttaacagattactgattatacagaagatataatttattggaagaactgccaaatacattttgtccttctaaaaatatggaaatttaaatagtagtctggaaagttaccatatgataatttttaattgtgtgatctagacatgccttaggtaactgcagaaatagcaaattaaatgattaatgagcttattagtcatagtaaacatacagattcctaattctatgacagtgtacatatatgaaaataaatgatgaaaaaagaactataatatttttaaaaatatgcttttatttatatttcacataatgtaaagttctacaaaataaagctagtaggcaagacccctcagtgtatacctttaaacccataaattaattttatatcaataaaataaaatactttctctagttttggagcttctgtatttcctatagttttctgactgtccattttatccatcttagaagtattcacatcccttctatgcaggatttctgcatagttttaaatactttcattgcctaagggtttgggtgtgtcagctttttttgttttaaaaatatttaacactaaaaccttaaaataatgaagctacttatcagaccactgagccaagatcctggtattaaaagaaagtctgggtgcttaagataaagggacagagtattggtatcccagttatttgggagctttaagattggaacaagatatcactgtcttgttttcacttagatcctacttacaaagtgagggttattaacagaataaagccttcctttaaagctttataataatcatatttattaataatgctgttgtgcatacttatagtatgcatatattcagcatatgttgcatgtcttcagaattacataaattgaaatccctttcattgcaacttgcaagtgagaaa

SEQ ID NO: 16385 - DNA, 1263 bp, Homo Sapiens
gcacgagggtcagtttagagacctttctgtgttaatgcctcctggtactgtcttaagatacgtacagtgtctgtttttagatctatgcatatgtcatgaagctccttgtgggctctgcatgaagctgctgctttgtttttgggttaacagatgtgcctgtcaactagcatgtgtattgtccaaattccataaacttaaggtttttaagggctgtgtggtttctgagctctatgtgtctttcctatccttgtaccttcaaagggtgagaaatgagatttatacatccaaagttagtctgataaatatggctttttgtttctccatgtaacctagactgtcaaaaataagtgatggtgataagtaggcctggagcctcagcttctgtaaatctcattcctaaaattttgctagactcgtgttggcaaaaacaaatacctgtggattgtccttaaggcttttaatcagatacctgtgttgctgttagctgaactgtagtgaagcatcgatccaaatcggtcttctgaagtatcagttatgcttttgagtttagaaaatacttaggtgttagtctagtcttcccattcatgaatcagtgtatgtccatatcagagagcctcaacttcttttttcttcctttttaaaaatgattttagtgttttgatttagtgtatactacatagttcagtattattggctttaccagtgttgacagaaaaattttaaatctccagttgcaaacagcaatggattaggatatggaaataaaatcatggtgacatcactgctgagttatcttaaacctctgctacttaattctccatattgaaatgcatactcctccacatacatggcttccaagtaaaggcaattgtagaggggccctgtctatcccagtatggttggattttaaacatatctgtgtttccgttattttgggaactgattaatatttacaattttttttgtttatgagttattttgatactaagaaaagagagaatctagaacatcttgaagttgaaatacaaattttattcttttggtcttgggagaatttaagcagtctatgcaactcatcaaatggtgagaaatagctctccgaggttccagtaagctttcagtgactttgatacctccccaagtttcttgagttgctgcttgttaacacccagcttttaactgagtgtttgctcctgatggttttagggagattttcatgttgtatcacactgttcaagttttattttgtctttttatccctcc

SEQ ID NO: 16386 - DNA, 423 bp, Homo Sapiens
tgtattttcttatccttacttaaagagttagaggcagaatacttgtcttctggaattttaacgtctgaggtgctcagaggggctctaaatgatcaaattcagttttacagggaaaaatctagttagtcccaatgatcctctcaatgaattgttacccctcagattttattaataagtcaaactagggccacagcttgaaatgaaacagctccacttcattgttgtggaacgactaggttgagctcctaagaaaaagtttttgtaggtatctttaaggtattagactaaggagtatgccttaacctaatagagaccttatggaaaatcccatttcttggtttgtagggtattccctaacctggtaggaaaacttatttatctctcttttggagttccgcatggatagtgaagaacaccaaagga

SEQ ID NO: 16387 - DNA, 628 bp, Homo Sapiens
catgtcttttaaatgacatgctctgtcacctccttgcccttatacatgctgtgtcgtatctgtgtcttaatgccttttctttgccctctggaaactcaaatttttccttcacaactcagtttaggcatcatctccttaaaagcatttgtgttcctgactcgtgtatatacccctcacctggcagatggatgttctttcctctgctcctgtaataccttaaatacacttgtattgtagcaatgacaccacattgctgggtaagtcgttgttttcttaccccacaaaattactgtcttctccacggtaggggattttcgtttgtttctacttttaaggtctgtacttaatccctgataaatgggcaggcactcaaaatatattcgttgaatcaattctggattgtctatatcaggagttggcaaacctttttctctaaagagctacatagtcacattttaagctttgcaggccgcgtacagtttctgttgcacattccttgttttcactcaacctttaaaaacaaaaaccagtcttagcttcagggccacacaaaaaacaggcctccaggtgtagttcgctgaccccagcctacagtataacctttttttttcactaaaacttttttgcc

SEQ ID NO: 16388 - DNA, 1510 bp, Homo Sapiens
gcacgagggttttaaaacgttgcattctgaatccatctttttgaaatggggcatgtactcttaaggtggccactagcttaccattcccaatttttcttagtctcaaacattcacatgtttttcaaggccttggagttggcaaatcctgaatatatagtgaaggtaggaaatagctcttcttatgccacatcttagtctgattttgaagtcagttgtgtaagtttgggctgacagtggtattttccagtgaagactatcgccaagaatgcatatcattctgcttattttattctagtggataaaaattcaacgtatatttaagtgtatttttgacatctgtgcttgtccaacacagggctgtagggactgatgaaaagagaatgttgtgatttgagcttttataaaaaaagataagtgatcctagataaaatattttagatggtgattaaaatgcccatagattaattttttaatcggttctctgaaatcttgagatgttatccaagttacaatttaagcaatgagagtaaaatttgaattctaaattctcagcatcttccctcattcttgagtggagagacagaggaagcaacgccaaggagccttctaattttgactatatgatcattaactaaaggcagcaagggattgtaaactaatcttacatagtcaatgtttcatagaatgctttggttacaatcaggttttttaaagactttaaaggttttttgtatgctataatatatgcttatgatttctaaaaattatgcagtatacacaaagggcataaagtcaaaaagtgtgtctccctctgtgactttattctcataccccagaggcatataatttcttgtattcttgtgtagtctttaagaaatgttatcgtttattttatatatggctctctctctgtatgcctcttcctgttcttattttaaatgttcaagtttgtgacttggttcttgtttaacttggttgtctttccatattgccaccttccagctctaacattaatgtctccaggattccattatatggatgtccctttgggagaacatttgtttatagacttttctactaaaaatattgttataatgataatatccttatgcatatatgaagattactcttgattctgcctgactggaaactttattaataaagtagacattattctattttgaggctcaccagctgtgtaggtatgatcttgtgcttccatttaagaaattcttccatttaaagaagaaaaaaataatctcattgactatctgaagatatatgaaaaaagcctatgcttttaaattaaactgttaagacagtccattgaaagattgtggaagttcacatctattttgcaccttaattttttcattgtcccctactcatgactctaaaaaagtgcatggcttggggctatactttgttttggcagtttgttggtatcgtgcctttccttatctacataacttaaactataccttatttttaagaaaagaaaggggaaatt

SEQ ID NO: 16389 - DNA, 952 bp, Homo Sapiens
ttagtatttaataattaaatacctattcttagtgtttgacactccatatttcttttttttggaaatgaaacaaatatgcagtccaaaattcaggaactactagagtgaaatgatattaagtggaaaccagagataaatgctgttaatttaacaagtagattcttctccaaagaatgatgagtgattcttgggaagataaatgttaatgttcccaatagtcaagcttgttttgcagtagtgaaaagcttagatgagtacggatacctcatttgaaactcagcctagtaaggaagtgaaaacttagcagtcagtgacatggggaaatagttatagaaaatgtcactgaattttttcatatttataattagtcatttacatatttttgtcttgttgatcattacctgtaaatgaaagaccttaataggaaaaaaagagtaaagctcagtgtgaatgcaaacatccacaaaatatgatcttcgtttatattctgtgatgttgtttataaatgaatgcctcagttctctgctacccttttcacagctttgtactgtttgccttatattctatttgtgcttttaaagtgtgtctgttgggaaaacaaaatgtgtaggtggtttgtaagtgaataatttttatttcttcttgtattaaaattttgtttttttctctactttgggagatgtttatttacattgtcagactattcacaaaacagattctaaaatttgtttgctcgtatgctgttcccttcaatgtgatatcagagattactatgaatgttagtttcattccgtgaaacattacttccatataaagacagatctcttaataagtgaatctagtggaagaacataggtatcatttctaatttcatggtaattttgtcatgattctatatgaataatggggtccttcaggaggttggaatttttgccttctcttttaattgcag

SEQ ID NO: 16390 - DNA, 930 bp, Homo Sapiens
gcacgagggtaaaggcgtactcgttgccgtcgtgatttagctcttcacgcaatgccatcagcagttccgcatcttcgtattcctggcggttaatgacgcccaacccgtaaatgagttttaaacgcacagaaagatcgcccagcggaccatcgccgtcgagtaacggttctacagcatacttcaccgcgtaatcgtctttgcggaatacctgaagcaccagaagatttaccgcctcggtcaggagctcgacggcggtgatcagaaagcttcgcacggttttgccagcattcagacgctcaagcacacggttttcaaaggcctgggtttgttccattgttgcctgcatatctgacaatctgttattcgggcgcagggtgtcctgcgcctggtccaccattattgcattgctttataagcggttaccgcctcggatacaacctcgctgttggcatcaagaccggaaatctgtgccagcgccgcctgcggacctttgtcagcgatcagtgctgccagttcctgagcctgcggatcatcttcactgcggaagtgcattgcagcggcaataccttcaatcaggtttttatgtggcagaccatattccagcgtaccgagcagtggcttgatcagacggtcgccagcactcagtttacgcagcggctgacggcctacgcgctctacatcatctttcagatacgggttctcaaaacgaccgaggattttctggatgtacgccgcatgcttgtcagcgtcaaagccgtagcgcttgatcaatactgcaccactttcttccatcgcaccttttaccaccgcgcggattttctcgtcgagaatcgcgtcacgaatggtctgatgaccggccagttttccgaggtacgcggttatagcatgacccgtgttcagggtgaagagttacgttcgacaaatgccatc

SEQ ID NO: 16391 - DNA, 891 bp, Homo Sapiens
  misc_feature (719)..(739): n is a, c, g, or t
gcacgagggtaagtttaaggaattttagtatgtaatagcaaagtgtttgattaaaagtctaatcctatattactagtcaaaattagttacattctgatctaggaaagataatagtcattggatattgatatgctgtgctgtcagaaaaccagactaagatagaaacctttatctgactcccacatgttgcttgttgtgatgggatgtatactttacagcagcttattgctgctttgaaaaaaaatgtataaactatacatttggagtgtttgcatataattctttataacctccacttaaagctgtcagacattggtattttatcagtccacattgttgaataaaactaatgttcttaggaatccagcttgtacacactgtttaaaaaccctcagggacagtttacacactcttctcactcaattcaggtactttgatgctattcttaaacctaacagtgacttgtatttttctgttttgcttttatttcaacgtgctggtagcacatctgatgaatgtcaacttaaaaaactcagttcaggtatccaggtataactcagccaaacagattttaaagctgcatataactctccagcacatggtgcctcacactcttatagtggcattctatatattcagttattactactgagcagataatatgggggttcctgttaacagtgtattttttaaaaaaagcgcataaatgtatagccagnnnnnnnnnnnnnnnnnnnnnaacatgcacagttaaactatatatttttaaatgccactaatagccagcacaactaaaacaaaagacattcctaactgctctgtaagctgttaacagatgcagttccttcttgatgtggctcttgcttcttcacgataactactactaaattc

SEQ ID NO: 16392 - DNA, 727 bp, Homo Sapiens
gcacgaggctattttctcatcattgggtcaatattgactgatcagtagtaggtcttttaccattctggacataagtctaggtgtagaaatcctttcctttatcatagaggatatggtttacattaccgtttgttttcattgtgattgcccctatgtaacaatcatgaatattagattttttaaattgtagaatatcctaatatttatagccagcagctgttactttgtttgtaaaatttgcaaaaaaacaaaacctgaagttggtttattgaaagaattataaggatagcttctagggatattagtaatagattgccatgatcctgaagcctcttctcagaacactgtgaagataatactgacagtagaatcagtgaaaacagcctaacaaaacctctgacatcagtatatcaacttttaacagcccactcactggcttttctaaactaccaaaaaccacctgtaggatactgcattaagtcagcatctcagaaacagtggtgtgagtaactgagtcaaattgtcaagtactttggatatacatagtgtcgagctttagattggtatgaaattaaacagcaatgcaaatagatttaattcctatttactttaagaatgaaaaacaatgttcattttcctacctaaacagggtggttcaacataaaggctgatgttgtgtccgttttgtattttatcttttgttaaagatacataaatgacaatactt

SEQ ID NO: 16393 - DNA, 913 bp, Homo Sapiens
gcacgagggaaactgcaggctcaaagaaaggacaaatgcacttccaatcaaatcagtgttgaaggggcagcatctttatcatctgccatccttaagattcatttcacattcaaataaatagaaaactacttgcaaaggcaaattagacccagatttacccgcaggtggcatttcatgccataacttgatggcacttcatcaacatcggcttttctgggctcactgattagttcatgctgtatgaaaagtgctttaccataatttttcattatcttcacaagttatgccatttggaatcatgtaaggtggctaatgtttcagggattcttttaaacactttacaataagagattcaaaggccaactgctggtgactcagggaccattaagacatctgagacatgaccatgattaaagattagttgcgatagttatttggatattatagagtctttgaaatatagaaacactcacacaaactaatgacgatgagcatccggggcttggtgtttctctgtgtcagctgcagtagaggtgggcggctctcaattcaggctcactccatgtcagtttcacaagaaaacgccagtgctgcccccagctcccctagctgctagggcaggtatttctattttccatgcagcacagaagagggggccttaccacagacaccaggaagaataatgtcaaacccatagcaatccaaacctgggagaagcttgaaaactgaggattggtcttgtcaatcctactggcgggtcttgccagttttaaaaaatgaaatacaacagaatgcaacagaatgggaaacaatcagagcacattaaaagaataagtactactttgtgatacttttcagttatgtatgtgggtatcagtgtgtactgaggttgatgagaaatgtatttttaaaa

SEQ ID NO: 16394 - DNA, 890 bp, Homo Sapiens
  misc_feature (274)..(286): n is a, c, g, or t
  misc_feature (471)..(488): n is a, c, g, or t
  misc_feature (680)..(709): n is a, c, g, or t
gcacgaggtaacagcatacaggaacttctgcaagtattataaatcaaatggtgttccatgttacaaaatttgtaagtaagatttataaatagagtatggacatttaaattaatgacatccacgtacaaatctttagacgtaatacaaatttaaaacatttactttacttttagtctattccacctatatagaaatacctaacgtagtattataaactaaccaaaacaagctaagtgggaatctacaatgataaagttcatttaaaactcacatnnnnnnnnnnnnntagaataaagttgataaactaaaatttaaagaatacatatatatgcaaacttcaggtagaggttcacaagaaacattcaattaacttggatataagtaaccactgaaacagtcggtaatgaaagtataaatgacaagaaaccacttcaataataaagtgatttaagagtcaagagggcagaaggnnnnnnnnnnnnnnnnnncagtttgaacatgttcatagggcacagtttagtgatattttgaaataaaaataactgaaaaatactttttgctctacaattaagagttacttctgccactgctataaatttttctattatgtcctttcctaggttgtatcttaagagcatcaatacatatatgcattcacactgcctagcagtaataacttnnnnnnnnnnnnnnnnnnnnnnnnnnnnnntacaatccagacttctctttttatatatatagtttctatatgcctgtatctttcagataacttcagccattactattgttatctttattgcatcttcatctttatgtttgatgaagctattttagtgaaactattaatgggggaaaaatacaaattggcagcttttcaaatgttttatttt

SEQ ID NO: 16395 - DNA, 177 bp, Homo Sapiens
gcacgagggtttcctgttgggcaatgctccttgaccacattttgggaagagtggatgttatcattgagaaaacaatgtgtctggaattaatggggttcttataaagaaggttcccagaaaagaatgttcatccagcctcctcagaaacagaacattcaagaaaaggacaatcaggat

SEQ ID NO: 16396 - DNA, 805 bp, Homo Sapiens
gcacgagggcttacctaaatgttaagtctgaaatggaagtgaggatgtaactctactgaataatcaaagatcatcttagatttggcttgatctgtgtttattgcttctattaatgtaaatcaactctgtgccaaatcctcctccacaaaccatttattgtcttagttctagtggtatcaatgaagatagttacagtatatgaattctaagtcctgaggaagaaattttatggggtttgttaagtttcacatttgtgaaagaggaaattagtagagtattcagactttgatatttggctgttaatgggatgcatatcaaatttttaaaagaaggcttggcctaaggagtttattggtacaggtgcagatgattttaaggcattaaaggattatagagttatgtcatttagactgtttctaataactgagaccatctaacatttttcttttggagtctcatttttatttgtgcaatattttcaggcatataggctactgttcattgtatttatatatatattagaatttactaagtactttaacaagtaaaaatctgaatatgaaagaaaatatcagatttgcactttaaatgagcttaattgcttgaagttgtgcctgaaatatcgaattgcctcctattgggtgtggctttgttgaaataaatttgtaattgttgctgtttgaagatatcagtacagctgttcacagaaatatattctcagcatgtcacttttccattaaagcactaagttttctttgaatgttccattgttccgataagtattttacttttttctcagtacatc

SEQ ID NO: 16397 - DNA, 329 bp, Homo Sapiens
gcacgaggcctccctcctgttgccaggtaaggtgagaagcaattcctctgcctagaagctctgccgggtgaaatatcaggagatcccacccaagctttctcttgcgtgtagcctatatccagcacgggagcataggctaatcctgcagttggccagcctcttgtcctctggatatcctgggatggaatcctaatgaaggaaactccagtggtttactgaagccctttgtgctaggcctgaggtgagatagaattgctccatcctatgcccaggaggcctgcgtggactcacagtgcaccaccatcctcagaaatcctctctccctgtag

SEQ ID NO: 16398 - DNA, 513 bp, Homo Sapiens
cgtccgatctagggtaatttatcacttttgtgtgcatcttatctgagtccagccatctggtactgctgtgcattttgaacaccgtgggcataaacaatttgttgaattactaagtgaaaacaataataaagaagaaaatggtcaggagtgtggtttcagcactactaacagatgactgtttctacctcatttgaccataactgtacttgtgagcttctttccttccattcatgactgaagatctgctcaaatgcaccaacactgccaagtgactaaggtagaaaagaaaaatgacaggtatcgtcatctgaaggacagatgaatctttttctgccccttcttcacaatggaatataaggaacaattatgggatgtcatcagaatggatgccataggacctacagctccctttctctttattgtgattatactttaaatatgacattgtcttttatgtgtatgttcctatattttcaatgtatctttttccttcagtaaacctgatattcaaat

SEQ ID NO: 16399 - DNA, 409 bp, Homo Sapiens
tatacagaaatgtcctcatttttaaaaaaagaaatgcatatttatatgttttaaaattacttcaaccaaaagcaatggggagatgtttactgttatatttaggtgacagttacatggcaattcattataccctcctattttcctatgtttacattattcattaattaaaaaacaatacctagaaaaacccaagactttcaaaagctattttctatatgtgccaatctttaaaaaacaggataacaagggtatttatcacattaaaatgttgtaaaacagcaaagctaaaaatctaaaattttctgaatgttatttctatatttcaattgtttatgttcattgggcttaaggttccagaaataatttgcagtacctacattatagctgcctaaataaatttagtaacatc

SEQ ID NO: 16400 - DNA, 928 bp, Homo Sapiens
gcacgaggagtttgtacaattgggaacataatagattttcataaattatgtgtgccttgttggaagtgtcaactgtctttatgtctgcttgtaaaagtttcaaaatatgttttccctcaaaaaggcaacgttacttcatttgcttgaatattatgataggaatgcttactgatattacttgatagtcatatatagcctaggaaatttaacatatatataactatagcagtattaataatgatagttgtacttctttaaaacattaaatttgaggaaactttaatgctgtctcgtgtacattgctttactacagtgagggggaatatcctttagattgagcctcaatttactggttagtagtatgtgaaactctggtataaaaacgtaaactagacagtagagccgatgaattaaaattgtaaattgctacattggcattttctacctccttttctgtcagagtattactttttccagcatttattcttatttgtgagtaaagaggaaatgggaacctgaggttaaaattgacatttttgtttcattgagaatttaagcagtaggtacaggagaagtgacttgtcacattaatttggtgcctaaatctgtaactacaagttgtgatcgacatgtacaaaatgtctaagaaaggtcatatgctgaatattttacttttcctgtatagtctgcatgatttgtttcataaacccagcttatttcctccaaaaagcaaaatggtcctgtaatttttaaagtaaaataaacgtgccattttgtctgcaatctataatttcaggaagttattgaaagttctgactcagggctttttaacagttcaagcattgtcagttatattttggaaactccatctgtgtaattctccagtgccttgaaagattattaacttggcaacactattaaaacttta

SEQ ID NO: 16401 - DNA, 953 bp, Homo Sapiens
gcacgagggatgtgaaaggggtgggagacgcaggacatgattaccccactgatatctgagaaatgaaataggataatgtggccctagacgttgtacagacattttggtagcttctatctcatggcagatcttttcctctctctgccagctcagggtcttcctgcacattgctgaaatggcctatgttaaagttacctctcagcacttgtcctcatcatggacattttaagtgcagggatgtctaccctccaacccaaatcttgggtttcccaaaagaatttataattaatggggtgtggcattatggggaaaaagggctatgtttatcttcacatcataccagttagcttatactaccttcaacaaaaccagcccagagagagggagaatggaatttaagggccttgttttcattcttgatgctaatgccacctctctctctcatctgactcaccagaaagagggattgccatcattatattctttttatacaatattattaataaaaataggatcactcctacctttcatagcttcccataactagtctatttgtcaacctgaggcccacgtaacaccaaagccatgtgatctgtatcctagaaatcaagggaggtctgtcagcatatggatcctcctgggtccttagactaacatcctgctcgtttcagttaccttcttaccttggatacagcctcataggtcaactatggccaatgaggtcaagcatcaacctaatgctctccttactcataaagcatctatattaattgagcatgaacattccaggcactgtttctggctctgaggtgacaactataaataagacaaagttttttcaggagactcttgtggttgggtgcaggggcagggggagacatgctacatatataaacagataatttaaatgtggtaagtactatggagaaataaagccgggggtgtataacata

SEQ ID NO: 16402 - DNA, 453 bp, Homo Sapiens
atcatagtttttaaaaaccaatctaaatgtaactattgaacatgattagctgtttcatccctagtagagtgacagaaggaaacatccatagacaggagtaataagaaaccagctaaacttctaaaccatttttaaaggatgcgtgtgagctggcataacctacctactctttcctatgggcctctactgagagcatggaggtaatacatctaatacactgaagaccagggcaagagagctggaagaaatccctcttaagcactccaggccttcactgagtatgaggtgctggtctccaaaggcagagggcaaggcaaggcagagagggatctcctggggcacagacaactgacaaaagaaacacttggattgttgtataaagaggagtgagctttgtaaataccacgttagctggcctgctgtggaacagaatgcctgtgaatgacagtagtc

SEQ ID NO: 16403 - DNA, 601 bp, Homo Sapiens
gcacgaggattagattaagctggtacttctcagtctattaaagaatagacctaatattttgtacctttatttactactcactataccaatgctcaactttagtaatgtccctttcttcaccgtcctattccttccattcgtttctgcctcctcccccaacatacatcttactgtcataatactgtgtacttcttcacctccatgcctctttcctcattgtgtttttccacctgaagcaccatttccattcgttttagcacaaagaaaatagactttgactttccctttccctgagtatagctttaaaacctaccttggtttctgtctttaaattcttacatatgaattgtctctgttttatgctaataaattcttttgcagtgaactcttatttgccagttgcttctagcgtacttgtcaattctccaggtattttaaggccctcgagagtggaatagtgtctcatgcttgtcttctggtaaacatactatttaatgtaagactaggcagacagtaactgttgattacttgattgaaaacttgatgaatgttacttaacatttttttcaagcctgtgtttttggaatatttaagccttctg

SEQ ID NO: 16404 - DNA, 342 bp, Homo Sapiens
gcacgaggactctctgcactgtatttttgcaacttctagtgagcctgtgtttaaaaacaaaaagttatttataaaactgctaacaattcatttttaatctcaaataatcaataagtaaaatttatccaactcaaagaacagatcaaatacagtcatatcaaaataagttaattaatttttccaagaaactataacatatcacaaaccataataacaaagactcatccccaaagatatgggttccaaacttcattacaatgaatttcacaaaaagtatgtaaaaagcctaatagcaatgatcacagctactgcattggaggaatatctccagaagaaatacag

SEQ ID NO: 16405 - DNA, 837 bp, Homo Sapiens
gcacgaggctaaaatcatcctatctgccatagctatttaaacatatttagaccccttttttgtcaacttgctagtaaaagaaacataaatagatatttaaaagctgaaatttgacaaattataaatattggctaccggacaatttttaggagtatgttttattatttactccttggttcagcttcccctttcaataactcaggatcaagttggttgagctttttacaagattttccttattttacctggcatttgccaaagtgatccttaaaaatggactatctccttcctaaaatgtagctcgccacacaggagtttataaacaacttagggctagaaagtgcagctgcagaaactgggataaaagattagaatggagggctctgtgaagtctgaagttatttattattgaaaaggaagaaaagtaagtgctgttagaaaatgagaaaagtgaaagttaagctatgtggtaaagggaaaaaaagaagtattaattccttagtgaaacaagaagaaagaatatttgactataaattttcaaactgagttggatatcaaagggcattcacaaatccactaaaagagaacttggcaagacagcttttagatagctgtcacaaagaatatgatgaggaaactcttctattttattttcctttctccctgtttattgatggaatggcattgtggcatcatgtaaagtaggacctagatttgatctgaaattacctttatgctaacgaaatgagtataatgtgatggtatgtataatgtaccatgacagggcatgagcaagcagtacatattactcaaaaacccttaattcactttatgttt

SEQ ID NO: 16406 - DNA, 958 bp, Homo Sapiens
gcacgaggtgtttgtttttattaatatgcatctgccacttgttcgttcactatgtcatttgctacaagtggaaacaggtcaggaaaactgtatgcaacacagccttaaaaaaggaacattctatgcattaactttgagttgagtgatgcagtacctcaaagcccaggtccaagaaaatcctgttataaaaccattgctgtaatatcagtttggaattgtgtaccactagcaatagaataatacatcctattgaatctaagcaagacaagtttttgttaccttgaaataaatggttgatgtaaagaagagctgcgctagatggtcaaaaagaagtggtttcacctctaggaatcaaaaaaaagattattcaaaatcctttcaatcatagtacgttgaatcaaatgactccaaattttcatgatacataccagagaagctactaaaaggaatccagctcacaagctgaaggaactgtgaccgacaacaaaggccatcccagagaggaaggctcttatacaggaatgcttcacaggaataaaacccctcctgtaacacaagtgaatagtaaatccttatatggaactcttcagtcataaaattatgctctaaacaaccagtttattttgtgctatagttgcttcactcttagactaattttttgtcatgaatataataaaagccttaagttaggtgccagacttcctcagaaaaaggatgagatgattagtatttgcatacattaccatttttatcaatacagttctcaaataccataaaacttcatcaattggaaagaaagttaaaagttatagaatatttttaaaaaataagatttattatcttggggtacatgcagtaatttgaacagtcaataaaatgtatacaatattatgtaatagggctagaatttcattagaggccatagaccaaatcccaactctgagcagctccatcttta

SEQ ID NO: 16407 - DNA, 518 bp, Homo Sapiens
  misc_feature (136)..(417): n is a, c, g, or t
gcacgaggttcaccttctacttttttatttgactcacaaccattcttaggtctcaagtattcccatgtgttttaaaagcctgaagtcagtgagatgaaattcaacatcaagaatttgaagtaacttgtaaggaaannnnnnnnnnnnnnnnnnnnnnnnnnnnnnnnnnnnnnnnnnnnnnnnnnnnnnnnnnnnnnnnnnnnnnnnnnnnnnnnnnnnnnnnnnnnnnnnnnnnnnnnnnnnnnnnnnnnnnnnnnnnnnnnnnnnnnnnnnnnnnnnnnnnnnnnnnnnnnnnnnnnnnnnnnnnnnnnnnnnnnnnnnnnnnnnnnnnnnnnnnnnnnnnnnnnnnnnnnnnnnnnnnnnnnnnnnnnnnnnnnnnnnnnnnnnnnnnnnnnnnnnnnnnnnnnnnnnnnnnnnaaaagaaaaagaaaacattacataatttggctagagcataataatttgattttctggtttttgaaaatttgagttgcaataaaaggatatttcagtgtgcg

SEQ ID NO: 16408 - DNA, 769 bp, Homo Sapiens
gcacgaggagatggcgctttggtgtaagcgagcaggtgtcactagttccaggcgtctgctgaaagatttggaacagaagatgatggccactccgaaccagaccgcctgtaatgcagagtcaccagtggccctggaggaggccaagacctctggtgccccggggagcccccaaacaccccctgagcgtcatgactctggtggttccctgcccctgacaccgcggatggagagccactcagaggatgaagatcttgctggggctgtcggtggcctgggctggaacagtaggagtccccggacccagagcccagggggctgctcagcggaggctgtgctggcccggaagaaacaccgtcggcggccatcgaagcgcaaaaggcactggcgaccctacctggagctgagctgggctgagaaacaacagcgggatgagaggcagagccagagggcctcccgggtccgcgaagagatgttcgccaaaggccagcccgtggccccctacaacaccacccagttcctgatgaatgacagggacccggaggagcccaacttggatgtgccccatgggatctcccacccaggttccagtggggagagtgaggccggggacagtgatgggcggggccgagcgcacggtgagttccagcggaaggacttctctgagacttacgaacgcttccacaccgagagcctgcagggccgcagcaagcaggagctggtgcgagactacctggagctggagaagcgggctgtcgcaggcggaggagga

SEQ ID NO: 16409 - DNA, 916 bp, Homo Sapiens
gaaactgtgaagcctcattcagatagtattaaaatacaggattttccttttcattaatgagtcctatgatgtaagtgttatattgatgttaaaatgaagtagttttgtaccctgggtgcataaaattgtcagagagaattaaaggagaaagaactcaaacttcatcagagatcttgatttaattcatgtgaagagtgtggattacccccaacccccaaccccatgactctaatacacattagagtgtattaactagggatggtgtgtttatttctgccttagggcactagctttccaaataacttttggtatgggcttgagccatccctgtattcatgcacagagtttcaaggcagaaatttgagctaccctgtaacttaacagttgaaaaaaaccctgcttcctgtgttatctgtcttacttacactgccatagcttgcagtttagcacttgtctttcttttacctaaggaagtaatttgttgagggaactagcccttttgcttattgaaactttgcagggtggcactagtggaacgtagtactactcccatgtgtgcctacattttttcttttatctgaaagtgctccaagccagaaatccttgattatttacagtgcataagagttcttacatgctgtgggtaaaagagtgcagggcatggaacctgtttattttatgcagttcaagaaaactcattgattattgagtacatgttcgttctcatgatattcatttgtccctgatataaaaattgttcatctttcttactctgagaaagccattagaagtttctaagccccaaactactgttacctgtatctaaaaatagctggtattggtattataaagaaactgttgacaattttgtggcccctcagtctctgagacttcagtaccaattgttttaacctga

SEQ ID NO: 16410 - DNA, 872 bp, Homo Sapiens
cctacgcagtttcaaaaagaggttgaattaaacgccgatagtaaaagatcaggaaattcaaataagctttctgattttttgactctcctttaaaaggacacgactgacccatctactctccaggcaccaatggtggtagctcaaactgacttggcctgtggatagagatgagtgctcccagcttttatggagtcaacacctgtccaacttccctcagctacttcctgcttggaccccataggcatttgaattgtaattccccttctaacacgttactggagatatgtatccaactttgggttttacatttttggctctaaggaattgacctcattggacaattgaaaagcatgcctgtctcttaatgaaagtaactgcagctctggatcccaatgagtcatgtgctgggggaggattattgttaattaattctcctttttctgtgtctcatataataaacacttgaaaaaccattaccctagtttccatttcgaattgaagtggttctagaaagtatgagacaagtagaagtttgattgccagtacattcagagggtcaaatgcagttgatcattgccattttccaaaaatagacattttaatgagcatttttatatccatctggggtgcaaatggtcgttacccccatcttttcttctcaatatcctaacagcaaattgcacacctatttgcaaatggcagaacctcacactcaccccactgttcctttctatctggtagctaacctgcaagtttggaaataagctctccttgggaccatacatttatttcttaaactgctgagatatagttcatagattctctgcttctttaagtctaaaaagtaaaattatttatctagccagcagtgg

SEQ ID NO: 16411 - DNA, 935 bp, Homo Sapiens
gcacgaggtaaaagtctaactcattctgtaattgtttaaattcacattatgacctaatttaattgaaggtgatagagatttgggtaggagacgtttatttctaaggaccatatattctagtaaaaaactctttgatgaacctgtaatcccatgtatccctgacgttatcattttcatatcactttcttgactctgccaatgcaagtacaacttgtattattaacttaattagtatgttcccttaaactgactcataattttatctaaatgccatgaatgaaaaatcagtatcatttactaagaaggtagtataaaagcaaattaaggaaaagcatgtctcttagggtataaaatagtcatctgggactcacttgaagtcactgagtatgctccctgggatacaaagcacaccactgactaattcaactccctgctgatttgggaatcccctctgtgactctggcagatgatccctgaggatcttcttgaatacctccagtgctggggaactcagtactttgcaagattttgattcactcttgaataccttactgtgaacggtttcttcttcatattgaccgtatcagcctccctgaaacagttacacatggaccctggttttccctctgagaccccacacagtaagtttgctccctctgcattcatttattcaacacatagttgagtgcttattctgtgacagtttggatgcaatgacagtacaggtgataaggtctgatggaggtgcagtaggggagacaccccctgcgtagactggaggtaggaaggtgttcagaaaggctttttcagaggggagtgagggagagcctgctttggggaaagagaggctggagtgagggggtgagagaggacgctggagcaaagagtgagagggagcaggccaagtgggctcataaccctcatctctcatcttc

SEQ ID NO: 16412 - DNA, 933 bp, Homo Sapiens
caaataatgaattttattctatctttaagcagattttaatgagacaacataaaatccagtttaaaaggaaagatacatattatcgtgggtttagaccacatcagtgattaaataacaaagagaaatcaaagtcctttcctgaaatgtgacacaaagactttctcataaatgccacaagccacttttaagcatctttggaatactaatacgggaaaagtcagtttacatgtcattttgtcaaatttttggtcaaagtttttaaagctttttaatttgtaactttagtgctttaggaaagcatacaaatctgtaaaaagtctcttaaaaagcacttgcattaacttaagaatttattctaaaatcatgacgaaggcatcaactgtctcagctgaaaagttacaacacactttacatcagtttatattacatagatttccaaataagccaatttgaaatatttagtgtaaacatatgtaatccatggttcaagactgaactgatacatttggagtaggtttatttcaagtatctggctttgtggccgagtggaatggtgatggtataccatcactcattactcgcacaacatccctcccctcttttgactggtggttgaacagttacttgctttaggatacccaatttccaaatccccatgtaacagggaataaacctgtctttcctcactaaataaaatgaggtaatttcacccgaaagaacacagatgggtggaagacagtcaatattcataattgcaatatacaaaattttgtgttctacctggattctttgtagttccatattgagtaggccaataagaacatcctcttttctttagcaatttgcctaacatttgatacaagccatttccaaatacgtttttggtgtgtatcaaacttgagaaactaggagctctggaaattatcctcgtgc

SEQ ID NO: 16413 - DNA, 905 bp, Homo Sapiens
gcacgaggcaggcattttccccacctctccatcctttgtccacgttcaagataggaggcagaaggagcagtgagcctgggacaaagacgtggaccgacttccctagctaagcgctaaggaaaagaaccaggcccccgagcctgaattacttacatatgcaacatgcaggtagcacctggcctcttataatatgtttcaatgtttattatccaggaacggaatgaaatcttagagatggaaataatgaatatgggcttggtcttcgagaagtttttggtcttggctgttcctctggtaatactgctaatcaattgtgaccctggtagggagggattggtgtgagggaagtggtcttgtataggtatgctagctcacctgtgcgacataattactcctgtggttaaagttttatggataattttcccaaatctaaaagggatcccttaagagcaaaagggattctttatcatgaaagcagtgaatggaaaaaaagcctccttaggagaaccaaagatatatttcagcagcagcagaacctgaaaggtcatctaagcccagccacctatccctgcaggatgggactagggaggttccagaagaccatgatttcctgtgatgatttgaacccaggtgttgggaaccactcttccacactcacattttcactgcactatttccccttcacatgtctttaccttttcactcagtcaacaattatcaatgacgagtatgacactgtatgcatcaaagaactaattgtgccttgataatatctgtctgtgtcaggactgtctgcatcagtcctggtttatacgtgttgtaatagtattaataatatgcccttattccactcctcaaagtattctagtttggatgataaattatatggtcatcctataaattcc

SEQ ID NO: 16414 - DNA, 777 bp, Homo Sapiens
  misc_feature (582)..(605): n is a, c, g, or t
gccacaaataaaatgagtttattttatattaaagttatcaaaaaacacacctgtaaaattacccacatactaggcttaaagatagccttttacaaacagattattaaaaatctgcaaacttattttctcttaactattaaagtacatagatttaaaaggtgttagaaggcaaaatgttaagtcatggtcaatgtcttaaaaaagagttaatataattaaatctgtagcatactacaaaaagattaaatcttaaaaatattttgggaaaaaagctataattttctttctgaaaaatttaatcttaagtgatatttactaagaaatatatactgcaaaccacaataacaatgatcttctcaaaatttgcctaattgcttcacaaatgagtcaacttacaaagaagaaaacacagaaaattgcttttaaatatataactccttaattttcctgataatcaaatgaaaatttagtccatcccaattaatacaaattagactcatgcttaatgtaagatatcattatatatttcttaacaacataaaagttcaagcatttttggaaagcacagactgtgttattctnnnnnnnnnnnnnnnnnnnnnnnntatttaaccacagaaatttggaatatttatatactatataacactgtagaaatctttggtggtgacatatggaataagatccctgaaaatactttaatcattttgtcccatcaatcagtgtagtcaagtatttataatcagtaattttggcagtataattttttagcccaaa

SEQ ID NO: 16415 - DNA, 845 bp, Homo Sapiens
gcacgagggtacataagcattaagggaagggtttgaggataaattggattgtcattattcaaagcttaagagaggaaaaggagaaataaaacctttacaaaaatatccaggaaaagagaagtaaaaatggaagatggaaagtgaagcaaaattacaataaagagttttattttaaatacactgtcaagatacagtaaaattttaatttaaagatatcttgtggaataaagttctggattagattccttgattgagaggtctcatccttcagatgttgctttatattagttaccataaaaatgatagctgaaattatgtgaagaaatgagtgtagtgacagaaaaggattagaaaatgtcttctgtatatttagtgttctttcccccaagtcttgaggcacacccacagttacatattttacatcataggaaatctgaaggagtaagaggattaacaagaattcggcaaaagtaggaaaagagtggtaatgccaaaaatctcaagatgagagggtttctacaggtgaggataattataggtgccagttctccagaagaatgacaatgggcaggattaaaaataggttgtggaattgggctggatgatgactattggtgaccttttatcaaaaagctggtaacccccacaagaattaagttacactatccaaatgtttttcagatttacttgaacccctaacttgtagttttctgctacttttgctaccatgtacgcacacacaaagtcaaaagcactgaattcatgtgtaggcattccagccattctatgttcagctctacccgaataagctcactgttcacctcgttgttttggtatttgattgg

SEQ ID NO: 16416 - DNA, 548 bp, Homo Sapiens
gcacgagggatcaactcatcaacactcagaatcattgtctctaagcaaaatattgtgccttgagtctcttttgtcttatgaacaatttttttggaggtgtctccaaaacctcatataaacagactcgttgctaatctatcttgcagctttcttttattccttatgttgataacaggtagtcagacatcttcagcaagattgatcccccttcttttgtacttttctcatgtacttcattaccaaatcctatgtgcattctcccaaaaaatttcttttctatacagccctgcttttccaattctactgcactgcctagtttaggacttcatcatattcacagacaccggcagtttcaaagtgtggtctgcagatctcatggtgcccaaaacacttacagggagtaccaaacctatttttacaataatatgaaaaaaaatgtctttttcactctgttgacatttgtactaatgatgcaaagcaatggtgcataaaaatgctgatcctgagcgcaaattaagagaatgctaccaaactgtatgtgagcagct

SEQ ID NO: 16417 - DNA, 564 bp, Homo Sapiens
gcaagaggatttctttcatcttactgaacataatacaaaatgaccaagacagaaaaattattcaataaaatcaaagcgatcttaaataaaatgaagaagataaattatattttccttgcagatgatataatcttaagtatagaaaaacctaggacttcacaaaaaattattagaataaacaaatttattaaacttgcacaaaatcaacataaaaaattcagtaacatttctatacactaacaataaagtatctgaaaataaaaccaaaaaccaatcccatctacaataattgcagcagtaactatacttagaaatgaatgtaaccaaaaaggtgaaagatctgtacattagaatctaaaaaaagttagaaaataaataatattcaaacaaagagatatttctaattcataaataggcatgattaatattgttaaatatcagcattacacaaactgatatacagatataataaaacttctattaaaataccagttaaattctctacagaaatgtttttaaaaaatctaaaatgtatattgccccacaaaaggccttaatagctac

SEQ ID NO: 16418 - DNA, 790 bp, Homo Sapiens
atattggaggaatcttaaaattgcagtatctttttccacttttattaaatcatatagtaactgtgaactgaaaatttaaacagtagaggaagatacagagtaagagttgaagattttttatatccctaggtgtaaattgtaagtgtatgtaatcctatgcctttttctgtgcattttcacacatatacagatatatctatgtaattttgttttgcataaatgagatcattataaaaatattgtttgaaactttctttttaaattaatattccatcatagattttcacgttaatacacatatagttatcttagtcctttaaatggctgtgagtattcccttgtcaggtatcaggacttaattgctttccagtttatggaaattttggttgtatccaaagttctgctgttacaaacaatactgaagtggactttttgatattgtttctgtattgtggtaagatatattccagaggtaaaactgctagaccaaaggtatgggaatctatttctgtaactgacattttattgtgtgtcagcactgtattttaaaaactagtgattttgtagtggtataggatctgataggtcaaacatcagctttcaagccctgttcatctctgttctttctggatatccctctctgttgactactttatccataaaagggccagatcatatatcacctctttcctgaagggtttataacacctagaacattgaataattttaaccccagtaatagtttattgagtgcttactgtgtgccagccacaatcctatttggtttatg

SEQ ID NO: 16419 - DNA, 905 bp, Homo Sapiens
gcacgaggctcacttctttatacccttcagtctggactccctatggcatgggagggccttcatgtcatggccacttcccatcctaatgtgtgcatggtgatcatctttcctccctgagaaccactatctactgcacacttttcatggtaattgagctgtctttttgaggtcccactcacttacataggtcccttctgcctctgtgccttttcttattctatttgccctcccaccttgaaaggatttttgaatttacaaatcagatagcaattttcttaacgtatcaatttaattccataatcttaccacaagttaaagactgcttgagtttggggacatccagaaatagaagtaataggattttacagtttcatgaccttattttcaagatagggttggaattataagtttctgagcatccagacttttctgccatgattcctcctataaacttactagcaggttaatttccttaaaacaactccttcttcatagtggactctgacagtacacaatcagtgctgagctgcacagtgtaattttgatgtatcaggtgggagaaaccaagaaggttaagtagtctacccagggtcccacaacaacataggcaggatccaggaggaaggcgcccaaggaaatgcgatagttggtatggacacgatgaaaatcagcttcagggaggtgaacaggtcagagaacagctttctagttgtgctaattggattgttttctctaggaaaggggaagaatagaatcaatattaagtatatataaagttcagaactttgtcaggtgcttatacactctatagtgtgggacatatacactccatagtgtgggaacattagtcctatattcttacagcgagatccagtgagagccaccaagtcagctatgatttggga

SEQ ID NO: 16420 - DNA, 504 bp, Homo Sapiens
tgaaaaggaaatatagaaatataaaatttgcttattatagacacacagtaactcccagatatgtaccacaaaaaatgtgaaaagagagagaaatgtctaccaaagcagtattttgtgtgtataattgcaagcgcatagtaaaataattttaaccttaatttgtttttagtagtgtttagattgaagattgagtgaaatattttcttggcagatattccgtatctggtggaaagctacaatgcaatgtcgttgtagttttgcatggcttgctttataaacaagattttttctccctccttttgggccagttttcattacgagtaactcacacttttttgattaaagaacttgaaattacgttatcacttagtataattgacattatataaagactatgtaacatgcaatcattaaaatcaaaattagtactttggtcaaatatttacaacattcacatacttgtccaatattccttgtaattacctgaaatttaaaaccttccac

SEQ ID NO: 16421 - DNA, 404 bp, Homo Sapiens
tggatgagccacgtgctcgacccgatccacggccgtgtccaacgctggtacttgcccggcagccacagcctgaacttcctgctggaaaacgccctgggcggcggcgggattgccagcctgcgcatcgacccccaaggcaaagccttcgcccaacagctgctggaaatcccaattgccgtgccgcagcacattgccgatcaattcacttaaaggacccacgccgtggccttcgactcgatcttcaaagccgacttgttccaagggcaaaccatcatcgtcaccggcggcggcagtggcattggccgctgtaccgcacacgagctggcggccctcggcgcccatgtgattctggtggggcgcaagccggaaaaactgcaaacggtcgcggcggagatcagtgaaga

SEQ ID NO: 16422 - DNA, 420 bp, Homo Sapiens
cacgatcatgcctactgcgccgaggatattttccagggcctgctggactttctccgactgccccaccgtgccattggccatctcgtggctggtgcccatggccttcaccgctgcgccgacgccactgtggagcttggcaatcatctgctcgatttcctcggtggagtgctgagtacgccgggccaaagtgcgcacctcatcggctaccacggcgaaaccgcgtccttgctcaccggcacgcgcggcctcaatggcggcattcagcgccagcaaattggtctgttcggcgatgctcttgatcacttccagcacgcgactgatggattggctgtcgatggccaactggttgatcacccgcaccgattgatcgatctccgaggccaacgccgcgatgctgccttgctgggactgcaccaggcc

SEQ ID NO: 16423 - DNA, 872 bp, Homo Sapiens
caaaggctaagagactagaattcaaactctggcctgattccattgacattaatattttagacactggaagacaaagggctcggcaattttagtgagagtttggactgcatctgccttggacccagccaaggacgttaaacatgacaggcagacccattaagaaaacctaccctctaaagtgaccataaataaggtgccgccatttcgtggtggtggagtccacagatcttttctaagaggaacagtgagaagaggaagtggaccatggcgatggggaggggcagagatcttggaagtcaccatggttttcagttgaaaggatttgcctagcttccccaaggagcacaacaaataacttctaggtttcttttacatatttttaggcttttgataatctttattgtggaggccatgcctaaactaagaaaatgcaatactctccatggacctaatgaaatgagataatgcacaagagagagcctcccacaatgcctggtacatagtaagtgttctgtagtgtttaataagcgctataattattaatattatttacctagtttttctaccagccctctcaataactaaaatatgagaataattgttatgcctaaatgtatgagttaagacactcttgctccctcccttttcccccttttaaaaactcatataaggcactaaaggcctgaaatgttagtgttgagttgtactaaaaaagtgccttagaagtttagcaagggacagggctatttttgcctctagtttcttgttactacatcacagagaaacactaaatttaaaatccattacagatagattctgatttactcacttggaaaaccaatttaaaaacccataaaaaacagtacagatag

SEQ ID NO: 16424 - DNA, 212 bp, Homo Sapiens
cgcctgtacggcgccttcggtcttgatgcccaacatgttgtggcgggtggtctgaggcttgcgcgaagtgatcgccagcttctgtcccaggatgtggttcagcaacgtggacttgcccacgttcggacggccgacgatggcaacatagccacagcgagttgcggttgaatcagtcatggccattctccacgcccagggcaatcagtgctgca

SEQ ID NO: 16425 - DNA, 333 bp, Homo Sapiens
ccaccgggcagcatcaggtcgaggatcaacgcatcccagccgccttgttccagcagttgcacggcctcgttaccgtcggcgctgtgcaccacctcgaactgctcgtcccgcaggtgcaggcagatcaaatcggcaatgtgcgcatcgtcctcgaccaccaggacacgtttgggctgatccattggcaaaaccttttctcgtgattcgcgcattgtgcgggttttgcaacagtgtagttatcacgaattgtttaactctgcgtgaggattccgcgaccagaccgggcctaaccttcaatcatcgcaatggcataagtacgcaaccccattgtgg

SEQ ID NO: 16426 - DNA, 922 bp, Homo Sapiens
gcacgaggtacaactcagtgttcaatgtgaaattgctgccaaatgttatgtagtttaatagagaacttgaaaaaataaaacattaaaatggagcttgtgttagcatcaggtatccatttgttcaggacagtcctgttcatgtctgttgtcttggcatagttttttcccctagaatatagtactcccttttactctaaaaaatatcccagtttggacaataaaatacataattactctagttatattatttgctttacttctaaaaatgtaagaaattgaatttttttaaagaaaaatgttggttcctgccttgatctaagtctcatccaaaggaaataaatagtcactagttttttatcttacaactcaggacatttgtctttggttattaatggaaattagtatgtgattactttcatagttatgccacaaatcacattgaagaaggaatcattccgacctctgttccaggacaagagctagaacaatccatttcttgtcctttgatttgagagtcacagtcagggtggcttctgccacccttagtaactcagagcagaggccagccccctccttccctcactttcttttgctgagtcctttgcccacctgtcaaggtggcaggcactgtgctgggtacaggaggacagtcagacatgtcccttcttagctatagtcgagctgtctgggaaacaggatgaaaaacaggagggttattttcttgtgccctctttgtcagctgatcccctcttctgctaccagctatttggccagcaagccgtttttagtccccactttgcccatttttctgttttggttcatcgtttcttaaaagccatgttataaacctgggaagtttgaaccctgttgctaattttaaactttcctctaaaagtactgaattttgacaaaaatttgaaaa

SEQ ID NO: 16427 - DNA, 294 bp, Homo Sapiens
cacaaaaacgccgagaaaaagggcaataccgagatcgccaccgagtacctcaagcacctgtacagcccggctggccaggagattgcggcgaagaacttctaccgcccacgcgatgagaaagtcgccgccaaatacgcccagcagttcccgaaactggacctggtgactatcgacaaagacttcggcggctggaaaactgcccaaccgaaattcttcaatgacggtggcgtgttcgaccagatttactcggcgcagtaagcaaaatcaaactgtaggagccagctttctgtggga

SEQ ID NO: 16428 - DNA, 759 bp, Homo Sapiens
caccttgtagggtgtgttggaggtgccggcgtcgtcggtgaagtacgagtcctgaccacggtaggtggcgacagccagggtcaggtccgagagcttcgcaggtgcagcgaaagcccgtggcaccagcgaggcgaggcccagcgcgccaagggcaatcgaactggcgcccaggaagccgcgacgattgaactgtccgtgtttgatcgtgttcgtcatggtcgtgccctggtcagatggcgatctgtgtgggttgggtttcaagggcggcgctgtagcggttggccggcacgtccaggccaaggttttcccgcagggtgacgccgctgtattcacggcggaacagaccgcgttgttgcagcaccggcaccacctgttcggtgaagtactgcaggccgtcgggcagcagtgaattaatgatgaaaccatcggcggcacccgcttcgaaccaggtctggatcgcgtcggcgacctgctccggggtgccgacgaaatcgcgcttgggccgggagaaacgcagggccacttcccgcagggtcaggccttcatcccgagccaattgcttgatgcggtcggagccgcctttctggctgttggagcccaggtcgccgagttccgggaagggtttcgtccagcgggtacttgctgaaatcgtggtcgttgaacgggcggcccagggcgatgattgcgtcctcgacggtccacaagctccacggcttgctgatagcggcgttccacctcagcttcgccccggccaacaat

SEQ ID NO: 16429 - DNA, 150 bp, Homo Sapiens
ttaccagtcgggcaacacgcgcaccagttggccgctgtccacgatacggtaccgccatcggcatgctgaccagcgcaatccccaagccttgggcgctggcgcagcaggcagcgccagagtcgctcatggtcatgcgcggcttgagcacca

SEQ ID NO: 16430 - DNA, 315 bp, Homo Sapiens
ccttaaaaattccgggaaaaatacatgtcaaatacttagatgtcccattgatatgagactatgtggttaaaaaacccaagtatgtccatgtgtttcttataaggtacacttgaaactagtgagtgtttgtcacatttcactttcatggtatataaaatgcagtttgcatatataacttgaatatctggtactagttttttcacgcctgcaatcttggagtctaggttgccttgtctctcctatttttaaataagtgaaatttgggagattgtaaaatctgtaaagtttgttttgtgaaaataaaatgttcacagt

SEQ ID NO: 16431 - DNA, 664 bp, Homo Sapiens
gcggatcatcggctcgccgcttttgccgatgatgcggctcagggacgacgtcaggccggcttcgttgtgggtggcgaccagcttgccggtcagcagcaagccccaagtggcggcgttgacgaacagcgatgggctgttgcccaagtgtgggtgccagttgccggtgctgatcttgtcgcggatcagtgcgtcgcgggtgcccttgtccgggatgcgcagcagcgcttcggcgaggcacatcagcgctacgccttcctgggacgacagggaaaattcctgcagcaagccctggacgatgcctgcacggccgccggcgcttttctgattgcgcagtttctcggcgatcgaagaggcgagcttgttggtggcttcggccattgccgcgggcaggcgagcctgctcgatcagcatcggtaccacttccggttccgggcgacggtaagcggcggtgatcgacgcgcgcagcaccgattgcggcaggatgctctcggcgaactccaggaagcactggtgggcgtggtcggtctggacctcgccggcttcttctgcgtccttgctggccaggccgttgagctcggccagggttgcaccaccctcgagtttctccaggtaattgaaaatcgcctgcttgatcagccagtgcggcgtgcgatcaatggaggtc

SEQ ID NO: 16432 - DNA, 895 bp, Homo Sapiens
tgcacgaggtggaggcttcgttctgtggtttccctcctgtcttttggttatgggttaaacccctcatgagaagactagatgagatacatttattattattcctctgcgatgtcttgaatattaaaaatatatcgtgtgtgtgtgtatatgcgcatgaaatacttgggagtaatagaactaattgtcactgctttagaaacctgggaaacacttttaggtagtaagtcaatggtaagattgtcacctttcttctaggagaaggaggggagattgtagacctgaatggaaggcagcatatgggaatggaaagagcatccttgtggagttgtaagaccttgattagagctgtgagcccagcactcggtaggagggaagtggcttccttatctgcaaagtagagataagatgtggggctcatgagactttgttaagattaatcaagataatgtgagccctgctttgcaaatattatagaacgatgcaaatattagcttagagaatatttatcaagatgagtcaaacttaagcagccatctactatgactgtttttatatcatgtgctttcagtaagataggggacagcatcgatcccacaaacacagccctcattggcctgtggacacctgaaatgcgactacaggggacctaacgtggcttttcattccccagttttgcaaatgcttttgggagaaggaacatcagtctaaatttagcttaaaagtaaagacaatgtttatgctaagggtagattttgataaggacagtggggctgaagataaactttatacacttcacagctttgcactgaactagtcttggagaggggaggacaatttcgtgccatttgcattgtttattcattccagcctaagttggtcatggagaaaggaaaaa

SEQ ID NO: 16433 - DNA, 123 bp, Homo Sapiens
ttcaggcggcagcatggcctatgtgcgaggcccccgcgaacgtggggacgcaacaggcactcgcatccgggatggaccaggtgaagcaaggcgttacccagcaatatggattgaacccgaaca

SEQ ID NO: 16434 - DNA, 900 bp, Homo Sapiens
ccagcagccgggcatggtccagcttcatgcctttttctcgccacaggttgagtaccgccaggttacggcggcagtccggtacgctttggtcggtacaccacaatagtttgtcgcaatggctgacaaaggtgcgcaaggcttcactgtcgggttggccggtcaggttcaccacgatgtgctggaagtgctggcgcagggcactgagcaacatgtacagctcggctgcactggtgcggtccagcggctcatcgttattgtgataggcgagaatgcgcaggccggcttcggccgaggtgaaggcgctgttgatcagggtggagtccaggcgtcgcaagtggcgcagggcgtcgccgaaatggaaagagctttcgagccccagcagcgccaggctgtcagcgagaggcaggcccaggtcgagcaacaacgtttgctgcccgcttttttgcaccaccaacgccaggtggctggcgatcagcgcaccgtcggcattgccttgggtgccgtagagtacggtcagcccgcccaagtgggcattcggggtaacggccggcaagcgtttgctcaggcgccgaaccaggccggcaacctcactggcgcgcgagccgtacgcgacgaaatcccgcgcaccggcacgcatcgcgttcagcacaagctggttgtccatgccatcgcccaaggccacgatggcaagcaaaggcttggcctccagggcgccttcgatcagggcgcactgggtggtcacgtgttcacggtccaggccaataaacaccaggttggcaaacgtcacgtccaccagtgccagcagttcgtcgaggctgccggcgcccgcgctgaccacctgtcccaagggcgcaggcgcccccttgaagccattccagatccgtggtgtggcgggtaatt

SEQ ID NO: 16435 - DNA, 226 bp, Homo Sapiens
ttcccgggtccactaggccttgctgttgcgcgagcagccgctcgcgcaggacggtcggcggcgtggcgggcattccgtcatcgaacggactctcgcggcgcaaatgagccacatgcgcggcgcgaatcatgattttcgacggcacgcagccgacgttgacgcaagtgccgccgatggtgccgcgctcgatcagagtgacgcgggcgccggcttccaccgccttcaa

SEQ ID NO: 16436 - DNA, 932 bp, Homo Sapiens
cacggcattttctttgaggccatgcgcgacttgcgcctcaagcgcaagaatttcgagcgcggcttcatggagcagctctacgaggcgtttgccaatcttggcaacgtggagcggggtgagctgcaattgattccggtggtgtcctacgcggcggtgcccggcgtatccggcgatgagctggaaaaagccgttgccctcgaggccatgctgggcaaggtgctgcgccgcgatggcctggcccttgggcagttgacggcgcgtttgagtgcgttgctcgacaagcacatggatgatcgggacaaccctctgggcccggcgatgctgtgtgcgttctttctgcaagcgggacgcagccttggcgtagaaattcgggtcaagctgatcatcctcaagctgtttgaaaaatacgttctcagtgacgctgatctgttgtacggcgaagccaatcaattgctgattgccaccggcgtattgcctgagctcaaggcggtaccctcgcggcgtgcggtcgctcccgccgatttgcctgaagacacaccgccgattaccggccgtccagcagacgacagcgggcaggaagtattcgcggcactgcaagagttgctgtccgccgtgcgcggcagtgtggcgcccacccttgaggcgagcgccgagatgcagccaatttccacccgtgacctgctgcgcctgctctcccatttgcagcaatacgtacctgagcccgaagtggaggatgatttcgatctgcgcaaccagcttgaacagttgctgacccgggtcagcgtcaagagcggtaagtcgcgggtcgtggaggatgcggacgaaaatgtgatcaatctgatcgccatgctcttcgagttcatcctcaatgactgcacggtgccggagtctctcaaggcgctgattgcgcgcctgcagattccgatgctgaa

SEQ ID NO: 16437 - DNA, 204 bp, Homo Sapiens
cacacaattccaatccggcatcctgcatcatggctttcagggtatcctgatcgggatgcatacggatggattctgccagataacggtagctgtcggcgtcgttcgcgaccagtgagccaatacgcggcagcacatggaaggagtatgcatcataggctttgctcagcggctcgataattggcttcgagaactcaagcaccagca

SEQ ID NO: 16438 - DNA, 523 bp, Homo Sapiens
ccgccaccgccttcaagcgcactctcaactccagccatgaagtcaacgcactgagcgtggccaaagggcagttggacgtcgccaccttcaacaccgaaagctgggaccgcctggaagtcacccagccggacaaggccgcgatgctcaaggtgatctggaagtcgccgctgatcccggccgacccgatggtgtggagcaaggccctgagcgacagcgagaagaccaagatccgcgacttcttcgccaactacggtgacaccgacgaagagaaggccgtgctgaagaacatgcaactgggcaagttcctcaaatccagcgacgaccagctgttgccgatccgccaactggagctgttcaagcagcgcaccaccatcagcgccgacgacaagctggaagcggctgacaaggccaagaagctggcggatatcgacgccgacctcgccaagctgcaacagcgcatcaccgaactggacaaaaagaccgcagccaacggctaaccccctgtaggcgcgggcttgtgtgg

SEQ ID NO: 16439 - DNA, 561 bp, Homo Sapiens
gcacgaggttttttttaactgtgatcacagaactgaatttatcaacaggaaaacaggattgaaaaaagaagtttctcatccaaggtttttctgagactgcaaccaaggaggtggtgtgttgaatttttttccccttcctcctctgagagttcaaagctcggagctgaccacttaaatgcagtatctgattaatgttgtaagtgacattgcatatcagcctcagagtcttggttcaactgttggcaaagattgggcagcaagccttgtggaccaaactggggttactctccaggaaagagcaaattagtggtcacaacattcagatcttagagccagaagaacaggactacagcagagcctcacttcaagacaactcggaggcgctggctcctctgaaacccagacgctgtcaactccctgggcccaggagtcacaaccgctttcgtgctctgggttcttcacttcttgtgatcagctccacatatttttctgatgatgtcacccattctgacttcctacattttgaaagttgatctacaagtaaaatctttcgtgaggctt

SEQ ID NO: 16440 - DNA, 1053 bp, Homo Sapiens
gcacgaggctgctgttcataatgtttcttaaacagattcgtttcctctaagagaagtttctatctccccttggcaaaacaaaatactattcttgaaaacagaagttataataattaatgatatcattcagtgtgtaacattagaaactatgaagtttaaaagagtcagaggttagttttcctgtagaagaaatagtatgtctctctaaacagaagagaaattactggaaattctctctcctgtcagttaccctaaaaaccagctccagcaaagccatttcacgaacaattatgcatctataatgatctaaataataattggagaaaaatagtattttatggacattaaaatctcaattaatactattgcaactattgaatcaaatataaattgaattaaatttttaaattcaacagaaaatagcaaattggttactagaatattttgtctctaccaatttcactatacttctgaggtgtaaaccaaatataatactggcataaagaaggaaaaatatctcaagatttctaggcattttcctatgtctaatagtaggatgttctctctgaatttatttattacaaaaataacattacaacaataaagcaaaataatatttaaaagaaagaaaaaaacaaacagtcgcaataccagaacaccattgtagtcgtttgtgtatgtgtgacttctttactgtgttcatgcagagacaagctttgtaatacctttgtaactactgtacaggtgcgtggttagattccgttttgactgcttggtatctcattgtaagcatttcccagggacactacacagtctttataattatgatcactacatcttttggataacttaggcttttgcactattttgtcacgatgcctcaaacttttttatcattgtctgtaattactcctataatcttttattataaaatattgaaacaaagtcacatcactaaaaacactgtgagtataatttattagtaagtgtagactgtgtatcattagcaaaacttgtaaatgcaacgagtcaataaaacagtagaacaatgtc

SEQ ID NO: 16441 - DNA, 384 bp, Homo Sapiens
ccacgcgtccggctgggcaataaaaataaaggaaaattgtctataattaatacttagaagtgaccactgatatagtttcagtgtgtgtttttgtgattctttatgtgattagcttttaaagtcaagtagtatattgtgaacattaaaaaaagtaaatgcatttcagacataataatagctaatatgtatcgagtgctttatttttctcttatgtgaatttcttatggtagattctctaagtctagtgtaatgactattccacaaaatcatcagagaccccaactttttctttttgtcagtactacctccagttccaagacggctatttgagtttcagttgtcctacccatattccagccaggagaattgctcaaaagctccact

SEQ ID NO: 16442 - DNA, 377 bp, Homo Sapiens
tcgatgggcagcagcgacgtcgccagggtgcccagcagaatcaggatgatgggcaacaggatcaggctgacgatcagcccgaaacccggcgccggagcgggcggcagcttggcaacgagactgctggtggactcttcgaggcccatgtgcgcgacggcgccagccccctgttcgacgttctgggcgttgccgttatgccaggcgcgcaggtcatcgttggtcacgtgggggccgtagacctctgcacggatatcatcagacatcgggtaaaaacgccgggtcatgcgtccggccacgcggtagccgacgtagcacaggaaggccgtgagcggcagcccgaacatcagtacccggcccaggtcggcgcccagttggct

SEQ ID NO: 16443 - DNA, 932 bp, Homo Sapiens
gcacgaggcttgagtatttgggatgggggcctgtgagtctgattgagacatacattttacagagtagcagcactggaaagggctagtccaacctcccagcctctgcttgggtctccgctgccccagccacacacatcctagaattcttgtaaacatatctggctctgtgttaacagtcacttgttatatgttttctaagagattagttcttcctgtgatttttccaagtacgctgaaagtagtagtatgaacttaaggaggctagtcaaagaaacttggagttataggtatttttaaagaataaatcctcaattccatcatcacttggcggggagggggcacttattaagcattttagataataaaactggttaagcttactctggtagaacagacaatcaaatctggggattgctgagaacaataataagctgaagtatggctcacagaatcctaacacaaatcattaagtctctagttagatttgttatcctaaaatttttcatagaattttaaaatctaattctgacttgtatggttaagaaaagcagttaaatattttactacttatcaagggcttttaaaataaataaatctgattgataggaagaaaggcaaataaatacctatgtagacattctataataacaaagagccatagatgataaaggaattagattttaatgtagaatgggtggtttctgaaacaaaggtatgtggtactttgtagttattgatgagaagccagtaaccagtagtgttttcctagatatatgcccaccctcacacaactttccttcattaacaaacattaaatatgcatttgtatcttattaaattatatggtattaatgctgaaggaaaacaaaaagtgttcaaataatcataacttctacattacaggttctgtttaaatgcagaactagaggggc

SEQ ID NO: 16444 - DNA, 793 bp, Homo Sapiens
  misc_feature (556)..(564): n is a, c, g, or t
gcacgaggcctatatttttcctattttattcctactggaatagaggataaccattctctgaataacctccttagtcttttcttctttaatctgattaatccttcaaaatttacttatatattctcttctctttttcattaactttatggttttcctctgaaccgcttctgtaaacttactccattcttccaaccaggccagaatgttggcaagagtcttttctcttatttcaatagtcttagcgtaagtagccattttctcaagaaaattggttctctgttttttcttatgttctgtaagggagacattcctttcagaggacgagttaaaaacaagagtatagcgagtcattatccgatgcacattgttcattatttcactcagctgcatatcaatgtcctgtcagaataagaagggggcatgtattaatcttcagtttgaaaagaagctttggtcatctttcttctcagaacgtcagtgacagttaatttaaagctatccaattaaagtcttgctaattctagcttttattgtgagtctcaaattttccctcttnnnnnnnnnttcctttttctgccttcatcatcctagcaatgctatgatataatggaaagagcattgggtttgaagccatatctggatcttaactctaggtctttcattaaaatgacttttaataaatcacggcatgtctgagctccctctgccgcctctgtaaatgatggagatactaaatacacagttgatgtgaagtgtataaaatttgtgaagtgctttataagctgtagctgct

SEQ ID NO: 16445 - DNA, 904 bp, Homo Sapiens
cccagcaaaagcatgaccggttccgtggcggtgacggcggcaacgggcaacgtctcggtcaagatcaccgacaaggacggcaacgtcgttcgcaccatcgacatgggcgcccagagcgccggcaattccagctttgtctgggacggcaagaacgatgcgggcgagacggcggctcccggcacctacaccttcaatgccaccaccaagaatgacaagggcgactcggttgccctgctcacgtcgctgccggcaacggtgaccagcgtgaccctgagccagaccggcggcgaaatgctgctcaacctggcgggcggcatgggcagtatcaagctgtcgcaaattcagactatcggtacatagagccggctaaatacggcaaaaggagagaacaatgtcttttaacatcggccttagcggcctctatgcggccaacaaacaactggacgtgaccggcaacaacatcgccaacgtcgcgaccaccggcttcaaatcgtcccgtgccgaattctcggatatctacgcggcgtccaagctgggcaccggccagaacagcatcggcaacggcgtaaacctggcggcagtgtcccagcagttcacccagggtgacgtcaacaacagcggcggcacgctggacatggcgatccagggcggcggcttcttcgtgcagaagggcagcgacggttcgctggagtacacccgtaacggtgccttccgcgccgacaaagacggctacatcaccaacaacaccggcacctcgcgcctgcaaggctacgcggcggacgccgacggcaacatccagaaagggcgccttgaccgaccttcagctcaacctgtcgtacctgccgccgaaaggttccagcaagggtgggactccaccagtaacctggaactccttcctcgccgg

SEQ ID NO: 16446 - DNA, 255 bp, Homo Sapiens
cactcaagggcggcctgtttggcagagaacggaacaagcggctggcccatcgcattgagctggggcgcggcatttgccgaggcgggaagatgaagaggtttgagatccgcggctttgccatcgacggttgccttcgattcacgcggaaccgtttggccaggcttgggaagcttgacgcgccgcttcttcaaattcccgggggtgcgagctttgtctttcttgcggaccgtctctccaacgctttcgggtaactgt

SEQ ID NO: 16447 - DNA, 964 bp, Homo Sapiens
cgacttgtgtgtgttggccaccccgcatatcgccggctacagcctggacggcaggcagcgcggtacggcgcagatctaccaggcgttatgccggtatcttggccaggaggcgatcattcaactcagcgacttgctgccggagccgtggttggccgaagttaccctcaacgccaataccgacccggcctgggcgctggcggccctgtgccgtggcgtttacgacccgcgccgtgatgacgcggattttcgccgcagcctggtaggcaccgtggacgagcagcgcaaggcgtttgatcaactgcgcaagctctacccgccgcggcgcgagattgagggtttgaaggtgcgaatcagcggcgactctgcggccttgtctaacatcgtggcggcattgggcgcgcaggcaatctgaaggcataaaaaacccggccatcaaggccgggtttaaaagagcgtgggcgattcagcctcgcttggcaggcttgaccaatttctgttccagttcggcgcaggcgctctggatcatctcttcggtgatttgcacttcgcggccttgagcgtcgatgtacgagcaaggcaactgctgcggctggcggatcacttcaatcttggcattgctgctgttttgcaaggacatggcccgtctcctcatcaggttgtgtacctattgtaaaatcaccgcgtgaccgcgttgttacaactcctttcacggtcagcagatcgaatgcccagtccagcagaaaccgatacaaatttccagccgggccttagaccgatagcctctagggcctagttcggtaagcataattaacctgactcattgtgattcgctcaagttccccccatgtagctctgtaggttcccgtctcccaccctcaggtgaaaccctccatgctctcagcccgtcaacgccgcgcgattcgctgggccagccgcttcgtcgctccctaccgctggcaggccc

SEQ ID NO: 16448 - DNA, 874 bp, Homo Sapiens
ccggaattcccgggtccacaacagagctggaggcgagcaacgccctgcccgcttcactctgcggcccgaacgggttgatcacgccgttggcgataccctggctgatggtctggtcgttcacataaccgtccagaatggtttgcaccactttgttctggttgtaggacgcaccgacgttgtagtcccagttcgctacggtgccttcgaagctcagcagcaggcgctgactggtgttgtcatcttcatgcttgcgcgccccggcgtcggtttcgcgccagttcacatccaccggttgtgtcgggtccagggcaaaacccgtcggacccggcgtgatgccgttgcccggatagaacgccgtacccggattgacctgggcgcccatcaaggtgcccgggccaatctgcgtgcggttttcgttgcgcgcccagaagtactcaaggctcacggtgtggtcatcggccagcttgccggtggctttggcaaaggccgaggttttttcggtttccggcaccaggtccaggtaactccacaggctttggcggcagatgccattgcgcgacagcaacccgggggaattgcagccggagccagccagcgggttggtcgcgttgctaccctggctccagttcgccggggcggcggtgcccgaggtgaaatccaggccgcgaccgggctggtagttgtaggtgtagtcgcggtctttggccgcccgggcgcgtctgcttgtcgtagctgaccacgccaaatacgttgaagcggtcgtcttccaggtcgccaacccataactgccgctgaagttatggctgtcaccaccgcctgagcgcgtcggcgaatcttatttggtggaaagctggcgccggtcaggctggtctgg

SEQ ID NO: 16449 - DNA, 771 bp, Homo Sapiens
caccgccatctcgtccacccccatgcggcaggtggaacaggcgtggaaagtggtgccggcgttgtcgcggatccaggcttccagctcggcatcgctctgcaggtgcttgccggggctgagctcctcgccgcgcagttcgtcccaggagcgctgggcgatcatttcccgggtcttgcgcaggccttcgcgcagttgctccaggtcgcccggcgcggtgaggaagttcaggcggatcagcggatcggccttgggatccttcgaggccagggtgacgctgccacgactggccgggcgcatgacgctggtgaagtactggaagcccggggtgatgcgcgccttgccgcggtagaactcgcccaccatggggagaaattcgtgctccaggttggcgtactcgacctggtcgttgccacggaagaacgcccccacctcgaagtagttggacgcccccaggccactgcgcgcggccatccagcgcgccccgacgaacagccgcccgagcggcgacagcgcgcgggtcggcgacacaccctgcttgggcgtcgaatactggatcgccacggccacgtggtcctgcaggttcttgccgaccccgggcaagtggtggcgcagctcgatgccgagggccttgagctcgtcctgatcaccgatgccggcgagcagcagcaactgcggcgaaccgaaggcacccggcactgaggatcacttccttggcggcatggctgatctgctcgacgccatcgatctcgtacttcaccccgaccgcgggcc

SEQ ID NO: 16450 - DNA, 743 bp, Homo Sapiens
cggctgctgcttcgaggggatcaatcggctcctcgatcgggggagggctggatggcaatgccggtgacgacgaggctgccggcgcctcatcgctcatgctcaagcggaccgacgggccatcggcgctaaagctccgatcatcgccgcgctcccacagcatggcagtcgcttctgccgtcttacgatcatccttgaccctggaaatctgctcagacgtggcgttggaatcgtgtcggagtaactcttcgacctgcagcgcttcttgcgcagccttatacagcgcatcttgttgctgactgacgctgaatttttgcagccactcagggccaaactcgtttctaagctgctgcagaacggccgcatgctgagtcccaaggcctgggtagctggagcgactccagcagttgttcagctcggctttccagcttcggcctttcagggtgcggaagaccctgatggcctccagttgcaacaaagaaagcttcgtgtcctgccggctggcattgttagaggctacaggagcatgggccggcggcgcctgtgtcgccgaatcgctgggacgaaggcgtttgatcagggccatcagccttactccccgtccagatcttcggcatcctgcagatcgcccgggacggcgtccagcccgaggtcacggacttcctgccagcccagatcgtcgtgggggatatcacgggctccgacttcaggcagggatcttctgtgtattggtgttgggcggtatc

SEQ ID NO: 16451 - DNA, 808 bp, Homo Sapiens
gacaaaataccaccggcataaccggcaccttcgcccgccgggaacaggcctttcacgttcaggctctgcatcgattcgttacgggtaatccgcagcggcgatgaagtgcgggtctcgatcccggtcagcaccgcgtcgtgcagcgagtaacccttgatctgcttctcgaacgccggcagtgcttcgcggatggcttcgatggcaaagtccggcagcgccagggccaggtcaccccaggccacgccgggcttataggacggttccacggtgccgatggcggtggacggcttgcccgcaatgaaatcacccaccagttgcgccggtgcttcgtagttgctgccgccgaggatgaacgcgtgggattccaggcgctcctgcaactcgatcccggccagcgggccgcccgggtaatccacttccggggtgatgcccaccacgatcccggagttggcgttgcgttcgttgcgcgagtattggctcatgccgttggtcactacgcgattcggctctgatgtcgccgcgaccacggtgccgcccgggcacatgcagaagctgtacaccgaacggccgttcttggcatggtgcaccagttttgtaatcagcagcgccgagtttcgggtgcccggcgtacttgcccaggcgcgcggcgtcgatcagtgactgcgggtgttcgatccggaaacccaccgagaacggcttggcttccatgtacacgccacggccatgcaccatgccgaaggtgtcacgggcgctgtggccgagggcgaggatcacgtgttttcacaggatctgttcgccgccatccacc

SEQ ID NO: 16452 - DNA, 951 bp, Homo Sapiens
  misc_feature (201)..(209): n is a, c, g, or t
  misc_feature (626)..(653): n is a, c, g, or t
gcacgagggtggacttttatactatattgcagaaaccaatatctgtttcttggtggttatgtaaaagacctgaagaattactatctagtgtgcagtctgtgatatctgaatgttcattgtatatttgtctctgatgcaaaaaggtagagtaacacaattacaatacatgattaaatgcaatagtccaggtacttaagtaannnnnnnnncatttcaaataaatacctatttaccaccaaaagaaagaaaaagaaaagttgttaagtcagttattcagggaaggaaaaacagagatctaataactccctaactttatgtagttcttttctagttgtaaatactttcagaagcacctgcataagattgcagaagtattggctgttaaggttccagttccagttctagtttgactcatccttaaaaatcaggctttctgcagtctgagcttctcaattgtgctggattcccagggctaatgagtgtatgtggatggcagtaaggagaagcaagccccttctgggagacgtgaccctcaaatttgactggacctgtggaaaaagacatgtctgcatggttttggctcttttttcctgagctttattctccagccaaaaagtaagcaacannnnnnnnnnnnnnnnnnnnnnnnnnnnctcttgcacccatactatagtcacataaggaatattccagtgtcctgcctctcacctggaactacagcagccgctgttagcagctggtctttccagttcagccttcagtctgagagtgttagaactacaatccattgttcttgttatgagccttgttggggttaaaatagcctttctgtaaagaagagtttttagtttatttagctggttttgatggatttcacctttccctctttctaaagatattaaatttctttttagcctgaacagcaaagccccaaatttggatatggtttgg

SEQ ID NO: 16453 - DNA, 310 bp, Homo Sapiens
cgcgaaacaggtcggcattgctgtcgttgagcagccattgcaggcgaacgttcgggtgctcgagcttgaactcatccagccagcccagcagcacattgcgcccgaaatccgagggcgcggccaattgcagcaaaccactgaggctttggccttgttgcttgatcgcctgttcgccttcggacaacgcctccagggccacccgcacgctgtccaggtagcgccggccttcttcggtcaggcgcatgctgcgagtggagcgcgccagcagccgaatgcccaggcgggtttccaggcgcttgagggcaatgct

SEQ ID NO: 16454 - DNA, 683 bp, Homo Sapiens
ggtccggaattcccgggtcgccttaaaacggcctggcccaggcaccgtgggtgcaagtggtgacgccactgcatttcggcatgccgaagttcgagttggcgccgattctgtcgatgtgcctggtggtggtgattatcttcgtcgagtccaccgggatgttcctcgccctgggcaagatcaccggccaggaagtcacgccgaagatgctgcgtcgcggcctgttgtgtgatgccggcgcgtcgttttttgccggcttcttcaacacttttacccactcctcgttcgcgcaaaacatcggcctggtgcagatgaccggtgtgcgctgccgttcggtgacgatcatggccggggcgtttctgatcgtgctgagcctgctgcccaaggccgcgttcctggtagcgtcgattccacccgcagtgctggggggtgcggcgattgccatgttcggcatggtggcggccaccgggatcaagatcctccaggaagccgacatcgccgaccgccgtaaccagttgctggtggcggtgagtatcggcatgggtttgatcccggtcgtgcgtcccgagttctttgcgcagttgccactgtggatgagcccgatcactcacagcggcatcgccatggccaccctcagcgcgctgtcgctgaacctgttattcaacattctgggcggcgccgaacgc

SEQ ID NO: 16455 - DNA, 1106 bp, Homo Sapiens
caccagggtgccggagccgtcatgaatctgcaccttgagctgcggcaagtatttctcgccgccggcggtgtgctggcgaatctcgtccagcaatccttggtcgatggaaaattcggcaaacaccgggcctttgcccggcgagatgaaatcgatggccgcagccttgtcccagacaatgtaatcgcgccccagattctccatcagcatcagcatgtagaacggatcgaccatcgaatacaggctgccgccaaactgcgtgccgacgtaattgcggttgtaccagcccaggcccatgcgcaccttgacctcgcgaaaatcgctgccgatgtgcaacacccggactccggccccgaggtacggcgggtacaaggtcatgatccagcgcaacagccgcgccttgcccaggcgttgggtcagccactcacgcatcgggacgagtgcccaggcccatggcctgacgcgcgaaccagcgcttggccggcggcagcaggtccagacccaacaaccccatgttgcggcccagcgctaccaacggttgcgcactgccaaacagacgggtgacttggtcggagaagccgacggtgagtttctggtccatgcgctgacgctcgcggtacgcctgcagtgtcgccaggtcgccagggatcgcgggcccggccagcagcgcctcggcgagcgcgtaggcatcccgcagggacaggttgaagccctgaccggcaatcgggtgcaggctgtgggcggcattaccgagcaccgccagatgggagcgcacttgctcttcggcttccacaagggtcagcgggtacaagtgacgtgcgccgacctgcttgagggtacccaggcggtaaccgaacacgccctgcaattcactgaggaagctgcgctcgtccagctcggccaggcgcttggcgtccatgccgatgcgggtccagaccagcgcgcaacggttgtccggcaacggcagcaaggccatcggcccttcgtcggtgaacccgctcgaacgcctcgccgttgtgggcttcgctgggggtgatgttggcgatcagcgcactctggttgtacggccgctttttaacgccgatgcccagttgttcgcgcaagccgga

SEQ ID NO: 16456 - DNA, 186 bp, Homo Sapiens
actttgtcggcgatggaatgggtcaacctgttcgccctcgccgtcaacgaagaaaacgctgctggcgggcgcatggtgacggcaccgaccaatggcgcggcggggattatcccggcggtgctgcactactacatgaagttcaacccggacgcgtccgacgatgacgtggtgaatttcttcctcgcc

SEQ ID NO: 16457 - DNA, 910 bp, Homo Sapiens
  misc_feature (80)..(97): n is a, c, g, or t
  misc_feature (106)..(376): n is a, c, g, or t
  misc_feature (382)..(411): n is a, c, g, or t
  misc_feature (429)..(488): n is a, c, g, or t
  misc_feature (552)..(674): n is a, c, g, or t
gcacgagggtgggggggtgacatatgtatatgccataaaactctcccccagtgggaaatgttacaggacaaatgacctgnnnnnnnnnnnnnnnnnngagatggannnnnnnnnnnnnnnnnnnnnnnnnnnnnnnnnnnnnnnnnnnnnnnnnnnnnnnnnnnnnnnnnnnnnnnnnnnnnnnnnnnnnnnnnnnnnnnnnnnnnnnnnnnnnnnnnnnnnnnnnnnnnnnnnnnnnnnnnnnnnnnnnnnnnnnnnnnnnnnnnnnnnnnnnnnnnnnnnnnnnnnnnnnnnnnnnnnnnnnnnnnnnnnnnnnnnnnnnnnnnnnnnnnnnnnnnnnnnnnnnnnnnnnnnnnnnnnnnnnnnnnnnnnnnnncaaccnnnnnnnnnnnnnnnnnnnnnnnnnnnnnnaagacagggtcttcctcnnnnnnnnnnnnnnnnnnnnnnnnnnnnnnnnnnnnnnnnnnnnnnnnnnnnnnnnnnnngctcaaatggtcctcccatctcagcctccctagcagctggaactacagatatacgtcaccatgnnnnnnnnnnnnnnnnnnnnnnnnnnnnnnnnnnnnnnnnnnnnnnnnnnnnnnnnnnnnnnnnnnnnnnnnnnnnnnnnnnnnnnnnnnnnnnnnnnnnnnnnnnnnnnnnnnnnnnnnnnntgagccactgtgcccagcctaaatgacctgttttctttgacaaataaaggcaagcaagagagggctaaaaagtgagaagtggcgtggcatagatattacagaggcttaacagagctttcaaccaatcacaagcatggactttatttagatcttgattccaaccaactataaagccatttatgacatctgaatttgaaaactgggatatctgatgataggaaggagttagtagctga

SEQ ID NO: 16458 - DNA, 866 bp, Homo Sapiens
gcacgaggataacatttaaatgtgattttttagtaatagcaaactttattataatgaacttcagtgatttctctctgttaagagaaagtgatatatgataatctagtttaatgcctcaaacttctcttaatgatatgattcagatttataaaaactctgtttactttgggccaaaattagcttgggtagaaatacatcatttctagtagatcactttaagttatagtctgatcaaaggatggcttatgataattatctattttttggtagtcagctactacattaaattgtacatagccatatttaaatttgatgagatggtgtttgcaacactacatatagtaaatgctgcacaaagacagatatttcccttttttcattgccttaggaacgtttatgtagcaccagaggctgagcagatccaaaatagtgagtctagggttgaggatttccccaccttttatctgctaatattggttcctaaagttatgcccagtgagcaaaatgaatattctgtatactagataatttggttagataaatagtgatttcttttgtgcaacttaaattgtctaccaaaatgtttgggtattagaaaaccattgtaactacgaaaaatagagtgctgtcaaaagtatctaaagtctactaggaagaaagctttaaaatggattttgataaatactagtttcagttatgggactaccatatatgtatgtccaaataaaaatcaatttttttctttaaaattatgcttagaaaagagggagttacttattaaaatttagatccttgcaaagtcattcatgttactctttggagaagatatcatctgaagtatctgttcaatgcttaaatgtactgga

SEQ ID NO: 16459 - DNA, 520 bp, Homo Sapiens
gcacgaggagatgtgggaacattcgggagccccgagtctcgagaacccggttgccctcacccatccgtaattgtctccggcgttcccaaggccagctcggacctgggtcggggaggaagcctcccccacagctggcgacccgggaccccggcgcccctcccagattgggcgggatcagacccccgaggcggatgccgcttagtcagacttggctgttactgttacctgtgttgttgagattattggccccttgcgtgactggcgttaggtctctgagcctcagtttccctgtgtgttaagggggggtctcatggcatgggaccttggcgaggatgagttgagtggataggagctgtggccactcagtgggtgcccagggacagtcagctgtcatcataattatattaattatgtctgtagccactgttcagattcattcctgttccaagaatcccgaccatcttttcctctgggtcagatttaaactttttgtttgtttgttttatttgtagaggtgggg

SEQ ID NO: 16460 - DNA, 837 bp, Homo Sapiens
gcacgaggtccccctgagagttctccaaaacggaaaacattctgacaacatggacaacagggaacctttaccttgtgcatttccatgagggactttggtcacttttacccacccctcggtcttcccaggacagccttatgaaactgctactacttggggactaggggagtttagaagtagaactgcaacccaggacccaagcagtttccaccaccgccctggaggccactgcctaaagagtatggtcaaagcatggccactttggtctacaacattcaagattcatgcaccggtcttccaactggaccagagattaattttcattagttaatttcattcttgcctagatattctgttgcttctcttactgttagtacacaactaggtcaaccagtatcccagaaggactgaggtggtgagaggcaaagtgcaaagtgaggtggacagcaacaggagcagtcattagagtatgtgtaaaaagcagaagttgcagaggctgggtcagcagaattcatgtcatgagtacttaaaatcctaaaccttgtttgatctcatgcggtacataaaagatgttaaaaattaaaccaacattcttcccattgcctgtttttatgaaacactggatctaaaaaggtttctgaatgcagaaagctgccgtctggcattggatttgctgtttagtgtgcttttatttatgaaacatagtgatcatgtttcatttgctgtatattggcaagtgctcttggaactggcagaatattatcctttattaatttgcagattgagaggatccagaatccagatctctggaatagctaccaggcaaagaaaaaacta

SEQ ID NO: 16461 - DNA, 937 bp, Homo Sapiens
gcacgagggacaaaacccctggcagaacgcagtatagtgccacaaaccaagtcaaaggccatgcctatgtctagggtcagtactgtaaccaagtctgaagtcaaggttgttgctgtcattgaggcaaatattaggtcctatgccaagtcacatgataaggccaatactgggtccagacctgacagaagggaagagaccagcattgggatgaaatccagtgatgaggatgaagaaaatatatgctcctggttctggactggagaagagcctagtgtagggtcctggttctggcctgaagaagagacctctcttcaagtttataagcccctacctaagatccaggaaaagcccaagcccacacacaaacccacacttactataaaacaaaaggtaatagcatggtcaagggccaggtatattgtcctagttccagttgaaggaggggagcaatccttgcctccagaaggaaactggaccctggttgagaccttgattgaaactcctctggggattcgacctttgaccaagatcccaccttatcatgggccttattaccagaccttagctgagatcaaaaaacagattaggcaaagggaaaagtatgggcctaatccgaaggcctgccactgcaaatcacgtggctttagtttagagcctaaagagtttgataaacttgttgccctccttaagttaactaaggatcctttcattcatgaaatagctacaatgataatgggcatcagtcctgcttatccatttactcaagatataatttcatgatgtagtattactgtttatgattgaaaacttggtcaataatccccaatgttaaagaacaccctggagctttagtatggtggatgacagctctgagtcttcccgaagaaccaaaatcaagggagtcatatatacatcaagtttgtaaaggcataatctc

SEQ ID NO: 16462 - DNA, 914 bp, Homo Sapiens
gcacgaggctaacgtaaaaggtggtcggacacaattttgattccaaaaggtcctgttagaaagaaaagagagaacatatttatatttacctccctcccctttatacttattatatttaccctcccaaattgtgattgaactttgagccatagctaatttccataatcctgaatgttcctgtcctatggcaggagatatcatttttggaataggggtgataatgccaccagggctccatataataggaacatcagcttccgtctgaatgtaccgtgtatggttctctttccaatgagtccatcagcttattttataagaaggcccttcagtgcaatttttcttaaaaatccccttaggggaccagtcaatgacgattccataggaattattttgtagcaccccagccttacttgctacacaatttccccaatgccaagcgtccacaccttcaaaccaaactctattttgtttacattcgagtttgtctggtcagaactgctgagtttcagggctggaatggttatattttaaactttgccctgaaatcatatataaagtagcctgtgatttattttttccagggattactgccaaccatacttgtgtgccaatttgtaagcatccagcagcaggtcctaggcatattggaggatatttatatcctattgatatattcattttcatcccttcctcattaggatgcatcggcactctgttatctatgggctcaggcatcgaggttctgtcattgttgtacacctcaataatagggtccatccaactcacagacctaattaaaggaggaaatgggacataagtccaataagtaaattttgagttgcttttacagtagggaggcttaccgccacagtaagtaccaccatcatagccaccattaggttactagttgtttt

SEQ ID NO: 16463 - DNA, 463 bp, Homo Sapiens
agacacagcaacatttctgccaggttggaaggatgagagttagccatgtgaagtgaaggaggaaggttggtccaaagagaaggaacagcatgtacaaagtccctgtagcaggaaagagcctgatgggctgcaggaatggtcagaaatcacatgtgacgacagtgtagtgagccagaaaggaggcaacaggagaggcggcagcggaaatctgcaggagtcaaatcacacagggcctttgggctatggcaagaagtttgggtttactctgagtgtaacaggaagccattgaagactttaaacagggaagtgatgtggttcatttatgtgagtttcttaaaagatcacgctgactactgtgtggaagccagatggagcacaaggcagtagggagcaagagacccaactttctagaaagagaaattgtttatggctccatttcccaaactctactgttgttctctaa

SEQ ID NO: 16464 - DNA, 205 bp, Homo Sapiens
cctaaaaaaaatcccccgggctgcaggaattcggcacgaggtgtagtcctatgtggccaacaccaacctgagtttttacaacagttattgcataatgatcacaatcacattcaagttcacattctaaatcttagattctacaaaaactctgtctgataatatcctatagaccttttggtagctaaaatcaatgagtttgaaaaat

SEQ ID NO: 16465 - DNA, 116 bp, Homo Sapiens
acatgagtcacctgcctggcctgatggtaaagggggttataacctgttggaaaataaattagggttagatcacactaacttcaaaatgcaatcatgatcatacatggtagttcctc

SEQ ID NO: 16466 - DNA, 103 bp, Homo Sapiens
gcacgaggcccagaaggaaatcgctgaggcctggccgccgccgcttttctcgaagggcttcccgcgccgctgtcggagagtggcggggacagtggggtcggcg

SEQ ID NO: 16467 - DNA, 919 bp, Homo Sapiens
gcacgaggtgtacttatctgttcttattccagtactgcattgtctttattactttagctttgtagtaagttttgaggtcaggaggtttgagtcctgtaactgcattcttttgtgagattgttttggctagacagggtccgttaaattttcatacgagttttaggatccgtttgtcaatttcagtaaattagccagctgggattgtgacaggcattgtgctgaatctgtagattagtttgagaagtatttctgttttaaaaatagtctttcaatccctgaacgtggggtgactttcttttatttaggttttctttaatttctttcaacaatgtttggttgttatcagagtataagtttttcaattctattcctaaaatatttttatatattttctttttgacgctattgtaaatggagttgttttattttcaggtttgttgccagtgtatagaaatataattgtttttgcatgtttatcttgtatcctgcaaccttgctgaactgatttattagttttaatggtggtttagtggattttttagaattttctgtaaacaggatcatattatctacaaataagagttttacctttccagtttgggtgcctcttatttttcttgactaattgccctggctagaagctggagtgcaatgttgaatagctatgatgaaaagagacatctcatcttgttcctggtcttaggagggaacacattcagtctttcaccattaagtctgatgttacctgtgggcttttcatatatgcccttttgtcaagtttcagttcttgactgttgctaacttgttgcttttatcatgaaagggtgttgaattttgctgaatgcttttttctgcatctattgagatgatcatgtagtttttgtcctttagatagagatgtattacattaattggattt

SEQ ID NO: 16468 - DNA, 723 bp, Homo Sapiens
gcacgaggagacgtgcgtggtttcttaagcacagctcctccttcttgatattgcacatgcacttcagttcatggctagctgtatagcttccgtctgtaaacttgtattttcaagaatccttggtattgaatttttagaaatgctcacataattgttgggactgattcattcctccacgatatgcctcctctctctgatatcctgctaactgtagccgttgtggcatttgagatgacaggacatatatatatatggccccacacttgaccttgagtgcctgaatgctctgaaatcaagcatatggcacagcgctcaagacttttgggtttgtgtccttttttctatggctgtctcttctcaattctggagaggtctggttccagtggctggtttccagggattgattcttaagctctggatcacagagagaagcaacaaggaactatactcaactcaaaactttttaggagaatcatgaaattggtctattcaaaggatggagttgagtccattctgttattgttgcaagaggttgcatatttggtgagtcagttatataaaatagtgttcttattgtaaatatgatacttctcataatctattttatcatgtgtataacattcaaactgacaaatatattgacttatgaataaaggtgtcaaaaaactggcacatcagttaattttgatcaaagtacttcagtgatcatcactaaatacccta

SEQ ID NO: 16469 - DNA, 725 bp, Homo Sapiens
cccccgggctgcaggaattcggcacgaggcttccttacccacgttaggatgaatttatcattttggggctaacataaagaggccttgtgcctcttgatattcttttggttgtatatgtgatacttaacaagtctataagtggccattgagaggccactcccatttatcaagttccagaattgttttatagttatataattgggaaaatacagaaaagcagaacaaaacacaaaatttacctataatccctagcattttagtacagcacttttaaaaatagatttagaagactatcttctcattcaatgatagtaataatactaaaataatagctaccatttgaatgcttactatatattattaggactagtgctgaagactttacatgttttattctgttctcacaatacctctattccacctttttcagttgaggtaattaagacttttaatgagtctttttataccattggattctaactgctctgctgggattcttttgtcatctttcttggggttctttgtagcaaggaaacaggagcagaaagaaccattttatttcatcatatggctataccattattcatctaatctgtcctttgttaggcatttaggtcgctcccatcattataaacaacgctgacatgaacatccttcagttaaattctttacgtgaaattattgtataataaataaagattgtaccagtgtactctaagcagtat

SEQ ID NO: 16470 - DNA, 578 bp, Homo Sapiens
atagggagcaataaatagaagattgtattattattctgttaccttggagtgtaagtactgcatttaagtgaatgaaaaatttgctttgaccagatactgaaggaaataagtaatagctagtatttatccaatgccaactgtatgctaggtactgtgcttagataatctgtgtataatagtgttaatcctcaaaatttgggtgttgtacccctattatagataaggaaactgaggctcagagacaaagtaactttgtcactgtcacaaagctagtaagtaacagaggtaggatttatattcaaaaccctgtgtgttcattggaaccgtatcaggcttggggctattcatgtagcattatttccatttttatgtatatgatatatgacgtctgatgcattggccagtaatagtcaaattaacccagccaaattgtcacagtgattcttaaactgtggttctcacacttgcccaggatgttgttaaatgcagatctgaagaccccaatctcagaaattcaaatttaagcatggggcccaagagtatgcattcttaccagataccttgggcagtgactgtca

SEQ ID NO: 16471 - DNA, 382 bp, Homo Sapiens
aagtgaaaaggaggagggtttttaaaaaattagtactacccagttgatacggtggaagaaaacttgaaaatgctaatgagaaacatgagatgtaatcacttgaaggcatatcatgttcttgaataagaagactcaacattattttaacaggtgttaattttccctgttaaactacatatttgtcataattacaataaaatacaaagagctattttggaactgggcaagctgtttctaaatgtatatggaaaaataaaaatgtctccaaaaaatccctgcagagggaaactagcccttccagatataaaatatattatagaactgtgtaattaaagcaatatggtactggtccataaaagaacataaaaccaaatagttcact

SEQ ID NO: 16472 - DNA, 861 bp, Homo Sapiens
gcacgagggatacagcgtgttgaaccactgaagcacgcccctccacacacacaccagccagaaaagggataccccgtcggctccggacccggcaaatgtacctgggctccccctggaggccacattctccgaggtcgcctttcggtccccaatgttcctcaaaggtattccgttgtaatcccggagaactgatacacactagtgctctgaaacttggcctgtgctcgaggcggcaacccctgcccctctgcctggcgatgccggaacacacccatctggccaggtcctgttcactggccaagaatgcagcattgaacactgggcattggggcgggggtgcactctgcgctgacaccgcacccctcccctcaacttgctgactagaggtaatcgcttcctttcatcgattcacagcgttagaaaaatgcagcattgagaggcagcgcggaggtcaactggaccatcacccttaggttgtagggaagaaaactgagacctagaaaggtgaagcggttgtcccaaaggcttccagctgctcccagtactcaagaacttggagcacacttggggaaatgctcactgttgtattcccgttcctcactatccaggaggcctgaactctcaaactccgaatctgatttccactctcccaggaaggcttcggaaatcactgtggattgtcaatacaggagtccatactgactgaatccctaattttggcctgtattcttctccctctgtgaaccatcttcttaaagtcactgaaccaagagtgccagaaaaccatcccaagactcacacagagttgttcttccataatggatgttttggccactggacatcagaaccccattttgggtt

SEQ ID NO: 16473 - DNA, 1337 bp, Homo Sapiens
gcacgaggatcatgttaggagtgcatttctattaatttactgagatcactgttaagagcagtgattcttgatccatatatcacctgttaagtagtgaccttgctgcctctgtttttgcagtaaatattagctgttgtttattgagctgtattagatactatatgatgtataattatgtatgaattaactatcatttaattctgataatcctagtaaatgtactacaggttgagtattcctaatctggtaatctgaaatttcacatgctccgaaaatcacaaactttttgagtgccaacatgatgctcaaagaaaatgctcattgcagcatttaagatttcagatttttgggttaggaatgttgaactggtataatgcaaatactccaaaatctgaagaaatccaaagtcttaaatacttctggtcccaagcacttcagataaaggatactcaatttgtattcctattttggagataagagatggagacttacaggctgggttggttggattggttgcctgttttttgttgttgttgtagtggaagctaggaatggtttttcacattttttaagtgtacttaagtcttacatggttacatagttacctgtataatagtcttgaatttgcctaaacccacgaagaataacagtatttgctatctggccctttaagaagtttgccaacctaggctggtctaaataatgaaaattttacattaatgaaagtattttcatggatagtattccttttgttcttagaatatttctttgaggtaggcagaatgtatgttttattccagaattactgttttacgcagttttaactttacaaacaaggcaaataatgctcaagagaagttgctatttagtaagcagcaaaataataactctgttgttttcccccgaagtacaaccaaatttaaatactgagtgaggaagcagtaaatatccaatgatatcttgagtttcttaagaatatcatttagggttttaaaatgttttaaatattttacaaaaaagtactgaaacaactttgtcacttaggactattctcaggaaggagtgctttgttaagaacagagccatgattgacaaagtcagaagctttctagaaagtctttatttttctgttatgaataattgcattttctaattatcccaaatgattttataaattccgtaacttttatatgcctgcctgggatccatgaaataaaaagtattccttaccaaagagaagcatcagatacactgaaaggctcaatgttttataattttcagaaataaaagtgactgtatacccttttattaactatatggtagcttggtaaaatttt

SEQ ID NO: 16474 - DNA, 309 bp, Homo Sapiens
gcacgaggctccagcttaggcaacagagtgagacccagtctccaaataaataaatacacatattgcatatatcactcaaatatcattgttttgttttgtgtgttggaggaatattagtaaaacctggtttatttattgcggaatttcttataactggaatgtttatatacattgaagctatttaaattatttttagagtactttgttgataccataccatttgatttttatgaaaactttgaagagtaggtgagcaggtatccccatttcatggatgaggaaactgatttgacttagatgtcgtgacct

SEQ ID NO: 16475 - DNA, 282 bp, Homo Sapiens
ccaagctgaaataggtaagagcacatgtggtgatgagttgccatcagaggacctttatggtggctttgtccatggtgcattgccagcaatcctggctaatgttgacccacatcagtttacaaaaaaagtattattacagcaaaccccatttttccaagttcagctcaaggccctccttatttactagacctgggcctctgggcatattctattgaaggttttcttcctcccttgggcatttgatatagagttatttactctgtgtttgattattaagctctc

SEQ ID NO: 16476 - DNA, 873 bp, Homo Sapiens
ccccgggctgcaggaattcggcacgaggcttactcctccagggggatgtcactcttaatgtcacaggtgtgttccttctgtgatattattgaaaatatgctagctgggtactactactaatgtcacaatgcgtgtacaccttgtgatattattagtaatattgtggggggatgttacccctaatgttacaggggtgtacaccgtgtgatattgctcccaatattgtagggggatgctactcctaatgtcacaggtggtgtacagccttcggtattatttgcaatctgatagagagatattactttaatgatcacagtgggtgtacatacatgggctacacccactgggataatatttgtaatatcttagggagatataactcctaatatcacagttggtgtaccccatgtgtgtacatcctgtgatattatttgtaatatccatggtaaacattacttctaatatcccacagagggtacaccctgtgatatttttcataatatcatagggagatattgcttctaataacacagtgggtgtacaccatgtgtgtacactctgtgatgtgatagcttatatcctagggagatattccttccaatatcagagtgagtgtacaccttgtgatatcattcgtaatctcctagaaagatgttgctgctaatatcgcagagggtgtgcccccagtgacatcattcgaaatatcctagggagatgttaccgtaatgtcacaggggttgtacaccctgttatattattgtaatattctaggggggggtgttacttttaaagtcacaggggtgtacaccctgtgatgttattcgtaatatcctaggaaggggtactcctaatatcacatggggttatcctaag

SEQ ID NO: 16477 - DNA, 564 bp, Homo Sapiens
gcaggaattcggcacgaggtagatctgtatctatctatatctctctgtacatgtctatctatatatcacatgtggcccatagtatcattgttttagctttgaatttagacttttaaatgaaatatttaggcctttgaaaagtttcctcttagaattaattttgtatacctctccttccccaatcccatataaaagtaagtttatagagctttctgcctgttctatgatttttattgcatctttctttaactctactggaaatttcacagaaaaatcctaattgttgaacaacctctatggtcatgaaattcttctgtctccttaagtttaaaccttcataaaacagctgcataattctactcctagtagtaaagataaatatatttttcagagtaaaggtgatgttggccttctatttcatatatgttatacctgaatacatttctggagtgtgtttattgatctaatcaggtaagaacgaggcagttagctcccaaagcccatagtttttccaatccaccaaaaagaccttaattcgaatctctgtgtaatttactagtcagg

SEQ ID NO: 16478 - DNA, 457 bp, Homo Sapiens
gaacacatacttaaaggccaggacttaaagctgtagaaaaatcattattttattcctgggtccatggttcctgtgcctctttaagccctcaataaggaattactgatgagtcaggtcatatctctttcaaagaggtttgttattttaagatcaagctatattaaagaatcgtttgcatttagaaaatgaacaacacattaaagtttaaccaatcatcaagtatcccttattattacagcagcttattatttgtagttgttctaattcactttgaattctatgacatatttttattacatccacttaaatacagtcatctaaatttcaccaaggaaaacacataagacatctcacctgtgctaacaccctccgcatcctgtattttatttctcctttcaaacataaagttttaaataggtatttcgaaaatataacatgtaagaaatgactctattgt

SEQ ID NO: 16479 - DNA, 852 bp, Homo Sapiens
tgagccaccgtgcctggccagctgttctgactgaagacttgtcttcttcgttaacctgctcctcctgtttcatcctgcaaatgtttaaatctgaggggtattatccacagctcatctccacttttctaatctgacagcactgataattgaattcctcagaagcaagatgtttctctggcacccagaggcctcagcagtgtcacgacagctgaagtgtcacttattcctcatcctgggcacaccatgatggagtgcagccccactgattgggacccatgcagccagcctggcccagggccactctctctcccagaatgtgcacaagtcaagggatctctacttccatccttattttcctcaaaagctggtgccagcagtaatcaaccagacttctagaaaagaggagataatctgctctcaaggctgctgtgggctccagtgttgtaatctactacttgaatctagttgtttatttcattctataataatttaatacagcagatgtcaggagaaatctttgtttagatattatgtcatatctggatatatctgaatcctgaatgattaatctaaatattaacaatattcacttctgccaatgtcaagagtattttctgctactgggcttaaatcaattttaaaatttgagagttttaaaagcatatctttctgtgttcataaataaacagaacgaagattctttgagtaccttatataatttttcacacagaataaccaaagcccttatttaatatttcaaaatcctcatttatatatattaaatatgtgtctctggttaaatgcaagatactggaaagaaaaattcaaataggcatttcagtgaatagttta

SEQ ID NO: 16480 - DNA, 895 bp, Homo Sapiens
gcacgaggaaatcttcacagcaacatccagactgatgtttaatcccatacttgggtaccacaacatagccaagctgacaaattaaccacatgtagtgtgggatcatatactaattttgtgagttactctactttaaaaattaaagcccagctatattgtagaattctcaagtaattctcagacaatattactggcctgcacataatgatttaacattataaaataaacagcctggacctagtcagtagtgattcaagttgctctagatgcctttgagagccacagagagggcagtattgctgcacacccacctgcttccctgagaccagcttcagacctctggccagggagcctggaatgtttaggaaggagatgacctcctagggctttatacccaaagaccacactagaatcagggtcttcatgttgagtgtgtgtgcagagggggctgacctgggagtagagggataaatgtcatatgcagaattgaatagtgccgagaaatggcccagagatgacacagccatgctttaaatttatttgggctgtcctgtgcaggagtgatttgttttgttttatgggtcccagaaggcagaaggcatgaagatcatgaaggcgggaggtgactccagctaacatgtatgaccctggggtcccagcagcagaccgtgccttccatactcctgcaggaacacctaggggatgtgatggtggggatgaggccaagtagcccttgagatcccttccccattatgcgattctaggagacaatggtgtggataaagaataaggaccagacatgtgaaacttttctaagggaaatgatagagccagatcccacagatattggagagttggaaggaaaagatagtcaatctgggcatgctgagtttgg

SEQ ID NO: 16481 - DNA, 848 bp, Homo Sapiens
ttttgtcatggtaaaatatatataacaaaatatgtctgtttggcccatttaaagtagtgcaaccgcagtgattacatacaaagtgtatgcaaccatcaccactgtttccaaacattttcatctcctcagagactgtgaacctgttaaacaataactcactatttatctcagcctccagcctttgctattctaaatctactttctctctctatgaatttgcctattttagatatttcatataaatggaatcatacagtgtttgtccttttatatcaatcttatttcacttagcataatcaggcttatttcatttagcaagattcatccatattgtagcatatgttagaacttcatttatttttatggctgaataatattatgttgcatgtatataccacattttgattgattgtccatttgtcagtggacacctgggttatttccacctttgggttactgtgaataatgctggaataaacattgatatataagtatctgtttgaacctcagttttcactttttctgggtgtgtacccagaagcaaaataactgggttatgtggtaattctaggtttaactttttggggaaacaccatactgttttctacagtgtctgcactattttacattcccaccagcaatgtgcaagggttccagtttttcacatccttgccaacacttatattaatttttaaaatagtaatcctagtggatgtgaagtgaatggaaatgtgtttttgatttgcatttctcatcaacattagtcttggtgagcatcctttcatgtgcttattggcatttgtataatcttctttggaaaatgtctattccagtccttttccattttt

SEQ ID NO: 16482 - DNA, 840 bp, Homo Sapiens
gcacgaggtaaaattcaaaatattgtccaagtcaaaagtctagactctgaggacattaaaaatgtaaatatcatcatccttagcaaatatttattgggagcttagtaatagtgcactgggtaccttagcactcccaaatcattcaagagtctagtgaaaaagggggagggatggcagcaaataaaacacccccataaacaaccaggagcaaggttgagaaccattaagttgccaaacaaaagcagaaggggaaaaagtgtggcaacaagcatcttttaataggatagttgacggtattcaagtgacctactgactccaaataatcaaattgaacacaattgcaaatccaataaaacatcccagtgagacactcgggtatttgagaactttgcttgatttagaaaactggaaagtggcaactaggctagaatagtggcaactaggttcggaggtttcgtgtggtcataattggtttggtgaagtgtgagatctctgcaaatgagccaggtaagatcagtattccatagtgcttgaaaaggggattttagagacttctgtcatcacaaagcagattaactcctagttaatgatgaagcagtacgcccaagataaactgttcaattcaagataaattgttcttgtcagtgtttggcatatgataatcacatttggctaaaattggatgggacagtcatttgtctacacaggccttccattcctgcatgaagagatactggggagcatacaattattttgtccagtattagagtgggagaagttctcagtaagtccagtcccaccaggattatttgggccacattctaccatggccagtccatc

SEQ ID NO: 16483 - DNA, 1023 bp, Homo Sapiens
ataatatattttgtaaccagattacatttgaacacctaaataagtatttgtttcataatcattacatgcttgtttatgatttacaaagatttggtagagaaaagtacagtccttaaggcatatatatgccaatgcattaaactactcagcttttgtgccagctcaggtgttcataggaacaggaatgtggaataccagctttttactttaattatacttttatgctgaatttttcttccagttaaacctttaattacactagtatgtaaagtagttactgagaaaaataagtttttgatttcccttctgttgatctgtaacatttttaaatgaagctatttaacacatgacatgctaatgttacttaatggattcctatgtatttcattaaaaaaaagtctcccacctgtgttaagacagctaaatatttcttgatgttggcttgaggaccaagtgagccatcttgccagttaagcaagttttatatcagaggaccaaatggttaagaagagaatttgtacatttcttgagcttccccatgtgaagcttgggttcagtactatcctattactatccatcttcataatgagtgaagcaaactgaaagggaattcataatcttttttcttatctgaacagaaaaactaatgaaaatcaacaataaatctttattttaattttcattcaacagctgaaaaaccatgtctgttgaccacattggaccattgcctagttaaaatccataaaattccctataaaccaatgaaaagaaacttgtctggcaataatttccaacattttaaattctaatttttagttacaagaaaaaggatagaatgaggcttttcaggaattcttgctcatcccttcattatttggcaggtaaaacagtcctaaaattcagcttcctttttggtttatactattaatagatactttcatataaatggaaacacttttcctcaaaaattaattcaaaacctactcctaatataaaggatataccacaaatttttgtaattcc

SEQ ID NO: 16484 - DNA, 1003 bp, Homo Sapiens
gcacgaggtcttagagaagcaaatggctcagatgatgataattaagagtagccaacattaaagttaatttttaaaaatacagttaggtgtttatattatttagttattataattctgcaatcctcttgctcaggaagtgtatacaacttttttaaaaattatacttgttattattctacttctctcttctatgacaactctagtgcaatattagagtttcatttattccacaatatatttttactgtttttttctatttatctggctttactagtagttcttttagattaacatccagttcattttctggaaatatacctggaatttagtccatttcctaatgaaaaacagctcaaattttagggtaactaatttgtaaagagttaacattatatttggatccaattttcctgagatattgaaatagtgaaatcaccaaataaatgatatgaatcatttaactatacaaatgtatagttaatgctaacatgtatttattttcatatatgttgatcctgagtgaaatttaatttgcagaatgctttatgagttatgattactggcaaaaccttcagagcacttgtgacacatcattataatatccagtagctaacattagatctagcttattatttcagaaattaatttaggaaataattattaaaacatgttggctacagtagcactttactgaagtagtattttttggtatctctagcctagaatctcgtgtgttagttttaactgttttgaaaataataagtaacattaacaaaatgttgatatttggatcataaccgtaacatttgaatttatgcaaaaaaaagaccagaaatgtcatttcaaatgtaaattcctgaatgtaccattaaaattattttagttgctatcagtttgtttatatactattttatatactattctaaaatattttactctgcctgatactgaaagacagcatatatttttttcaaaataaaggggttagcctcgtgccgaattc

SEQ ID NO: 16485 - DNA, 952 bp, Homo Sapiens
  misc_feature (55)..(78): n is a, c, g, or t
  misc_feature (579)..(588): n is a, c, g, or t
ccacgcgtccggttaaaatttattagcacaaaaattcataaatagctaatgttannnnnnnnnnnnnnnnnnnnnnnnagaagtcgaactgaaccagcgatggcaactacaaaagcagtatgtaaaaacacaatctcacactttttctacacattgcttttacctttataatgtagcagtgaagtaaatcattttagaacttaatatccaactgatcatagtacatattgtaaataaaatgtattttgatgacagctcagttgaatatggataatatgtggcatcacttgcacacttattttgtagaaatgggtaatttgtgcccgtaacactgtttcatattaaatatgatagcattatccctgtatgacactgtgttgtacagttaatgtatgatcctttttagatcgtttaggttttacactaaggaacatgatgacatgttctacatttgtctgtctatagttagtattttgtatgtatgtacaggctgttgtgtgctttttgtttcttgcaataaaaaatgtttggagtgtatattttgccattttcacgttgtatcacttagtttttgttagnnnnnnnnnncctgcctgatttatggcttccaaaaacgcattagcaacatgcaaagcttatattaaagtttgatgctttctccaagttcaaacacatcatagaaaagagctttccagagaccattgatgcagctttattatttagtcttgctttatttggcattttgagctccttcttttgtttacatctgtactataaagtgaaacctgaacctggggccctctatgaatatataagtgtcttagtgattttgagtttatataaactgattatattgttttcaaagtttaatgagatcttccacttctatctagttagtgcagatgtccaaattaaaatatttccctcttatactaaatgctgcgttaatttt

SEQ ID NO: 16486 - DNA, 908 bp, Homo Sapiens
gcacgaggcaccatcctaaattttttttcatctatttggccagtattattgaggccctgctaattgcaaagctgtaaatagtataagaccatatacaaaagacatgacttttctttcagggatcttgctctcttgtgtgggagaagagaccaccaccaaaaacaaaatttaaagataagtctctggaagatttgtgtttaggcggtgattgagtgccacatggactataagatgaagtgaaagtggtatcattcaaaaaaagaagagattcatatgcacacaaattgttagggaaggctttgtagagaaaacaaaacttaaacttggttataaagggttgacagtttttgtagataggatggcagtcacacatgcatataattggctcaaagtacaatgagtgtagactctagatgaaggtggaaactcatacaaagttaatgagagattttttaaataatttgaggtcatactttagaaggtcataaggagaaatctcagggttcgtgctttttaaaaactgtcctaatgttctgggagaggttacaaggtgccatgtggtaaaagtgttctgcaatgaaataaatgtataaaatgcatactttccaacccttggatgtatgcaatgtgtattcaacatattaaaagctctgaaaaatcttgctataaagaaaccactttttccatttatctatacttggtgaaagaacccatcccctttcccctactcgcttttaaaaatcaaaacatggtgaaaatcatatgaaacttcagtattctataaaacatatctttggaaatggttctataaataatgggaaggctttgaatagttctgaaggatttatgacatgattagaggggtatttttagggtattattctgacagatggattttagtgcacatg

SEQ ID NO: 16487 - DNA, 257 bp, Homo Sapiens
cacatcggcaaccaggcgctgggcgcgaccatcctgactgacgacgtctggctctacagcacctcggacgcctacatcgtcaacacgattctggacggccgccaccaccgcatgccggcgcgcggggacatcctcagcccggaacagatcaagatcctgaccgcctgggtctggggcctgtccaacaagccggacgcgcaggcgcaaccggcctcggccgccgcctcggccaagtaggcctcgccacataagggggg

SEQ ID NO: 16488 - DNA, 227 bp, Homo Sapiens
ccacgcgtccggtggaaaataatctcatcatttgggatttatattcaaactaatgtatgtatatatataaagatgataagctcctaataagtacctcaggttttcttatttcaatactcagtggaaaatttctttgatgataaatttaaaatttaaccatattaaatcattttaactgttaatcatcttgaattttttcaaattacaataaaaatttcagaaatctt

SEQ ID NO: 16489 - DNA, 223 bp, Homo Sapiens
ttcaccgtcaatatcttcgaaatcggcacccgtctgctggccaagaaagacaaggatggcaagccgtcctacagcgatttcgctgacctcaaaggcaagaacgtcgtgaccaccgccggcaccacgtccgagcgcatcatcaaggcgatgaacgccgacaagcagatgggcatgaacgtcatctccgccaaggaccatggtgaatccttccagatgctggaaa

SEQ ID NO: 16490 - DNA, 818 bp, Homo Sapiens
atgaacctgctggtgattttcgaggccctgatgttcgaaaagaacctgacccgggttgccgaaaaactcttcatgggccagccagcggtcagtgcggccctgggccggttgcgcgacctgttcgatgacccgctgctgttgcgcaatggtcgcggtatggaacccacgccacgggccgtggcgatcctcaaggagttgcaaccggccatggacatcatttccggcgccgtgagccgcgccaaggacttcgacccttccaccagttgcgcggtgtttcgcatcgggctgtcggatgacgccgagtttgggctgtttccaccgttgctcagccagctgcgcgaagaggcgcccgggatcatcgtggtggtgcggcgtgcgaactacttgttgatgtcggcgttgttggccagtggcgagatttccgtgggggtcagctacaccaccgagctgccagcgaatgccaagcgcaagaagctgcgggatattccgtgcaaggtcctgcggggggatgaccggccggagccgttgaccctcgacgactactgttcacgaccccatgccatggtttcgttttccggtgacttgagcggcaacattgacttggacctggcgcgggttggccgggcgcggcgggtggtgttggcggtgccgcaattcagtgggttgcgggacctgttggccggcagcgaaatgattgcgacggtgccccgattatgccgcctgcgcgttgacccaagcagcgggttgcggggccgaggacccaccgttcgccatccaatgcggcagagctgtcgatggtgtggagcggggtgcacgac

SEQ ID NO: 16491 - DNA, 742 bp, Homo Sapiens
ttcggcacgaggcaaatgctaagggattgagcttcagtcctttttctaacatcttgttctctaacagaattctcttcttttcttcacaggataagatcagaagcagggatgccagtgaggacaagtcagctgagaaaaggaaaaaagacaagcaggaagacagttcagatgatgatgaagctgaagaaggagaggttgaagatgagaactcaagtgatgtagagttggatacgttgtctcaggtagaagaggagtctttgttaagaaacgatcttcgtccagctaacaaacttgctaaaggaaataggttattcatgagatttgctacaaaaggtaaatgtaatatttggtattgttttatattttcaatcaaaatgatttattatggagtgacatccttcttttttgaatagaagttagatcaagtaatctcaaagttcccttcaaactataatattctgcgcttatgaaataattgcttgccacctgagttggaatttctgactttaaaagtgaatattaactatttgtatatttctgtgacttctggctaaagttattttctgttgaaactggtttgcctcatatattttcagccagttaccatctgaattatgaaaactttcaaatgaaactttatttattacagcaacgtcctcctgaacatgccagtgtaccattcggttctaattcccttctcataagattgttacacatggtgccttttggtgggcatttaaaa

SEQ ID NO: 16492 - DNA, 397 bp, Homo Sapiens
gcaggtaccggtccggaattcccgggtccaatggaaagaacttggccgggtccagcaatacgctgtagtcgcgcatcaggcggccgttgggccattgcacctgcagcaggaaacgcacataggaatcaggcaacggctggctggaggtgacacgcaccacactgcggccgttcgggttgaccaccggggtaaacgtaaggtcattcaggaacgcctggcgatcaacgcccgcatccacaaaggcctgggacgaagcgaggctgggggtgatctcggaggcggtcaggccaccgacgtcgagcaattcgatctccaccgacagcggctggttcagcttcgacttgagggtcatctccccaagctgcagtgcttgcgccataccggaggacagcgccga

SEQ ID NO: 16493 - DNA, 787 bp, Homo Sapiens
ttttcattgttgttcctcctgtaggatgtttgatcatgccctgtaggcccgcgacacactgtcaactggccgacaatcttcggagttcgcatggatgtagagaaatggcacccacggttggccaccggtcactggtacagccatctgcctgatgatctacagaatagcttgctgaccagcgcccggttgcggcagctgacggcggggcaatacctgttcaagcgcggcgacccgccgtgtgggttgtacgcggtgctggaaggctccttgcgcatcagcgcggtgaacgagcagggcaaggaagcggtgttgagcctggcggagttgccgtactggttcggcgagatctccctgttcgacgggttgccccgcacccacgacgcctgcgcggtcgggccttgtacgttgttgcaggtgccgcaaccggcgttgctgcagatcctcgaagagactccgcgttactggcgcgacatggccctgttgatgagccagaagctgcgcctgacctttatcaatatcgagcaattgagcctgatgccggcgtcggtgcgggtggcgcaccgcttgttgatgatcgccgaaggctacggcgacatcgagcaggcccgacacgtactgcaactgccccaggaagacctggccgcgatgttgagcctgtcgcgccagaccaccaatgcgttgctcaaggacctggcaggccagggcatcgtgcgcctgggctatgggcgagatcgaaatcctcgaccctcagcgtttgcgcgaggctgcgcacgcctgaaggtgggta

SEQ ID NO: 16494 - DNA, 152 bp, Homo Sapiens
gcacgaggcacagcatcctcactacccctctctactcactcacaaagaaccatgatacactggaatgtttttctctggaatcctctttctactcttgtattaaaatttttccccacttcatgattatattcaaaataaacaactacatcatt

SEQ ID NO: 16495 - DNA, 362 bp, Homo Sapiens
catggtcctgttgatgagcgtcaacccgggcttcggcgggcagaagttcatccccggcaccctcaacaagctgcgtgaagcgcgggcgctgatcgatgcatcgggccgtgatatccgcctggagatcgacggtggcgtcaacgtcaacaacatccgcgaaatcgccgcagcgggtgccgacacctttgtggccggctcggcgatcttcaatgccccggactatcaggaagtgatcgccaagatgcgtgcagaactggcgctggcgcgtccatgagcggctttgagcagctgttccccggcaaactgccacggctggtgatgttcgatctggacggtacgttgatcgattcggtgccggacct

SEQ ID NO: 16496 - DNA, 586 bp, Homo Sapiens
cacaaaagtccgggcacggccagcggcgtcaccttcgtcaccctggaagatgagttcggcaatatcaatgtggtggtctggcgcgatttggccgagcggcagcgccaggcgctggtgggctcgcggttgctcaaagtcgatggccgctgggaggcggtgggggaggttcggcacctgatcgccgggcgcctgaccgacctgaccccgctgctgtcgggcatcagtgtgcgcagccgggattttcgctgatccggctcttgctccttcatggccgcataagcaatatgcgatgaaaccaaccgccgctgtcgggctcaaagttttcatcgccgcccaccttttatcttttgcagagccgactgatgcagtttttatccgatacccatggctgtgatggctgggctggggaaatggcccagaggattcgcgcattcgattggtccggcaccgacctcggcccgattggtgcctggccctccagcctggtcagcgccgtgcagatgatgctggcatcgcccatccctatggtcatgctgtggggaagggcgggttacatgatctacaacgacagctattccgtgtttgc

SEQ ID NO: 16497 - DNA, 603 bp, Homo Sapiens
ttcccgggtccacatacaatcagcggcagcctgcagcacatgtccgccgagcttcgggtcaacggccaggtgcaacgcggttgcgcgtcgttcggcggctcgcgggacgactgattgtccgctgcgctgttttaacatgacgggaaaccgctgttggggcttataatcgccggtttgcaaaacagccggcctctttgcccgccgcctaccggattcctgtcatgttacgaatcaccgaactcaagctgcccatcgaccatcccgaagaagacctgcggcctgccattgtgcagcgcctgggcatcgccagtgatgacctgctcgatttcactctgttcaaacgcagctacgacgcccgcaagaaatcgtcggagctgtgcttcatctacaccatcgacctggaagtcaaaggcgaggcggccctgctgctcaagttcgccgacgaccgcaacgtcaacccggcaccggacatcagctacaaggtcgtgggccatgcgccggaaggcctgactgagcggccgatcgtcgtcggttttggcccgtgcgggatcttcgccggactgttgctggcgcagatgggcttcaagccgatcatcctcgaac

SEQ ID NO: 16498 - DNA, 860 bp, Homo Sapiens
gcacgaggactactctgtgttataattattttatgacagaaagtttgttatattgtattttcagttaaccaggatatcttatgctgaatcagctcctcaggggcctcacaattttcaaaaagtctgagatcctgttgcctgggccagtggatagcaggttaaacctttggcacatttctcaccctccaggaaagaggtggtgctgtctcaggaccaggcctagtccagaaggtttcagcggtgcatactgaacgagatacggaagaagtgggcagggagagacctttcagacttctgctctctgaagttctaggctattaattatatctgaggctctaggaaccttttagaggcatcttgggattctttgtagggagcagaggaggaatgcaattattcaacttcatattgcaagtggagactttaacattggcagggttcaagtctcaagcctcaaatttggagcataaaataagcctcaggcatgttcagaaacctaaatgtttggacaataccaaattgctaaggggaggacaggtagctggagccaccagcactgaggacatacaatgtttctggcaatgctgacactttcctcttgtgaagggaggactgggtgcaccggcttagaatctgaatacacatatgtcactgtgttagctattaataagtatcactgttaatagctaacaattattgaatgcttactctatgtcaagtattccacatgcgttcttccatttaatactgataacaatcatgtgatatagggtctattattatctccattttacaaataaagagactatggttggttaacttgtccaagctcacagagctactgagtagcagagttggga

SEQ ID NO: 16499 - DNA, 948 bp, Homo Sapiens
gcacgaggctcaaacccaaaatatatttgcatgaattccaataaagaaatcttctcagagaagcatgtgctggtaccacccacaccagctggaacatttttctctcagctctgacctacactagaaaatacgtggaaggaatttttcaaaacttagatctgtagctcttgatataataccaggggctaaaatgaatttaggagacattcaaggctgtttaaaatagttattttcaagctttcttcagtcttagatctctttgtgaatgtgatgaaagctctggactcttgcctcaggaaaaatgcaaaaacacaagattttcaaactttagctgatcctatttttatgtcctaaagttccggaggctccaggtaaaagggccgctatttaaatactcatgttgcaaacattaagggataaaaggcaggatggaaaatttaaacacatgcaaatatattggtcagaatggtggactgtgcagtcctggcagaaaatttgctgcctattcttttctagggtgggctcagatttatcagtgaggccatgccctgagcagaattgccctgtggcaaaggaaacctgagctgaggactaaatgagaaagtccagaaccggtgaatgcacatgaccccagctgaaagtctctaggaaacatccccccaaggagggcttcataacccagggctcactgaagaaaattccaattgaagataagctgaggagaaaatatcacaaaacactgaaaaacaccactgtgagaggtaagtctagcagatgcaacaaatagagcgttcatgcccagaaagtagaagtaataaaatcagctgaaaagtactttaatataagtatgttgaaatattgaaagtttaaaaaggatagaatccataaaaatggagataaggaagaggacggaaaacttggggaaaatagctagtttcagaacaaaaa

SEQ ID NO: 16500 - DNA, 887 bp, Homo Sapiens
gcacgaggaacacatgggaattaggcacggtcataacttggggtaggggttttgtttgtgtttccccaggaaaagaactacagcctgtgtgggtcccctcccgacaattaaaattgcaccataactccaaagatgaaacgctcccagaaagaaaaggcaaagacccatcggaaacaaaagagcaactttcaccgcctgatacatacacttcatgacatccacattgagacaaaatctcgccgtgtgacctacaacacctctcgttcaaccccacctacttggggtcgaatacagattttatctcatcaaacagaaaaattcttaacagaaaaaggaatcccaaaaatgactggtaatataattctggctgcctttatggtagtcagtgcagcggtaagtataccaccggtcggggcaactcaaaattatacttattgggcatatgttccttttccccttctaattcggtctgtctcctggagggactctccagtagaagtttacactaataatagtgcattcatgccgatccctaatgatgatcggtttccagctcaaccggaagaagaaggtatgcactttaatctgtcaattggctataaatatccaccattatgtattgggaagtcgcctggttgtttagcttattcttaacagaattggatgtggactgtaccgtcctttacaaatgattcttatcaagtatataatgtgttcagtactaactcttttcaacttctcactgtcaaacgtaccccacatgaggcatggagagttcctctcactaccaaaactaataaaacaaaaggactgccggactgtccaaagaaacctacaaatgggccttttatagtgacttcattttatgggataattgtaatgctccc

SEQ ID NO: 16501 - DNA, 348 bp, Homo Sapiens
tgtgtccggaattggtgggttcttggtctcactgacttcaagaatgaagccgcggaccctcgcgagtctgtatccaccagctactcttccagattcatgaggcaaggcctgcctgctcacctggctggccccaagcacctcttcaacctgttgccaccgtcctgccttgctgcccttctcagctcatccagcagggtctccaagtcgtggaaacagaagcacatatacacacatgctcatatgtacatgcccacagtcacataagcacaccgagaaacaccatcgcagacatgttctcacaagcacatgtgcataacactcactacccctcacgcgtatacacattaa

SEQ ID NO: 16502 - DNA, 467 bp, Homo Sapiens
cttctctgtgtattttcaaatagctcaccgactctttcttctgcttgatccattctgttgagagctttcaatgaatttatcagttcagcaaatgtatttctcagttttacgatttgttttcttttatttttattatttcaatctctttgttaaatttctctgataaatttctgcattacttttccttgtcatcttgaatgtttaacagaattcccttttaaattccagcaagactttttgtagatataaataagattattctaaaattcatatccaaacggaaagaaaataggatagctgtaacaattttgagacaggaaaaatttcaagaattattatatggtttaataatccagactgcatgatattagaggatggatagacacagagatcaatgccacagaatggacaacctagagagagagacccacacaaatacatccaactaatttttgacagaggtgcca

SEQ ID NO: 16503 - DNA, 900 bp, Homo Sapiens
cgcacgagggtttggctctttcatttgctagtgtgtgatgtagtgaatgtaaagggtgctgactggagagctgatagaaaggcgctgcgttcgaaaaggtcttaagagttcactaacctcacattctaatgaccattttgccttcctgcttggtagaagccccaactctgctgtgcatttttccattgtatttatggagttggcgtatttgacattcagttctggggtaggtttaagatgttaagttatttcttgtaacctcaaaggtaaggttatctagcactaaagcaccaaacctctctgagggcataacagctgctttaaagagaggtttccattggctattaaggagttatgaaaactccctagcaatagtgtcatatcattatcatctcccccttcctctggggagtggaagaattgcttgaatgttatctgaaaagaggcctggtagtaaaccaggccctggctctttaccagcagtcatctcttcttgctctggggccagccaggaaaaacaaacaacccggggcacattgggtagactcagtgtaggaaaaatggtggcagctccactgtttatttttggtgacttcgtacgtcattatgaaccgcaattaaggaggaggcttaatgggtgttccccaactcaaatctcagagtgggtatcctagcatctagcagactgagtggggagatttctcatccgtgtgaaaatgtagagtgaggcctctgactagctaattgtgtattttgttgggttagtattttctaaatgtttaccaaatattgggctgcatgttcaggttgcgctagagggagcttgggcagattttcattacgctttcagatataaccaaagctgtttctaatcctaaataagaatttcaccgaaccccc

SEQ ID NO: 16504 - DNA, 930 bp, Homo Sapiens
gcacgagggggaaaagtaggggcaaagaaggcatgaaacaggctctgacctacccagttttgggggtgggaggataaggaataggctttgggctacagggctctggacaaactcagaggcttttctagggtttttccacaaaatctggatattgcacatagatattgccagctcacaggcaccctccagagcaaagatgagcagcattgcatttgtgtctgtcttttccttcaaggcctggacccgataactcaggtcctaattggaccaagcctataaagtctctacctctacccctactcccaagctctgagatgaacagtcagcttctcgggacatttgcattagcagaggtctttgccagcgaccactctcaattctctttagctttaggcttcctgagaccacactgcggcaaaacaaagtgcattagcagggcgcctaaaataccagctgtcaacaccagaccatcaagaaatttatttcgtcacaaatgctttatggagatatgtttttttaaaggtgaggagaataaaaaccttgttccaatagatgattcaccagtgctattgaagtaaaaggaattgcttgtatctccaagcctggatttatggaagaaccgcctccatcatcccctcctcctggcaacccaacacaaaacagaatcagaatcagaccagtttcctgagcctgagaaaagcgaatccagttccccaatggaccacatcacacagggacaccaatgctttcctttcatattcacaatgttgtacaggatttttgctttgggttctccattttacaggccagtgttctattacttgccctgcatgagcacaaatgtgttctagttgctgaagatgtagagacatgaaacaggggcaaatctcttttcagcatacatttacatttggtggtgtgggtggggga

SEQ ID NO: 16505 - DNA, 497 bp, Homo Sapiens
gcacgaggctgcaaagtgtgttatatgatattgatccctgtctacctacttggtacttaagtagactcccatggcttgaaagctttggaccagaccccagtttccttctttgaatgcagtttttctgtgttgtcacatcctacttgggacacgtttctttaaatgggttgggttgcctgatgtagcaaaaagaaatacaggacacccgaatacatttgaatttcagaaaaataatgaaatatggcacatataccagaaaaaaagttatgttatttatctgaaattcaaatttagtttcctgcattttatctgcaaccctataaatatgttagtggcatggattaagcttgggttttagtctatgtagttgttcccaggaactgtcttgactctttccagtatgtgttgttttcttatgtctaagtaattgactagtagccaggagcagtgctgggactacaggtgcgcaccaccatgcccagctaattttttgtatt

SEQ ID NO: 16506 - DNA, 431 bp, Homo Sapiens
gcacgaggctaggaccagatatctggacggaatgtgttgagatactgtttccagcagagagctggaaactgtatccaaggtgactaagccctgcttctagtatgaaattgttaaccctatattcaaaatggatactgaagcaacctaaaatttcaggtatttactaaagtgtgtatcaagttccctccttaccactggtgagtagtattccattgtatggatatgccacaggctgtttgtccatttggacattgatggatggactaaagttggccaagctgggctggtggggaggcaccctctcaggaccccaaaggaggatgcggggttgttgttggatgtctgggttgtttccagtttgaaggcattgtgaataaaactgacttgagccttcctagaaagttttttgaatatacatatgtttcatttct

SEQ ID NO: 16507 - DNA, 571 bp, Homo Sapiens
gataggcttcttgcctcacttcccttctcattaccaccatcatccttaagtgatttgctttaataacataaatggttgataactaacatcatttataaatcagttttgagtgacttagtggtgtttattctaggtagtttgactatcctttacaaggatataaacttgctagaaacatttatactttacagatcaagaactaagccatatccaaactaccacttcaaattttcacaaatttataaaagttggctcgtgaaatattgataaattatattttcttaaacacttttatattgatttcttttatcacatttattgtctgagttgaatttgaccatgaaggtgaattatttgacgaaacagacataactgcagctttaaaagaaaaagtagctgaggaagagttaatttgcatatgcatagctgagttcagccaatgggtgaatgaggggtaaaaaggagagataatggagacaagctttccgatgttctgatgtggcatttagttgacagtcattacaaactttagaaacatgtttgaaaaataataaacaaaacggatatggtc

SEQ ID NO: 16508 - DNA, 860 bp, Homo Sapiens
gcacgaggcatcatatatttgttgggtactaatgatgagcttggtatcaggtgctggggatacaattatatatcaacaacttgttccttcctcatggcaattacttttcttgtttcttcaccttctcccatccttcatccctcagatggctctgctatatccttacaagtctcttagacaaagaggaaccattccccattttcttctttggcttggagcctctgaattttaggcttcaaatctttgtatgctaagcactgttctaagctggaaagactccaaggaaaaataggatccctgccctcgaatagtttataatctagtgagaaggatatatgccagagattacactgatctgagaatagcggtgattaagataccataaccaacactgaaaacaggtaccagtcacttgtgagtgctttacatgtattaactcaatgaaatcacaagctaaccccaagaatagtactacttatatttccatgttataaatgagggaacaggcactgaaagcttaaatacttggctcaaggtcacagctactcaatggtgaagccaggatgagaatcttgattctgatttttaggcatctagccccgtactaaatgtcttctagcagcacagaaggaatgttaagacggcccagaaacagcagggatggctttacagaggaagaaattcttcagccaaaactaaagaaatgaatttgtcaggtgaaaaagctgggtaccattcagggagaccggcagatgtgcaaaagcgaaagacgtgagagaccttggcatattccagaaaccacaaaagtggatatagttgcaagaagggaaaaggaagagatgaggggtaggggagggggg

SEQ ID NO: 16509 - DNA, 1320 bp, Homo Sapiens
  misc_feature (1202)..(1214): n is a, c, g, or t
atactattagaattaaaaaccagctgactgggtgcaatacgggtgaaaatacttgtgacatagacattgagatggattggggtcaggctgttgccctgttttgaatggtttgggtttaaaatagtactatttttgtttgaaaatgtaaagaatttcctagaaaaaaattcatgaaatcaaaaagtagactatttcaccctattgcagctaagtggtcctggggcatggagtcttcaacctctctatgaatggcacaccttagtcacttatgttacttttgtgtccccaccatgggttgggggattttttgtttattctgatctatgagttttgaaaaagtgaataatcaaaaggaaaataattccttgttgttcataaattaagcatcactaaagtctcttgaaaggcatttctgtattgggcaagatttaaaatactaaagccttaggtcctattcatatttaaagtagcatgtttgtaacctgttactatttggagagagaagcagttgcctgccaaattgaagactacctttcaaatagcaaaagagagagagaaggctgatatttcggcttttaaataaagatttgtgtggttctgcttttactgtaactgtcactttcccagtgaaaatgatttcatatacattgagggtcttacaggtatgggtaaagttctataaattgcaacaaaatgatacccaatttcattttatcctttttgtattgtgaaactggaaactttatgacattgtaaattatcagctggtttttctgaatataaagtgtgaaaacacagaacagtattttgatctatttgataattttgtgggttttttgaagaattaatgagcatgtacatagaaatagtgactgcttgaatactgtatttacttgcactctttcagtacatcaagattcctgtatattttagagtataataaaacacagatgtgagttgtatttaatgaataatgtatttgtatctgtgcatattatctacaaatctataaagtttctagggcattgactactagattttaagcattttttctaaaatatttacagaaattataaatctaatcccccatcttttctttataatataaagaagtcataatgaacccttcctaattattagtagtaggaaggtgaatatgcattttaatgacagtggactacattttctattgtaccttttgnnnnnnnnnnnnntcaagcagattctaaaagtatacatatgtgtgctttctctttccttttaggaattctcttctgaattccctgagggaattttctagaatctcagaattgaaagaga

SEQ ID NO: 16510 - DNA, 936 bp, Homo Sapiens
gcacgaggcgcttgtggaggagtccgcgcagcgccgtctaacaggtgatccgcgtcactcccaggccataccgaagcggctgaacgctgtgccagggctccttatgctcttctgttctgggacgtgaaaacgtcttccgccttattggtcgtccaaaaaggtgcaccggtcacagtataagagtcaaaaaccagtattaccaaaaagacactacgagcgtcagggtgcagagtggctttcttcgattaacgaaccggcaggaccatcgtagtctctaaaatcgggttctgcagtggtggcgaaagcgtagtaagtttcaagttgtaagcggagatgcagaattgtagatacccttcagtgtggttcaggacagtgtgttcagcgtttggccgccgttcagtaaattctgcatgaagcagtttgagctcgtggttttggatttacttttcaggagtatgttttccagtggaataaggcttactactgaatgggagctttctttgcctctctgagtgtagacaggagtgtttattttcattgtcttcccattttgttagattgtggacaagggaaaagttaaagcatattttggttaagtatttttaatagtctgggattctatccacctcctccataagggtttttactttagagaattataaagtaattttctaaagggagctgcttctcttggtgtttgaatcaaaagccaagaatcgacttgaaaaaaattcttattctggtgggaaatttttattgtcatactttcacttcaccattttctgtttgtctctcccccagctgacctctgcctgacagtctgcaatatggccctgaccaatttagagattctatacaaatgacatttttaaacgaggggttattaatactcattatttgtgagaaacactttatttagttacccagtttttttct

SEQ ID NO: 16511 - DNA, 403 bp, Homo Sapiens
gcacgaggctggttggtacatgttctgtgtccaccctacaaaattatttgttcctcatgtgcatgaatttgtatttgtttgataggtatggctaccatattactaaagcttcctattttatctgccatgatcaagaaaccattaagaaattatttgaaaacctcagaaactacgatggaaaaaataattatccaaaagcttgtggcaaatttgaaatttctgccattagggaccttacaactggctatgatgatagccaacctgataaaaaagctgtaagtaatgtcttctcttttcaactaacctcttttctatttaccttttaaaataatttgaataaattatttaaccatacaattaattgaagctgattttaggcacttaggcgtgattataaataagc

SEQ ID NO: 16512 - DNA, 273 bp, Homo Sapiens
gcacgaggcacatcccaggtagagagggtagcacattaaaaaatgaaagcataaaaaaatacggagaacttaaaaagattaagttctacaaactgataaaagtgagttaggaccaagttgatgggccttagagaccaaataatactttccgtgtgcatagtatttttcagattctgagatgcaccctatctcatttgattctcacaaccgcttgtaatgtgtaagagcatgaggtctttcagaaaagctggctggcctagcagggcgcggtgg

SEQ ID NO: 16513 - DNA, 398 bp, Homo Sapiens
taaactacatatttttaaattaagattctaaattttatgttcttgataattaacaataaacagtaataatacctaaaaaaggaacaaaattgacagtttttaaaattaccttcaaatcaaaaaagtgtttctcccacaccaaaatagattcccaaatagatattacaagtaggagaatttttatgactactcagataaaacgaccattgatcacttacaaacatacaagtcataaacaatacagaaataatatgtgtatacaaaaacacagaaattattatattgggaatagacatatgactgattcatatgtaactttgtctccacgctgtcttaaagtgtacagagttgaatattgtcattcacaattgtcacacaaaataaaaactaaaaacacc

SEQ ID NO: 16514 - DNA, 918 bp, Homo Sapiens
gcacgaggatcttggggggctggtttgaatgacagcctctgctctgtctcggggaagccgggggtggcagatccagctggaagtgaactgacagccgcgccctcctgcacacatgcatgcacgcgtgtgggaacgagcccagccgccatctgcacttccgtgtcggctcagctctgacaaatctctttcctgagcactaaattcagccacgaaaatatttttagaagatatttctcagttcatcgagctatagtacacactgttttcctctatgtataatggtgataaaatatagcaagtgaacatgtcgtaaatataaaggttcaagtgatgtattgaaaataattttctaactgctttgtatgtatcacatactctaaattgcacagtaggcgtgtttattaaacagatgattggctgggaaagtttcaaaatagctactgaatttacagtatcagtgctattactgtctttgtgtatttggtagagcataccgaagtaattaatcttctaatgaatgctgatgatattttattagaatgaaagcacagattagcattaatattttttattctggaaatcctttggcaagtattatgaagcccaaatttagaaaactatgagatttcaaaccacataaacatgattctgttttccattttattttttaactgttaggtatttgcagttctgttccgtggaacttctgcaggcctgtatttagcatgctgtaagtacttttgggtgaaataggctctgagtctaaattctcagacatgtttctgatgtattaccatgaaaagcttgtgccacatgacagaagtgagatcatagtcttaacctcttcttgacgtggactggtctcactcgggcaccgataaataacagatttggagtatctctggtgcttattttaga

SEQ ID NO: 16515 - DNA, 890 bp, Homo Sapiens
gcacgaggttaacaactaccctgtaagttaaccatgttatagtggactttctctgtgtggtttaatttcagcttacataatttcttaactatatagcttaatgcatggattatttatcatttaaactaaggtacttggtattgaaagaggccgttacgcttgaatgaccttgtttctatactagccatcttggcaagcataactttgggctttattcattgaccttcttgttgttttctgcagtttgagaatcactggtttttagattcaaaggtagatagggtttttcccccctctctgtcaaagggactcagttttactctcatatttccctagtaatgttaaatctagaaagtcctggatgaaagtattagatttatcctaatatctggtcactaagggatgaaaaatttataaatagctaatgttaacctagatctaaagcttcctattctgaaatccaaacatgaagactaagaaaaatatgtacattttgaaacaaagcagaaaaatgaaacttcaacaatgtaaaagagggtaaaatgccagtagacagccactttcagcagtttctgtttacagtgcttttgctggctaccattgttgctgtaaataatatatgtatactgtgatttctttaacattagacaatactgttaactccccattatgaaagatgaggaatctaagatacttttattactttctgtctcttgtttctcatcctctctccatttactaatttctgtaaattgtattatcatttttggctcctctagtattatctttaaagctctaaataatatgtgtctcagcctggcaactttagctctccactgtataaaagtacaccattcacctgtcctcctgcttttactttggctggtatg

SEQ ID NO: 16516 - DNA, 302 bp, Homo Sapiens
gcacgagggcaaagctgaaatgatgaaccaattgggaaagattactcactgaactaatgctttaaaagccactgaatttcatttaagttgcttttcttttgtaagcccaatattcttttttttcccataaaggataattatttatatgctttagatatttttatgaaggtgaatttcagaccttttcttgtaaaattatctattagctgagaccttttaaatgcaactttttcttttaaagttatttttgagctacttttaacgtataaaattaaacattttcttggtattaataaaaaaaa

SEQ ID NO: 16517 - DNA, 971 bp, Homo Sapiens
gcacgaggaaaagaagagcaggttagaggaaagaaaaaaattgatgctgaatgtggtgatgaaagcatgtttctaaaatgggaagcagatgcttaaagaggaaagactaatctgggattttgccccatttctctggtttttcactcctatatttaattctcacaatcgtgtcgtcacatagtgcaaaaaacaaaattcttgtaaagtccccaggagtttatgcttgggtgaaagttttagcctgagtattttcttcctctaaaaaaggtgggaaatgagacattgaggaattaacatataaatgtctgctatgggtttaagagaactggcgtatttggaatgcttcttacactaacactgtctcattgtaaaatataaaaccccttactctaactacatttttattcctctggtagtgtggtatccaggcaacatatcacttctgctatgtaattctaagaattctcatttctagagtacctgagccaaacaaatacacaacggaagctgcagctgtatcatcactagcaatttgctcatcattatttactacctttgaacctaaggtttcctgcctatgcttttgaaagcaaaaatcagtctcctttgcatgaaaaagagccttagatttttaaacatgttagttaccagaatgctaaaataccagttgattacccaaattattttggaaatctatccataatggaagtctacaacaaacacataaaacagattacactaagagctgagaaattcaaaggaactgaagattctgagagataaactgttcaagtcttagcaatgatactgcacttctctttgacaggttctgggcttaagttaaggccctactggttccaaaccatattccactgactttgcaagtaaaataaatttgattctgaaataggaaacaaaaaaaggagaaataaccgaatactagaagaaaactgtttgtaggaagaccatgc

SEQ ID NO: 16518 - DNA, 753 bp, Homo Sapiens
gcacgaggtgaggtttggccttaggtattcctgtctgggaaaatggagggggtgatattagtggttccctgtactatatcacagccaagagagattagagagagaaaatgtagatcaaggcgagctgcctacaaattactctgtctccaaaggcaacgtgaaaagaaatgatggggaggaaaaaaccccatagattgaattagcactttgactctcacttaattcaacgattttctttcctagattggcttttcttactcttttctgttagtagatttatttataaacaccacaagaagatctcttgggatcagaattatataatatctttgaagtaaattattaaaatatcctatttaatttgaatagtgaagttttgaaaatactttgaaaaagagaagtaaaagtttaactttttaactaaagttagtatttgtttttcagaaatgaccactgaagattcattctgattatacaatatgatttttatgcataaaatttccatgtaacttgaatttaatatttttaaacagaatattttgactaatcctctattttttcatgactattcagttgtgtgtgtttattcgtaaatgttatgttttgtaattggatcacatatttctactttcagtgagagtatgccttcactatgttaaaaaataagctcataaaacagggtactttttattcaaatgcttatcattgtactttcattgctttgaaagagtaaagtaagtatactcctcgtgc

SEQ ID NO: 16519 - DNA, 1217 bp, Homo Sapiens
  misc_feature (212)..(222): n is a, c, g, or t
gcacgagggtgaaagtgaccttggaaatcatatactctatccccatgttacacagattagaaaaactgaggttatggcactgacttaggcacccccagcaaggcaacccagggactacaactggcaatcccaactcctgggctagggctttttctacctttttttgcattggcctcttaaagaggcaatgaatactaattcctggcatcagnnnnnnnnnnnggcatgaggtgggaggattcttttttccctgatgggaaacagtgaataagaaaaatctcatcattcgatggaagaggtgacttaataattttattaatgaatttgatgtcccatgttttgtagttttgttatcattgaaccattggggctggaatctgcctaaataattttatcttggtagccagcaattatgttggtattttatgtgggccttcccagattttcatattaatgaaatgactaatagtcgtacttaagaggtaactctactaaagcagaatgagatctaatatgttgtggaaataaaagagtttgcagtggaatgatactctcactccgtgcttgtaaaattgagttctattcaagacggaactgctatgactggcctattcaaggcttcatatttttatacagactatttcacagaccatagatttattttaaaagggaaaatctcacacataattaagcagtggaaaatgtgctcaatgctatggtgcgtcaggccctctgtctaccaggtttctcccctttctgcagagctgtggaccctgtacgtaccaaacaggtgaacttggtccatctttccttcttcctttttttgcacatttgcatttatatcttcctgtactaaaagaaacaaattatttataattggggtgacaatataaaggaacaaaagatggggcaatagttgcttcctagctggagctgtaagtccatgttacagaaactcactatttaaaaagttttaaaagatttatgaaccttgtcctacaattcgctgaatacttatttgtcttttaaactcccctcggtgtatggatcatcttcgtcagaatgccgttgtttcattgtgaatcacgggaaaatgttaatcatttggagactgttttcttattaccaaatgtacaatccataagacaactgaaagcaacactgctgggttcactgacaagattataaaatcatcacgttcaaagtagagttttagc

SEQ ID NO: 16520 - DNA, 551 bp, Homo Sapiens
gcacgagggttgcacttccctctttacttacactggtgaaacatgcagtgaggattcaaggtcaaaattgggtcaaagttaaactaacacagtctcctgccccacttacctgtcctctaaccccatccaccagccctaagtggtcatcacatgatcagaagtcagctgggggaagagcagggatagatagagcaattaaggagcctcttttggggtaagccacatgacaggggctttgcaacagtctttcatgagtggccgaaatcccccactcactgcaaatgtgcttctcaaagatgcaggattttttaataaacagaggaaatgataaattatgttgtaattccactccaaaggcatttggttcttaacagccaaatcctctgtagtctttaaataaacaaaaacttatttggtgaacagacagggaggaaaatgaaagattttctgtacttgggttccacatgtcaacaatttctctcctgtgtgtatgttggccaaagctgtatcatgataaatgaataaaggaaaacctcgagcccagggcagtc

SEQ ID NO: 16521 - DNA, 339 bp, Homo Sapiens
gtgtgagccactgtgcctggcctgaagtgctatttctttaacagctgcttttggtatcaataccctgttggttattagtttaaaattttagtcaatgatgctttttgggtgggtgtgaagggggaagaaaatcttgagcatgtaatgacttaaattgtttcccaaatcaaattaaattctgggccagtataagacctacacactcacatttcacaagtgagggcatggatgggggtaggggcaggcagggaaaggagaaaagaggacaatcagcacccctgaggggctgaacatagggggcatccaaaacgtgcttgctgtgggaagaatggcctcaag

SEQ ID NO: 16522 - DNA, 854 bp, Homo Sapiens
ctatttaacggttttattccatttcagccttccaagaatgcacactcatttcctggggtgctgaaaatatatacaggttgcttccacaggctgccgctaatccaatcattgactgcatgaaatgcaaggccaaagcaggaaaccaccacccaacagaatgctacagtcatgcacagcacattctaatcaaaataattcaaggctgtggatcttcagttgttcatcagttttcaaaaatccatcaaagcttccacagaagctttccaaagctttacacttaacacccttctagtgattagtactattctaagtgtaattattattgcttttatagcttaaaaaagttgtgttcctttaaaaagaacttcagtaaactccaggatgataaccaatgcctacctacaaaaacgctaatgtaaattagctttgtggttgtgcaggcttatccaattcttataaacaacagataaacaaactgtaataaaaacattgggtaattacaaacacctttataaagtataagaaatgcggtaatttcaccagagaaagggaataggtatattcaaccttcattatttgcagattctatatttacatatttatctacttactaaaattgatttgtaaccttaaaatcaatactctcagttcttttgcagtcactgggtggctatgtgcagagtggtgaaaaatttggatcacctgacatgcattgtgtgccctcaccttcccagcggaggtcaaacaagatgatgaactgctttcttggtccagctcccagaatgtaaacaactgtccttttcagggtctatataataccacattttctgcattttgtgcttttagttggtaat

SEQ ID NO: 16523 - DNA, 719 bp, Homo Sapiens
catgcgtgtgctttttaaaacagaaattggcattctgttatatgtcttagtctgtttctttgtgtgctaagcaccatgtttgtgagctctgtccttgtgttaggtgtgtatctaatctgttgcttctggctactgcataatactccgtggtgtgcatgtccagtctccgagtgatggacacctacgttgcctgcagcttcctaacatcattaatgaggctgctatgaacagtctggtccatgtgcccttatggacctggatacgtgaggatttctgtgagttacacatgcagaagtgggatttgcaagtggcactgactactctccaggatgctgcgctagtccacacttccatcagcagggcacaagggctcctatttccccatagccttgccaacacttggcacctcccagctgtttaatctgctgctctagtgggtggaagtgacagctttgttttgatttgcatttctctgattactttcttgataacatttggagagtgccagcggtcagcagggctctgtgccaagtgtcttatatttggagtctgggtcagggccctgatttatcactgcatgtatggcttggccctggaggactgttcacacagccttgatgtagattttcatcacactccccaagtgagggaaacttgcggccatacttgtgtgtgttctatgtaaaatgtgataaatgttaaatatactgcaaatctgg

SEQ ID NO: 16524 - DNA, 941 bp, Homo Sapiens
gcaagcatataataggttaatccagatggagttaggagggtttataagggcagacacatcctagtaaagaggaaataggcaaactaatgctgttttagtgtaataaggaatgcttataatgatgaactttagtcataaagaaaaggtgaaattatattcagtaacccatgttaggaaagcagaaaactatttaatatgcttggaaagattccaaccagagttaactgaataaaaaccttggacatttgaagagaaaagcatttagttctatctaatttcaatatgcacgtgaattagttcatgttactctaacaatgtattcttactgtccttttttatgaaataggaaagtaaaactgaaagaactatttcttgtgtttttaaaactagccttttctaatatttgatatctaattaaagttagataatatgtaatatgcttttgaacaataatctaaccagaaaatattgtataataaattaccaagaaatcattacattaattataaaaggaacatgtcaatacaacaaatgtttatttaacacctactgttactccaaatactgtgttagaatttgactattcgaagatgaataatagtctttgccctctggaaggccacaatgtagaagtaattctctgtatcagatatttccttgagtgttaagtgtattagtaatcatgttgtaaatcccagtgtaagtcaagaagcaatatcaccaccaccacctccctatgattttgtgataatttggcattttcaatgcttgttaactttcatgttttcatttttatgaaatcatgcagagcttgttataatttttagtggggtttggattaaaatgcttttttgatgtagcagagatacattttttcccattttacattgttttccttagatattaagaataaatgagtaaaataaactgattttaaaatc

SEQ ID NO: 16525 - DNA, 276 bp, Homo Sapiens
ccgtaaccctcatcactttaatcatccctttgaggactcagcaatgaccagagggggctgggaagggcgagcactacttcgcaggcacgggatcctcagcaccaggggaacacagtagttccaggaagttctgggtgttcctggccccgagggcccgcagccgctcggtcctctcccgatgcatttgctccagctgctcccgcagggcgcgccgccgcccagccgcgtcctcctggcggtgcaaagcgctgaacgtccgcggctcaatggggcggg

SEQ ID NO: 16526 - DNA, 915 bp, Homo Sapiens
  misc_feature (776)..(785): n is a, c, g, or t
gcacgagggataggattccaggacaatctcaaaactattgctttttcctaaattcattgcaaccttaaaatcctagcaagttctttaatgtaaattaacaagctaattctagaattcatatgcatattcaaaagtcgaataattgtcaaggctatcctgtagaatggacagagaggattgaaatttctaaatatcaagacctgttataaagccatagaaataatgaaggtgttaatttggcacaaggatgaaaaaactgactagtggaacagcatacagattcaaaagtagacccacgtgtataccatcacctgagttttgagaaaggtgacattgaagtgtagtgggggaaagggtgttctttccagtaaatgtactttgccaataaaattttgtaatttgataaaaagttatttggaggtggattgcagatctgaatatgaaatgtgaaagctttacaaagaaatcttaggacagtttgtaatcttggagtaagcaaaggtttattgagacccaaaaagcattaacccataaaattagaacttaatattaaatttgagaacttctatttatcagaaagaccaccagtaagaaaatgaacaggaaatcatggggaggagaagatatttgcagttcatgtatgtgacaacagcaccgagtatagcagaagtgttggcaaactttataaagcaaggcaccagatggtgaaaattttcagctttgtcacaactgctcatctttgctattgtgtgaaagcatccatacaccatgcattnnnnnnnnnntgagcatggctgcttcccagtaaaaccattcacaatcccaggtggcagtctggatttggtctgcactcatagttttctggtccctgatctcgaatatgtaaagagcacctacaaatcaccaagggggaaa

SEQ ID NO: 16527 - DNA, 866 bp, Homo Sapiens
gcacgaggggtaaactttatagaaattttcagatataacgtcaaggatatttaagacacttaaataatagtttgtggctatggcataacatcatcatcgaaatgggaaagccaggagcagccaggaattctgtcaaacgcacagctctggcactgtttattagccagtctgcccccatctggggagacactggccaaatctctaggcttgacccaagcccatccccaacccagcttcctttgcaagctacagctgtgggctttcactgggatactctcctcactagggtaaaagacacctttggttggataaacccagagacattacttttactttacctaactaactttcttagatttctgtctttacaaggagaaatgggagagctggcccagtgcactctggagggtcaggtgcacggttatggtgcaagattagggttagaacggggcggggtcaacaaaggcctggaagacctcaagtctcccgcatctaacagcagcgttcccagaattaattaatgattcccgttcctcactgcacccagtcctaagggtaccttccccgcggtagcccttgacaccggcaagcagttcgccctcaggtcttcccgcgtgcacctggccgccccctctcacctgacgtggccttgcacatctggggcatcctggtgaccctgctgtgcgccacgaaggtgctctgggaggaggtgctgtactgcgagccgctgtccgaggaggtggagctggtgtgcgacaggcggctgtgctccttgtgcgaggcggtggaacgctggtaccactggcgcagctcgtctgaaacggcggcacggcccgcgcccttgtcgtgggcgccctcgcggccca

SEQ ID NO: 16528 - DNA, 865 bp, Homo Sapiens
  misc_feature (703)..(723): n is a, c, g, or t
gcacgaggctgggattacaggcatgagccaccatgcctgcccatatatatattttttaatccttttaattttaactatatttgtccttatatttaaaatatttataagaaatttaaacaaagtataggtaggtcttgtttttttattcagttggcaatctgcatcttttaatggtgtgtttagcatgtagacatttgagtaggattattgatatatttgagtcttttatcttgctgtgttttatttgttctgtctgtacattgttcctattttcttcttttgccttcttttgaattggtagacaattttacatgatttcatttacatctctttgtggtgtattagatgtaactcttttgtattaggtataacttttattattttagtggttatttttaggttactgtatgtgtcttaaatttatcatagtctaccttcaggtagtattatacttcatatataagaacctacaaatgtgttttttcattccctttcatctggcttttatgctgtttttgtcatacattttgcctatacatgtattataagccctgcaagattttgctatttttaattcattagattttaaatacatttaaataataggaaaagtatgtatcatatgtactcatgtcgttactatgtcatttgtttatagatccatatttctatctggtctcttttttttctgccagatgagtgnnnnnnnnnnnnnnnnnnnnnaatattggttgtagtgtgttctgctggtgaaaattttgcagataatgaattaagtgatttcccagtctgcctgatgggattctgtactattgtacgccctatgagaatgctggatactgtttaatccttcccgatggccttt

SEQ ID NO: 16529 - DNA, 617 bp, Homo Sapiens
  misc_feature (418)..(447): n is a, c, g, or t
  misc_feature (515)..(523): n is a, c, g, or t
gaaaggcaaagtaaaactgtatatattcagttataattaccacctccttggcaacatcagaatgtaaatgaatgacctctgctggactctttttagcactgtaagagatactgatttattaatgtagaaaattattcaagtacatatctttaaaattctattaccaagagaagaaaaatatgtttttgtattctgtttggttatgataagcctggaggagatagatttaagagaatgattttaattttagttcagttaaattaagttcaagaaccaggaaaacatttgtgccttttgtaatttcacttgtattaaattccgttagtgtacaaggctcaaacagaaagacctgacaaactgttgaaaactatttaagaacatttcttaacatccgtcttcttttcctaataagcatacnnnnnnnnnnnnnnnnnnnnnnnnnnnnnnagcttctgcatccaacccatccataacatacttactgcttttcttaaaaaagttttttccagtgaaannnnnnnnnctaacttagaaggttttagtactaatttcttttagggaacacttgaaatttttcttaattgttttgggatgaattgtatgtgccacaataaacg

SEQ ID NO: 16530 - DNA, 926 bp, Homo Sapiens
gcacgaggcttaaatgagtgactcttgaagctgcaagaagaggaaagaaataaccacaagaaggggctatctcagcatctgttattcctgacaggaggaattaaatatgctctgctggtaattctaagcttttctgcaggggatctgcttgccccaggagcaccttagtcctcattgaggcagccattctgccataaaaacgatcatgtctcaagctgttcctgccgtcctacacaactatgttagtagatggttagataaatatatgaaccatcttttgtactttgatgatgcccttttcctttattataatccttaatttctactttccatagtaggatttgacttttctccattagtttaagctaccctggataagtgactctgtttatgtcctccctatatttcttactcattttcacactaacataacacgtaacaaaattaaacataagctaaattgaagaagcaagtgagacagctaagagttttgtgtacttggacaacaaagctcaaagccactgtggttatctgtcctgttgggagcccctttcaaccatttttttagttgcctgtaagatttatttttaatgtttgcctgcataatgcaaaatacataagtgggaatccctacgccctttacagttaagtggattatggaaataataaggaaagtttatcaactaaggtaggaaatatcttctcatgtctgtatctggccttcagggacttaatgtgggtgaatatatgtcattagacaagatcctaatatagatggctgtatcctgcagatagccaattcaacattaaattttatgtttccatacctcaatgaaaacatatttcttttatcctggtataattaatgacattccattccaacttaatcaagcaatgatactcagtagtcctctccttgcattttc

SEQ ID NO: 16531 - DNA, 495 bp, Homo Sapiens
agagtctcaaacttctgacctcaggtggtccgcccacctcggcctcccaaattgctgggattacaggcgtgagccactgcgtccagccaaaaccttgttactttgagcagtcagcaaagaaatagtactttatccttccccctttctcattgatcttcccagaatttttttactctgaagtaagcaattttaacactcacttcttgcctggtaagactaatgtcatagaagaaagaatcatcaggggttggatcgctctctccatctgctggcccagtggattcgatgtcttataaatctttttggaagtagttgggacatacatttatatgttaagtatttataggggtgatgataaggattaattttaaaaaggtaaaacattccttctgtaatgttttgcagacttctgagaaaagaactgtttgagatataaagaactgctttttgcgcgagtggcataaatgagtgaagtgagaattaccgtgtgtgaaa

SEQ ID NO: 16532 - DNA, 348 bp, Homo Sapiens
ggaaaagctatcatgcctagttttgtattttacccataatgggttgaccttccacccccaatacttgcactgacaagacttttttgtctttgctactcacataaactgtcctgctctgacaagcagctttgtagcctgcttaggtaacggtgacagcatttcctacaaggagttcgctataagccagcaaggtagggaggatggaaatgagagtgcagaatcaagtgcctttctgctgtaaaccataccttcaacttttcattcccatgagagtaataaccttcatttatttcactattgtatcatagttcaaagtcttagcagggcaacatacaacccatctctacc

SEQ ID NO: 16533 - DNA, 925 bp, Homo Sapiens
gcacgaggggaatacttactgtgactcatcctccattccttttgttggcatttttaatggctaagtaccactgcataggtcccactcaaaattgtatcataccttggtgacctttgtgctgttagctggctttttgtaattgaacctgttttccataattttgaatatccttaaaaaactgacagccctattgtgttctgttacacatctactgggaatgataatcatatttttaacttaagacaatgcttgaatatgtattagcaaaaagttggataaacctaaatccttattggtgaacaaacacacttatggatgtcatatttttatttacttgatataattttaatgagggcaaaaatcctttgaataatctcaatgaaagcagtttaagcctaatcctaataaatgaattcgtatactttttttgaccttggaaaaataccactttacacccagtgctacgtttgataagtcatagagaagcatgcacgcataaagtgaatggaaacagaaacgtttaaagattataagaacaattcaaataggaggaaaaacaaactgcaggaaactggataggaagttataaaaggaatgggagaaggaaaggcccagctcttctgtaaattagaatcctcaactaaaatagcaaatgagattgaagaaatttttattcagtggcccccaatggatcagtgttcatataggtacaggccaagtgttaactatgttataattgccatagaagtgtgtgtcaggagctgaattttactcccggatgacgttgttgaccacatttgtagctgtagtccgggaattggtttgaaaggaaattggccttttcatgttgccaaaatcagatatggctattttgtttatatacccgtaccttaaaatattaactgctttttaaaaacaataaaaa

SEQ ID NO: 16534 - DNA, 970 bp, Homo Sapiens
gcacgaggttcttaatatctcttataatgataaagtcaatgtatctgtttcattcacaatataatttaagattctttatcatatgatatttattagattagaaaatacttatatagagcttactctgtgctaggcactaagtgccttggaaaatattaacttattcattataagagctgtgattcaccataagaaaagcttagatgttgtgattcttagaaaaagaagaaaatagttttctaactaggtgtatgcaaattaggattataatttatcctcttcttgtaccttctacacatatactttctatatcagaaagaagacatatgctacattttcttattaaattcttagagtaccctaactttaaccattctaactttgccttgggatattgaaaattctgaatcagtgaggtatctaaataatttatattttcaaaaaataatgtttattttataattctgagtgtaaaacactatcagaaaagtaatcctcatgctcactaaacaaacctactctaagacactcaacaaccagaacagttttattattgagttgtgtacaaaaatcttgactgtccagatgaaatagtttttcagcctgcagtgtgttagtgatatatctcaaggagatgaaccaataaagtacagactttgtggtctgaagctctgttgtgaaaaaataagctaaaccaattcacactgacagtataatttgattcaagtgcagctccagttcaataaaaactaatgtttttaaaattaactttgttttgtatttggttcaactccttgctagttctctctctatataatttataaaaactgcatgttgctaatctcatgatcctgtgcatgtggactactctgcctttaacttttttacaaaacatgtttgttcatagattaaataaagtatgttttcaacttaatgtctaatgttttctgacatttgtaagaataatttt

SEQ ID NO: 16535 - DNA, 952 bp, Homo Sapiens
gcacgaggctcgcttctctaactagttgactttcattatggatggggataggctaaaaaacgggcccctgggatggctgtgctgccatcagtgctgttggtttactcactctttttctgtcttcgtttttgcatgctactgctcctgccctcttacagccacagtagaagcggtagaggcccgggaaggtatggccatattactctgatagatgtgatccatgtgtctgtgtactggtttttcgaagctttatcaacatttcaaatattttattattgcatcaccagaactataacagtgagaaaaggtatagttgtttctaggcatgttaacgaagcaggtgtttcctttgtgtcctatctttgcattaattttaaataaccttcaccacagctacagttttttttctgggctctatcagctttaatgcaacggcagaagcttaagcaactggtcatgagaggtcaagtggtttacttctgtatcccttccatgtacaagagacatccatttgattctcaagagagccaaataggtcagcctcttcagcgattctaaaagatttcaagagcagaggcagaagtagactggaatttagttcaattcatttctgaggttgccctaaggtaggcaagttaaattaactttgtttctatgaaaaccattggaactgataaacttgtattatacttgtaattgttttattaggtaagatggttcaaaatgcgaatgccttaacttggtgttataaaagttgaatcggaaggaaaatatgtagaagctatttttaagtttttaacttatgtacagctcctggttgtgcaagatagaaagctgtcctaaacgaaaagattagctcttttgttacttttttttgtggtctatgtggcctttgtgcgaaaagcaactaccctgggtttaacttgttcaattattctagtgttgcctttgt

SEQ ID NO: 16536 - DNA, 329 bp, Homo Sapiens
agtcaaaaaactggaaatacacaagcacagaatgtctgaaattaaataacaaatgataacatttggcctgaaatttgtctctttgtatctaattatatcaactttttaaactatgctgttcaaatacactctattcttgtaactattttatacctgtttaatttttaagtttctgttgatgtgataaaatttcgcaccatgattttgaaattgtctcagtctcttgtattcagtcagtttgtgcttcctatattaaacagttcagggctttgctgttaatccatataagtatgtgaaggtatattttcttaggatttttccttggtttt

SEQ ID NO: 16537 - DNA, 833 bp, Homo Sapiens
aactcattaggatcccccgggctgcagggccctttagggggcgccatagtactttagaatcttatgtgtatttagtgtggttatgccagcctgggggtctggaagaatgaatcgtggctccttcaaaacagcctttctcttaagaaaggttcataagaaatacttgatctttatgaaatactttactttcctattttaagaaaatataatctggtttttattttctttaattccttcaagcttacgtggtaaagtttacagtctcatgcagtttaaggcttttgtttgacacttctacttgaaattatttgacacttctaattgaaactaactgaaataatttttgagcacacatatgcaagacatcgcaaagaaaagccaaagataaataatttcttacaaaaaaggccctgcccacaagaaacttaggaggtaaaatgcaaatgcacaagtagctataatgtgtattaaaacagaaatgttcacagaagaaagagagaggttactgccagttaggtatttagggaaggctttttgagttaggtaagagttgagatggaccttttgaggaagaaaaggctaagatttggggtctgcagctccagcctggtaactagcatgcagcccatctagggaccactcaggttatctcctaagtggctccttctgtttcagtgtcctgtgcatttgcctcctcagcaagtcctttaagaagcatctgcagttgttgaatgggggctgggttgcgactgtccctgccttgggcgccaggttcatccccagggatcagccctctgctgacctgggaatatggtcagaatggagtttgctgg

SEQ ID NO: 16538 - DNA, 254 bp, Homo Sapiens
gggtgagccactgcccccagcctacaacatggttttggtttatctgttcttttccactgcctctgaagcaaaaattccttggaaaatttatgggcctatcttttccctctgtattcccaacacttacactgccccacacacggaatgttcaaatgtcggttgaatgaataaatgaaaatgatggctaccgaaaaacacagggtagtacagtattaaaagacttggttgagaaatccaaatgggggacaacttga

SEQ ID NO: 16539 - DNA, 88 bp, Homo Sapiens
gcacgaggcccggagcctcacagaagtcaagaaacgctatccccagcttaaatgtgcagactcttcaagatggaggtcaccctcgtgc

SEQ ID NO: 16540 - DNA, 559 bp, Homo Sapiens
gcacgaggcttgtgaaagctacatccagcaatccagcagacctggaatttgcctgagctgtctcatgaaaataaaaaatatatctgcacagtgcagacacccaggtaaggcatgaaatgtactgattaatagtgttgctttataaccgtgggtccaaggagtttggaaagatttgtaccagcttgtcagcactgcttaactgataacagtaagattgatgatttgcatttgttctctatgagatccttagagggcctgttagtggggctgtctatgtggcaaaaatctgccaacatgtccagcagagtcatctgggccaagactccacttgggcatacctggttccgaagtgttttgtgcacacatctgcggtttctgatctgagagagaaagtacatcctgtatgatctttactaaagagggcaactggggcatgcacctacctttcctaacttcctgctgtgaaacagcctttggatgtgacacatatccttaactaaatgctgttgctatattgtatcattttcctgcaataaaatatatgtttgtgtgcactgtc

SEQ ID NO: 16541 - DNA, 873 bp, Homo Sapiens
tcccccgggctgcaggaattcggcacgaggcccaaccgagagcgctttccgccgtgcggcgatgaacctccgggaaagacgctgggaggcccagggatgcccggcgcaactggacgctcatcgggagtcacggggtcggccctcaggggaacggggactatccgtatcaactcggtgtttgttcgttttcttcaccttgcggtttgtgccctctccacatttcctctctgtgtctaccattctcctgggggacgtggcaaaccgtgagccgctgcgtttgagttttgggaaaccctgcggaaacgccctggcgccggtggttttgcgcgtcctaccctgtgtcacctcagggttatgatctggcccctggcaaggctccccaagtgtgatgcctccccccgtccagatgactgcattttgaggatggagtcagtctggtggcattttttgcttaagtaaacaattgtaaccgtttgtgtagcatcagcgttcaacagctgcctgtgcaaatcgaaaaaagcgaaactttggaaactaggaagcatcagatgaataattctgaagacttgatgtcaacgggagtatcttgtttttaaacttttggttttctgttctggagacaaacagttcatatgcactaaagaaaaaagtgtcattatttcagatgctcattgccagcaaagagaactgtattgcaagtcagcttcactcccagtattttctgaatgtttcaataaaatgaaatatatacgtctgcctgtgtattggtgtacatgcacatataattgtacataaaaccagagagggagccccaattttttttaatgcttaagtaatagaaaatttgtaaataaaaaccctttggcttttgct

SEQ ID NO: 16542 - DNA, 879 bp, Homo Sapiens
gacattttatacttttatgtattttcatgtgaaatgcattgtctgatcttaaacttctgtggtaggcagggtagacatattagtcctgttttataaatgagaaacacattagttgaataatttaccaagcattgcacagctagtatgtgctatagtttagatgagaatccagcccttctaacccagtgttctatacagtaatataaccagtaactgaaatctatgtaggtcatttaagattttaattatatcaacatattgaaacattagatacctgcatttgagatgaaaatgttatctctggattgtttggttataatattctcttttggtgttttagtaggattttttttctaaacaaagtaaaatatttctttgtagtaattttgtctgattttccatattaaatgaaacaaatacattcatacatttataagtaaaatgttccaaatgggtgggatttttttgtttgctttattaccattcagctatccttttcaggttgcctgaagctagaaagatcttaaattctcaatttgtttgaactttaaaaacctagaaaattgctcattgccattctgtgtttcctctaaaaactgagttttcacaattttggatttagtaaaaatgtatgttcatcattggattataaagtaaaacaaacattctggaaagaatctggaaatttcattagtaatgtgaagacctgactatagttatagttctacataacagtgttaaaaacaaaacctatgttattattaaaattagttccttcctccctctaccagccctgatttccactcacccccgatctcccttcctcttaatatttttctgcttttatgtattttatatttttaaggctaatgacaaata

SEQ ID NO: 16543 - DNA, 849 bp, Homo Sapiens
gcacgagggaacaaatgaagtttatttctccagaattcataaagagcccccaccttactactcctaccctgtccacataaggagattctcctggagagcaggttcatcatctgcccccagagatataaccacactgtgatggggagagtagagaggacaaagagggtgccctcccaagctcaggccacttctccccaaggaaccctggcaactttctgagaggctggggcaccagcctgggctccctgggagagctaccaggccacacttggagatctgttgatagaatgagctcctcccatgggcactgggagctgccctgttcaggctccctggtgaccaggtgcttacggagggagtcacggtaattcccacccatccactcacaaagccacgggctctcccttgatgtccgaggacttacagaaaaccagaactcaaaaggcagatggcaagtggggcctgaagggttacattttcctgcatggggagcccagatgtccggatggctctcatgggcgcccattatccactgcccaacagcacgtttctgcctcccaggtgcgggatctgcgggccagacgctcttctctttggccacgttgttcttggctctctcctggggcaattagcgccaattgtgaggtggccttcctgattcacacgcttgccccctgtgcgagctggactttgctcacagtccccagttccacttgaggagcagggtggtgaattcatcgtcctcatgccactgagctgaggcttgcccagtcttctcctggtttgctcccttctcccatgggttttcaaggcacatgcggccatgccaaccgctgtgaggcggggggg

SEQ ID NO: 16544 - DNA, 429 bp, Homo Sapiens
gcacgaggattattttttgaactaactgttaaacatagtgtataaaggaatgacttcaagttttaaattaatttttggataaaacacaacgtttcagaggaattctgcacttgtaatgagacttagtagataaagaagagaaacagatggtcaaaataaccacaagctgaatgagtggtctgtgcacctgaacccctggcatattgcgttttcttaactgttatgtgttgagtggatagatgatccaagacagggtctgccttcacagtttaggtcactatttttatttctctcattctggtctaaagcaggcatatttggctacaaacaactgctgagatgaagaagagaagcctggagcaaaatgaaatctctacagaggctagggctggacatagagctcttggtgagttttgccaaaagagagcc

SEQ ID NO: 16545 - DNA, 542 bp, Homo Sapiens
  misc_feature (159)..(174): n is a, c, g, or t
  misc_feature (188)..(285): n is a, c, g, or t
ggggggcccgcggcccacgtcacgctcggaagaggagaattacccacgcaccttgcccggcgaattacctggtctcgatagggtcctgcctggtttcaccccctctgacctgcttgccgattttcgcgatgcccgccgcgggggcagaacctaagaggnnnnnnnnnnnnnnnnttctttttacttgnnnnnnnnnnnnnnnnnnnnnnnnnnnnnnnnnnnnnnnnnnnnnnnnnnnnnnnnnnnnnnnnnnnnnnnnnnnnnnnnnnnnnnnnnnnnnnnnnncctacgccccgctccattcacttacttcccttcgtttctgaccgaggaagccggctttccccgtctacgcctaccgcctctcccccctttttggttccgattttaaggtttatggcacctcaagcttcccgactggaaagcgggtgatgagcgcaacgcagttacagcgacttaactcacggattatgcccctttgactttggagtttatgcttccggatcgtatgttgtggttcattgtgagcggatcacaatttc

SEQ ID NO: 16546 - DNA, 329 bp, Homo Sapiens
ggggttgaaaatttaaactggggtctggggcccacaggggtgcagccccccctgggccaaaaaaaggggggacggggactccccgcccctacccgggaagaaagggatcactgaagctgcatctggcatgggctcctggggggactggaccctggcagggcaaaaccgggttgagccaacttaaccaaaccagcgtcagtgtcaccagcctcatgggtggaaccaccctcatggtggtctgcagcaccctctgaacccgatatcccaagcctgggaggtggtgaaaggtcaagacgcctcttattggtctgaaaggccgggaccccatt

SEQ ID NO: 16547 - DNA, 762 bp, Homo Sapiens
  misc_feature (360)..(416): n is a, c, g, or t
gcacgaggccaaggctacctttttaacgcagaaaactaagaagcctcttcaggtttctgaataaagaacgagaaggcaatgatgatgaaaactggaaacaagcaggtggccattaccgcaattaaggctaaaatctaggttaagaaaggggagagagaactgcaaatgaaaagggcaaagatgcagtgaggatgagaagttacaaaagctaaaaagaaggaagtaatactaagaggtgttacagagtccagctcaaaggacagaaaaaaggaggaacttcagataacaatttttaaaatacttattaacagccaattatgagtcaggtactttacaaggtgttcaatggacattatctannnnnnnnnnnnnnnnnnnnnnnnnnnnnnnnnnnnnnnnnnnnnnnnnnnnnnnnnacattatctattttaatcctcacaatatccctgtaaggtaggtatattaccttcagtttccagatcaagaaactgaagtgcacagaagtttgaagtaacttactcaaaccacttcactaataaccagggtaggcaggactcaaatacagacagtttgcctccaaaatacatggtcctaatcacctccctatgttgtgtccatgcagtcacgagtttggcatgaggagagctggagggagagcccaggagacagtgaagaggaagcaagaggctgtatatgtaaccagctgggtttgggggcactcatgagtatccatagcacaaacgggcaaactctgttactggc

SEQ ID NO: 16548 - DNA, 1620 bp, Homo Sapiens
  misc_feature (111)..(143): n is a, c, g, or t
  misc_feature (1289)..(1297): n is a, c, g, or t
tcgaatggagattggcctggttgtttccctagtatatggcatatgaataccaggatagctttataaagcagttagttagttactcactctagtgataaatcgggaaatttnnnnnnnnnnnnnnnnnnnnnnnnnnnnnnnnngagtaacctgtaactctcaattccctgaaaaactagtaatactgtcttatctgctataaactttacatatttgtctattgtcaagatgctacaatggaaaccatttctggttttatcttcaaagcggagaaacatgttgatttagtcttctttcccaatcttcttttttaaaccagtttaaggaacttctgaagatttgtccacctctgattacatgtatgttcttgtttgtatcattagcaacaacatgctaatgacgacacctagctctaagagcaattctgggagaatgaaaggaagtataaagtaacccataatctgcttggcaatagttaagtcaatctatcttcagtttttctctggcctttaaggtcaaacacaagaggcttccctagtttacaagtcagagtcacttgtagtccatttaaatgccctcatccgtattctttgtgttgataagctgcacatgactacatagtaagtacagaacagtaaagttaaaacggatgtctccattgatctgccaaatcgttatagagagcaatttgtctggactagaaaatctgagttttacaccatactgttaagagtccttttgaattaaactcgactaaaacaagtgtataactaaactaacaagattaaatatccagccagtacagtattttttaaggcaaataaagatgattagctcaccttgagataacaatcaggtaagatcataacaatgtctcatgatgtaaaaaatattaaagatatcaatactaagtgacagtatcactctaatataatatggatcagagcatttattttggggaggaaaacagtggtgattaccggcattttattaaacttaaaactttgtagaaagcaaacaaaattgttcttgggagaaaatcaacttttagattaaaaaaattttaagtatctaggagtatttaaatccttttcccataaataaaagtacagttttcttggtggcagaatgaaaatcagcaacttctagcatatagactatataatcagattgacagcatatagaatatattatcagacaagatgaggaggtacaaaagttactattgctcataatgacttacaggctaaaattagttttaaaatactatattaaattctgaatgcaannnnnnnnngttcccttgagaccaaaatttaagttaactgttgctggcagtctaagtgtaaatgttaacagcaggagaagttaagaattgagcagttctgttgcatgatttcccaaatgaaatactgccttggctagagtttgaaaaactaattgagcctgtgcctggctagaaaacaagcgtttatttgaatgtgaatagtgtttcagaggtatgtagttacagaattcctaccaaacagcttaaattcttcaagaaagaattcctgcagcagttattcccttacctgagggcttcaatcatttgggatcaacaactgctactctcgggaa

SEQ ID NO: 16549 - DNA, 728 bp, Homo Sapiens
taattgtgtaaactgattcgtcagtttccatagggctgcctgttgtctgcatccgacgctggaggctactgtccacaggaggtttgggagggacctaaacctgcgtcagttcttgctgcttctggccttggtggtgtggaggtgctgcagaagctagggcctctcatcatgaagatgagccagatgcctccttcgggagccacaggatccagagagtcaatgaaagtaaaacttcaggactgtctggatttattacgccagggaggaagttgagccctggagactgtcaggtcgtacgactgcaattcttctcagattcactctcttcctcattgttcttgttctgtaaatgactaagagagaccagagaccagacctccccacttccaatcactggttttgttgtagatgaactgcctcctttgctgtccggtacctaatgtggaccagacggtgctcaagaccctatcactagtacaacctcagtgtggaatgttaaatatgccttgcctggaagaaaaagaccaacttgactaatcagatcatcataactatgcatgaagtcttccacagaaagatgatgaaattttgttacacttccctaacctttgtctaaataagcattcccaaacatctacactttggaacactgacttctgttctttgagatgggtgcttcccaggtggcccatcctcaaactttttgcttgaataaactctctaaacta

SEQ ID NO: 16550 - DNA, 1535 bp, Homo Sapiens
  misc_feature (599)..(613): n is a, c, g, or t
  misc_feature (733)..(753): n is a, c, g, or t
  misc_feature (896)..(913): n is a, c, g, or t
gaatggaaggaaagcaactttaaaacatttagagttttgctgagtatagccaaatgcctgttctgaaacttataggaaattggaattttgtttaaaattttacactttaaggtagcaaatgtcaattattagaccgagcatattgtgaagaattaaactaaaattaatacgtacagttttctctaattaggtgactgttcataatgggtatatttggaatttagaagaaataattttgtagtaattgtggcccttatgtttaacagataattcagcattggcgtatttgcttgtcccaatacaagaatgccaaaggaggaaacaggaaaaattgccgtccattttaaaaatttaggtttgttgttttaaaccataattgttctcagaacttttttggaacttctaattttgggtcatttaatttaagaatgagagtcatgatgttttgatttatgaaggtgaatttaatgcaaaagtgggtaacactacattcatagcaaagttttttattaaattttataaatttttaatagccaattatgtcctaattgtattttggggaatgaacagcagcaaatactgtaaatgtacagttttcnnnnnnnnnnnnnnnggttatgtatacaaaagttttaactactttttggtgtttatgaaaatcatttagttgacaaggtgcctatgccattgttaaattttctttaagtaatttaacaacagatttgctaatttnnnnnnnnnnnnnnnnnnnnntcttaccagcagtttgtaaaggtctggaatcacagttggcatcctttattcaggtctcttctctccaacgtacacttaaaattggtgccgagcagggatataacctgcagttaagtgaaaagaaaatccagcctccccctccnnnnnnnnnnnnnnnnnntttaatttttaaaaattagtggtatggcaataagacacttcagaggctatcttaacctctgaatacccatcttctagtttaaagacagagacatcccatctggaaaatgttaacttgtgttgccatctcgttgccggagtaagtagacataaaacagagtttaagaagtaaaaatatagaaaaattttgatggtcacaatgagataaatattagaatattactattccaatgattaaatgaggatcttgaaataaattctgaagtcttccaatttttacatttattggaggggtccctgagttctgtcaacttttttatttaagtctcttgctcttattttgtgcataaatgttaaaccttccaaaaatgaaatgttagctttctttcttttactttttattaaatttaatagaaaatatgacctgagtagttaaaaagtattttgcattatttgcagtaagatgtctctagcactgctcaaagggcaaattttaaaacttcagtctgggtgaaagatttgctagttttacagaaagatttgctatcttaaactcaagctggttttctgttctcatgtaagtgactgggatgctgtcttatgattcttctaggtcatgtttg

SEQ ID NO: 16551 - DNA, 810 bp, Homo Sapiens
gcacgaggaaatcctctgttttaaaaatgaatcttaagctctctcggagggtccaccaggccgtgcacctctattcccagtgacaaatgacaccccttccaggctagtctcaggatccagtaggattccctttgctgatctgtgcctttgacctctgctctgccacttctgttttacctgcaaggggcatgacatacagggtagtaattatgaagttctcccaggcagttccaccaaagtcccacattgtacaagggaaggcatacacagttttaactacctagccaggggcagctggcctttccccaggccctttaaaacacctgtttgaccaccctgtgggtcctttcccgtcggggttccagcttgagtcctgctggtagcccttggcacaaggcctggtaggcagcctggtgctgccatgtaccaaactctgctggggaaacctcagccacagcagatgcaaacccattaggtatagcatggttcaagatatttttgcttgtttcaataacacttttgttcttgattttaagggctattttaaaaactgctttaaaatatttttgaaagtataaagaggtgaataaaacatactcctgttccactgtgcaaagatagtcactgttaatgtttctttccagtcgttttctatgcatagtttagccatgacttctcatgggggacaaacccactggtttaattcacccccaatgtccaggtttttataggtcagcctagagttctcaagccccattcacaaagcagagccaggactcaaatttcacaccctggtgactgagctgtttc

SEQ ID NO: 16552 - DNA, 1129 bp, Homo Sapiens
  misc_feature (728)..(788): n is a, c, g, or t
gcacgagggagtttggaaaccccaacaggcctgtggccagcacccggctgccctcggacactgatgacagtgatgcgtctgaggacccagggcctggcgccgagcgcggaggagccagcagcagctgctgtgaagaggagcagacgcagggacggggggctgaggccagggccccggctgaggtttggaaaggaatcaagaaacggcagagagactgagggttgcagacacatatatttttgaggctgggtgacgagaaaatctagagacatgagggacataaatgggcctggcagcctcggctctttgcggctgctggcaggactgagctgtccgggttctccccacacttccagcacagctgtgctctgtgtcctgcctcggcgctctcgcaaatgaagctgcaggccaagaagccccttgtgagtctgtttttcacactgggcctggagaagagttggggcgaactctcggctctgcctggaagggtcgtggagcaggtctcaggtggccacggatatgtgcgtgaaggacagctgaccagttggcacggagcccttcacactgaccaccagccttgggtgacgtccctggcctcagagtgacctcaggggaacctttccccggcctgggagccccgtggggactggagacctatgcggttcttgactcacctgccctttgcatcccctctgtgggtggaggctctggaccatccacccagtggnnnnnnnnnnnnnnnnnnnnnnnnnnnnnnnnnnnnnnnnnnnnnnnnnnnnnnnnnnnnncgttgtgcagagagcacagccactcactgagtccctggagaccagctgcgcaccgcccacccagggccggggagcccaaggaagcgggcagggaggcccaccaggtggtcaagcccgctctggcctgcactgtgtcctgggcagctgctggccaagtcctgccaagttggccacccagatgtggggttgggtgcaggggttcacagcacacaccagacagacacggccagggcggtaggcgccgcggggccagccacgacacacacgtcacagcacaggaggggcgccgtgggccctggttgcacaaagctggccacagtgagctggaggatgcctcgtgc

SEQ ID NO: 16553 - DNA, 1152 bp, Homo Sapiens
gcacgaggagtgggtcctctcctggaagtcgaagctgccgctgcagaccatcatgaggctgctgcaggtgctggttccgcaggtggagaagatctgcatcgacaagggcctgacggatgagtctgagatcctgcggttcctgcagcatggcaccctggtggggctgctgcccgtgccccaccccatcctcatccgcaagtaccaggccaactcgggcactgccatgtggttccgcacctacatgtggggcgtcatctatctgaggaatgtggacccccctgtctggtacgacaccgacgtgaagctgtttgagatacagcgggtgtgaggatgaagccgacgaggggctcagtctaggggaaggcagggccttggtccctgaggcttcccccatccaccattctgagctttaaattaccacgatcagggcctggaacaggcagagtggccctgagtgtcatgccctagagacccctgtggccaggacaatgtgaactggctcagatccccctcaacccctaggctggactcacaggagcctcatctctggggctatgcccccaccagagaccactgcccccaacactcggactccctctttaagacctggctcagtgctggcccctcagtgcccacccactcctgtgctacccagccccagaggcagaagccaatgggtcactgtgccctaaggggtttgaccagggaaccacgggctgtcccttgaggtgcctggacagggtaagggggtgcttccagcctcctaacccaaagccagctgttccaggctccaggggaaaaaggtgtggccaggctgctcctcgaggaggctgggagctggccgactgcaaaagccagactggggcacctcccgtatccttggggcatggtgtggggtggtgagggtctcctgctatattctcctggatccgtggaaatagcctggctccctcttacccagtaatgaggggcagggaagggaactgggaggcagccgtttagtcctccctgccctgcccactgcctggatggggcgatgccacccctcatccttcacccagctctggcctctgggtcccaccacccagccccccgtgtcagaacaatctttgctctgtacaatcggcctctttacaataaaacctcctgctc

SEQ ID NO: 16554 - DNA, 474 bp, Homo Sapiens
gcacgaggtaccttttagccctatgaagatgccattctccagcaaggcaccctatttctctatgccaactctgtaatgattatctttccaccaggaggaacaatgtggaaagtccactttgtgacgcctgtgttccagccagagggagccggtgcctgctatggaagaaaggtctgcccgtgctttggggaaaaagtagtccaccacgatccacctttgctctttgacctctcaagagacccttctgagacccacatcctcacaccagcctcagagcccgtgttctatcaggtgatggaacgagtccagcaggcggtgtgggaacaccagcggacactcagcccagttcctctgcagctggacaggctgggcaatatctggagaccgtggctgcagccctgctgtggcccgttccccctctgctggtgccttagggaagatgacccacaataaatgtctgcagtgaaaagctgg

SEQ ID NO: 16555 - DNA, 1480 bp, Homo Sapiens
  misc_feature (137)..(193): n is a, c, g, or t
  misc_feature (212)..(274): n is a, c, g, or t
  misc_feature (317)..(635): n is a, c, g, or t
  misc_feature (1055)..(1079): n is a, c, g, or t
gcacgagggcaatcactatagtagaaggatatagaaatgaaaacggtcgatttcccatgcccaagagtttataacttggttctagtcatggccaccatttatttagcatgtactatgggcaaggcaccacagaggcnnnnnnnnnnnnnnnnnnnnnnnnnnnnnnnnnnnnnnnnnnnnnnnnnnnnnnnnnctttgagatagagtctcgnnnnnnnnnnnnnnnnnnnnnnnnnnnnnnnnnnnnnnnnnnnnnnnnnnnnnnnnnnnnnnngttcaagcgattctcctgcctcagggacgcacctccttgcccnnnnnnnnnnnnnnnnnnnnnnnnnnnnnnnnnnnnnnnnnnnnnnnnnnnnnnnnnnnnnnnnnnnnnnnnnnnnnnnnnnnnnnnnnnnnnnnnnnnnnnnnnnnnnnnnnnnnnnnnnnnnnnnnnnnnnnnnnnnnnnnnnnnnnnnnnnnnnnnnnnnnnnnnnnnnnnnnnnnnnnnnnnnnnnnnnnnnnnnnnnnnnnnnnnnnnnnnnnnnnnnnnnnnnnnnnnnnnnnnnnnnnnnnnnnnnnnnnnnnnnnnnnnnnnnnnnnnnnnnnnnnnnnnnnnnnnnnnnnnnnnnnnnnnnnnnnnnnnntcgaagcctgtcaagataaaatgatgtattcaaatgcttagtagatgcattgcagaggggaatcaaacctaggcctggtaataacaatagtaaccaatctgtatttcccacttatgagcctgggggcattacctgtgttatctcactcatttccaagattgggtattattttattcccattttgcagatgaagaaacaggagtagagaagttaagtaagatcacacacttgaaccctggtagtcttggccccagaggctaaaaatcttaacaactatactgataacactcaatgcttcaaacatttgatatgtcaacaaacaaactagaaaacttgagcctgggaggttgaggctgccgtgagctgtgaccatgccactgtacttccgagcctaggtaacacagcaagaccctgcctccnnnnnnnnnnnnnnnnnnnnnnnnnttaaacgctatttgtaatgaaatttggtttcttgtatttttctgtctctgataaagctgggctgtaacgtgacacattgtcaatagatgccatttctaacaaataacaagtatcctgttttgagaatttgtttcaggctactaatgacttcaagaacatcagaataatacaatagaaagaatttggaatttggaatcaaaagactgattcttctgaaccagctctactacttgttggctttgtgacatttggtaaattactcaaccctgcctgagcctcaatttcttaatttggaaaaagaatgtcctcctagggttcccccctttttccttctttctttcatctcttcaatgagatagtgtgaaagtagtttgtaaatgattaaagggctatgtgacagt

SEQ ID NO: 16556 - DNA, 1708 bp, Homo Sapiens
  misc_feature (348)..(356): n is a, c, g, or t
  misc_feature (358)..(419): n is a, c, g, or t
  misc_feature (1258)..(1271): n is a, c, g, or t
gaggctgggaaagccgggtctctggggacgtgcttcctatgggtttcagctggcccaagcccctcccgaatctctctgctagtggtgggtggaagagggtgaggtggggtataggagaagaatgacagcttcctgagaggtttcacccaagttccaagtgagaagcaggtgtagtccctggcattctgtctgtatccaaaccagagcccagccatccctccggtatcggggtgggtcagaaaaagtctcacctcaatttgccgacagtgtcacctgcttgccttaggaatggtcatccttaacctgcgtgccagatttagactcgtctttaggcaaaacctacagcgnnnnnnnnntnnnnnnnnnnnnnnnnnnnnnnnnnnnnnnnnnnnnnnnnnnnnnnnnnnnnnnnnnnnnnngcgctccctgggcaacgcttcagatgcgttgaagttggggaccacggtgcctgggccaggtcagcagagctgcctcgtaaatgctggggtatcgtcatgtggagatggggaggtgaatgcaacccccacagcaggccaaaaccttggcctccatcgccacagctgtctacatctagggccccaaaactccattcctgagccatgtgaactcatagacaccttctataattttctggtagtcacgatggaaacaaacaaaacaccttagaaccagagatcgaccccctcaagcaatacatcaattcccttcacaagaaacgtcggggctacatgagtatctgtgttgaatgcggtctgaaatgatcctatgggattttcccggctggttgccactgctgtacaacattcagtgcccacatccacctgtgccattaagcttttttgagacatgagagatgcctcttccctgctgtatgacatgcatttgggaagttggaaagaaatgacaaaatcagggagaaaacatccaagcttcttacctgtagatagaatcagccctcacttggtgcttattaccagttattcaagaacaataacaacaacaaaattagtagacatccaagaagcacatattaggaccaaagatagcatcaactgtatttgaaggaactgtagtttgcgcattttatgacatttttataaagtactgtaattctttcattgaggggctatgtgatggagacagactaactcattttgttatttgcattaaaattattttgggtctctgttcaaatgagtttggagaatgcttgacttgttggtctgtgtgaatgtgnnnnnnnnnnnnnncctgaatacaggaacatcggagacctattcactcccacacactctgctatagtttgcgtgcttttgtggacacccctcatgaacaggctggcgctctaggacgctctgtgttcactgatgatgaagaaacctagaactccaagcctgtttgtaaacacactaaacacagtggcctagatagaaactgtatcgtagtttaaaatctgcctcgcgggatgttacttaactcgctaatagtttaaaggttacttacaatagagcaagttggacaattttgtggtgttggggaaatgttagggcaggcctagaggttcattttgaatcttggtttgtgactttaggtagttagaaactttctactaaatgtacctttaaatagtccattttctatgttttgtataatctgaaactgtacatggaaaataagtttataccag

SEQ ID NO: 16557 - DNA, 1395 bp, Homo Sapiens
gcacgaggaatacaagagtaggataaggtggaaatgtaatggcctgagggatggtgaagcattcttttagtatttttcatcatgttgggctcctagattgtactggggttgcccataaatcaaaccccatactcttagaattcattatattatggtgatatccgaacctagtgaatggtatgcttgggtgttttccattgagagcggatggacctctttataaagttggttgctgcaaaatccagttcttccaaaagccactttatttagggtttattcacaagtcatatccattttggtacagtgtttgtttcctaatatttattaaccaccttataccaaatgtcttgcaaagaaatgttattaaaaccttgaatttttacaaatgtaaaaaacaaaaagtgtattaatgtatttgttcaggaaaagctacataccgaagggcttttgtatatgaattctgtggtggggagacccatttgtaatctatatggcagttccatctgggttttaagtttagatttcaccgtgtcttagtgcttcattctattggtttattggaacatgtaataaataggagtagtgatgtattaaaacacaagtattcattaatgttttatatcttcactaaaattctatagttatgaaactattttatcaatcaaggtgttatatttcagtcagaagtgaaaatttatgaagagtatttggaagtgtgtacagaaataaactagacttacaggtaggctagatcagaacgttaacatatgaacctgcagaaatctggtaagacttaaattcagtgtgaggaataactctagttctctcctatgagcatttcctaaaagccatctgatttggcattcttactggagctgcagacagaaatctacaaagacaaaagtaaacaaaattaagttattattccactgttaggaatggaaataaacttgtgaagtctgtttattttgaagtattggtgaactaggcttgctaattgataactgcagcagtttgtgtttactccagttcatcagcttaggtcatttgaaagatataagagcttaaggcaagaaagaaataacatggaattctatttgaaggacaacagaacattcttggaaaagcagctccagttggtttttcaactgtcaaacttgaatgtgtaagtccccacagagcatggacagtcggtgcagagttccaaggaaacaattattgcctgatgaccacttccattttgtatacactctttggttcgtataggccatattccaactggctttttagtaatagaaatccagtatataatgtatcaaatacaattgaggttctaacctagtgtgttaatttatctgaatttggatttttaaaaagtaataaaaagttaaatgt

SEQ ID NO: 16558 - DNA, 896 bp, Homo Sapiens
  misc_feature (615)..(623): n is a, c, g, or t
  misc_feature (687)..(718): n is a, c, g, or t
aattttaaattttattaaagtacagagttaacaagttttgagttttttatataggaaaagcctagtcaattcagatgctttctagaaaaattaacattaaaaaacaaatagaaatccatgactaaagggggaaaataactttcaaaagttaccaaaattcgaatcatatcagagaccattataaatttcaaacagtagatttaccacacatattgcattttcaaattctaatgtagcaaaacgtaaccacataatttggctacagctaatcgtttcagaaaagtttaaaaaattagcaaagttatatctataaaacttttgtagttttctttttgcaaagtaaaaaggcttaaatctttaataaaggaaaacaaaacaatcctcttaaatttcttataaatagctctccagacatatattacaaatctgctgtaagctttctttacctgagagaacttcccaggatcctttatcccaaaggattaccttaaagagttcttccatcattttactcatgtgaatatgattaaactcctatagaagtggattgggacatatgcattcttaatctgcccttccccatttgtttctttctgaaaggattttgcttaaggnnnnnnnnngctctttggtaaaggccaaatatttcaacctttcaaaatgactgcctctgtgaaagagttgttnnnnnnnnnnnnnnnnnnnnnnnnnnnnnnnnaaggtctaaacatctgtgtgaacagctctccagtactgtgaagtcaaagggcccaacattacagagcgcacctctgcctgaaatacaaaactaagtttaactagcaagttacaggcaaatagccttcagtaaattccacaagcccaagtggctactgcattgtccctgaagaaggagg

SEQ ID NO: 16559 - DNA, 909 bp, Homo Sapiens
cgcacgaggtttagatccgtgagtgctgcccatggagctgggccattcctcctgagatacaggacaggacgcctcaactctgcttctttgggctctcccagacctacccaggccaccgtgcccagcctacccgtgctttcaaaggtcctgtatttccaccactttgtcaccacagacagccagaaggtcaagcagctggcctccaccttgcttccttctggtgcgcatatataggagcctgattagcatgtagaatcctagcagaatgggagtctttgaaataggtttcagctcaccagcctctagttacaggaggcattctagaaggacatgagtggattataactgccaaccaattgtatgtgccactgaggagatggagaagctgtgtccagagcggtgctataaggacaggagtgtgacacaggaaggcttaggtacgtggcctgggcccagtctcacatctcagggtcctgcttcagtgggagcagttgagatctgtgacactcagcacctgggaggccgggtcagtgaagggagggagacagaactcagctcctctgagaggagaagtttacacagcacctggggccctccatttgggagtcacagtggaaaggagtcttggctgagctttggggcaggtgcaccttattttctttgcggtctgggatgccctcagagctgtgctcctctgctttgtccccatctgcctctggccctgggtaggaggcacttggagcatactttgtcttccttcagcagaggtgtgggcagggaatctacttgtctcttgttttcctttaagccgttgtgaaaatcaagtatgtgactcttccttggaaaaaataatctctcagaaaaggacttctaatacatcctcagggtagaatgtgtttccgtgattac

SEQ ID NO: 16560 - DNA, 702 bp, Homo Sapiens
gcacgaggatcaattttaattctagcacctgaagctatacaagggtatgctctataaacttcatgggactgttgtacacacttgataaagtgacaactgtgcaataccacttagcatctcaaaatcaggaacatactattgaattgcttaaacacaatccacagaattaaaaacaaaatcagatgccatccacagttatactaattatccattaaaagcttacacttaatacttgaaataacaatcaatatctagcagggaatactgaaagtgatttcagagtctcatcctgttgtactctattgggaaggtttcttgagtagttatgtgactggccaaagatgggtacaaccaagaccagaccagcaagtaaaagttctaccacagtttctgtagtttccacttgtttttctttgtcagttaaaagtgaacagtgagaattaaatacttatctttacatatacacaaggtatgctatgaaagcatatctgcttacaaacatataaaaatacttgttaactagtttgataagaaaataatgtataaaagtatatagcaaaaacattaatcatctctgaccctggaaagatcaattccatattttatattacaaacaaaaacagttttagttttttgaatcccttacccagaaatacttgaaaaggaagacagaaggaaattattcctttttacccctcgtgc

SEQ ID NO: 16561 - DNA, 1272 bp, Homo Sapiens
gcacgagggtttgtttggtggggtcacacgcgggttcaacatgcgtatcgaaaagtgttatttctgttcggggcccatctatcctggacacggcatgatgttcgtccgcaacgattgcaaggtgttcagattttgcaaatctaaatgtcataaaaactttaaaaagaagcgcaatcctcgcaaagttaggtggaccaaagcattccggaaagcagctggtaaagaggcttacagtggataattcatttgaatttgaaaaacgtagaaatgaacctatcaaataccagcgagagctatggaataaaactattgatgcgatgaagagagttgaagaaatcaaacagaagcgccaagctaaatttataatgaacagattgaagaaaaataaagagctacagaaagttcaggatatcaaagaagtcaagcaaaacatccatcttatccgagcccctcttgcaggcaaagggaaacagttggaagagaaaatggtacagcagttacaagaggatgtggacatggaagatgctccttaaaaatctctgtaaccatttcttttatgtacatttgaaaatgccctttggatacttggaactgctaaattattttattttttacataaggtcacttaaatgaaaagcgattaaaagacatctttcctgcattgccatctacataatatcagatattacggatgttagattgcatctcagtgttaaatctttactgatagatgtacttaagtaaatcatgaaaattctacttgtaactatagaagtgaattgtggacgtaaaatggttgtgctatttggataatggcactaggcagcatttgtatagtaactaatggcaaaaattcatggctagtgatgtataaaataaaatattctttgcagtaaaatattccctttgttaatgttatagaaggggggatacaaaaaggaactaacaatttgtatggcagtgtcagatatttttattttagtatttcctgttttggtttatttgcatcttagaagagcataatgacattgtttgatgaagcctaattatgctggactgttttgacctggtttaacccttctgataggtagttgtggatgctggggatgagaactgaataatctttgcctggagtgacactacactctagaatttccactttggagaatctcagttccaacctgtgatcctgatagaacagactttacttttcagcccagcattgatctagaagcagaggaatccagcgcctttaaagtggttatgtggttt

SEQ ID NO: 16562 - DNA, 1252 bp, Homo Sapiens
  misc_feature (832)..(889): n is a, c, g, or t
gcacgaggataaaaggcctggaaaacattctccaaaaagaagctgcaacatgtgtggacaatgggcttttcatgcctctcttactgtctcttactgtctattgacctggtgcaagaaacatgctctggtgatggctgtgagggaggaatgaggatagacatagacactcctgtgtctcaaacatgcttctttattactctgttatgactctgtcttccctggggcaggaccccagcctgcctacatttgcagacagacacagtggcatgtggagacaacagtgtgtcccaaagacttttctttaccccctagctgtcggcagtactcagtggaagggtgatattatgacactgacactgctattttgaaacctggaggatggaaaggtgcaaaaatctatcaccagcaacagaaggtgcagactgtgttggtggcggtaattttgtccatcaaatgaatatgtgtgaaaacattccctcctttggccctacaggtcagaatggcggcagtggagcatcgtcattcttcaggattgccctactggccctacctcacagctgaaactttaaaaaacaggatgggccaccagccacctcctccaactcaacaacattctataattgataactccctgagcctcaagacaccttccgagcgtctgctctatccccttccaccctcagcggttgataatctcaagacacctcctgagtgtcagctcactccccttccaccctcagctccaccctcagcggatgataatatcaagacacctgccgagcgtctgcgggggccccttccaccctcagccgatgataatctcaagacaccnnnnnnnnnnnnnnnnnnnnnnnnnnnnnnnnnnnnnnnnnnnnnnnnnnnnnnnnnngcggctgagatggaaccacctcccgaacccaagaggcggagggtcggtgacgtggaaccgtcacgcaaacccaagaggcggagggccgctgacgtggaaccatcatcacccgaacccaagaggcggagggtcggtgatgtggaaccgtcacgcaaacccaagaggcggagggccgctgacgtggaaccatcatcacccgaacccaagaggcggagggtcggtgacgtggaaccgtcacgcaaacccaagaggcggagggccgctgacgtggaaccatcattacccgaacccaagaggcggaggttgagctgagaagaggccagtgcactcaagcctgagcaataagaataaaaccgagtagaa

SEQ ID NO: 16563 - DNA, 412 bp, Homo Sapiens
  misc_feature (211)..(231): n is a, c, g, or t
  misc_feature (254)..(305): n is a, c, g, or t
gcaaagagtaaaggtcaaatttatttaatacaacatccacgagggtccctgcagctgtgtcactgaggcaaacaggaaaagtgattttggctaggcgtggttctcatctgtgaaattccacagcgcaatgacagcaacctctctcccacccactcaagacactgtcaggaatgtcttaagacctcaggagaccacttctttagcaagcaannnnnnnnnnnnnnnnnnnnngagatggattctcactctgtcannnnnnnnnnnnnnnnnnnnnnnnnnnnnnnnnnnnnnnnnnnnnnnnnnnntgggttcaagcgataatctcacctcagcctcttgagtagctgatactacaggcatgcgccaccacgcccggctaattcttgtatttttagtaaagacagggtttcat

SEQ ID NO: 16564 - DNA, 172 bp, Homo Sapiens
aaaatcccccgggctgcaggaattcggcacgaggcttctctcttctctcgtctgagcccccaggccttttccactttgagggaggtgcttcgaagaatgttgcccacacctaagtgttagaagcctatgtccgttcatccctgagaggtctgaaagaataaaaataaattct

SEQ ID NO: 16565 - DNA, 2022 bp, Homo Sapiens
gcacgaggcccaagctggcatctggggagactgtggccgctttctgtctaaccgagccctcaagcgggtcagatgcagcctccatccgaacctctgctgtgcccagcccctgtggaaaatactataccctcaatggaagcaagctttggatcaggcaacctgcctcccatttctccccttctcctccgcccaattccaggccccactgctccccgtcctccacgccctgaatatcccattcttccacagtaatgggggcctagcagacatcttcacggtctttgccaagacaccagttacagatccagccacaggagccgtgaaggagaagatcacagcttttgtggtggagaggggcttcgggggcattacccagtgagtgaatttgggttgggggagcttaggactgaggggcaggactgggctcctgggcagatggctgttgcaagtcaccctggggacgtgtgcaaaagccaaagcaggtggactgaatgtggcctttgggactaatatgtatgcaactgagctaaagttttggctccagcaaccaagtccaacacaaaataggacatagccaggcctccttagccctcagggcctgaggggaagtggtggctgtagcctctaatagtctagtggtcgtcattcctccctggtgcataaggagcgaaggagcagtttttcccccagtgacaacctgttgaacacacctctgctttccacactgccctgacacagtgggccccctgagaagaagatgggcatcaaggcttcaaacacagcagaggtgttctttgatggagtacgggtgccatcggagaacgtgctgggtgagaggcatcattgctaaggcggtgagtaccctgcccgagtccctaggtaacccaaacagaagtctcactgtcccccttgccatgtgtccctgatcacttgcaggcactccctacactataaactcctcccctaccagcagcccgacttgctatcttaagtctccatccagcgtagactgaactctggttgtatgcaaaacccatccctctggcgcaagcccagcccctctcctagggagactgcagaaccacactgaaccacagcgggatgtgtggaccctcttccaggtagatcatgccactaatcgtacccagtttggggagaaaattcacaactttgggctgatccaggagaagctggcacggatggttatgctgcagtatgtaactgagtccatggcttacatggtgagtgctaacatggaccagggagccacggacttccagatagaggccgccatcagcaaaatctttggctcggaggcagcctgtgaaggtgacagatgaatgcatccacatcatggggggtatgggcttcatgaaggtacaggacggtcttctgcagagcctcggctgggccaggggtgggtatgcacatctcatcacgggcatataatttgtgtggccctgtgctaggaacctggagtagagcgtgtgctccgagatcttcgcatcttccggatctttgaggggacaaatgacattcttcggctgtttgtggctctgcagggctgtatggtaagacagagaattgggtgggggtagaggtggggaggacagtgagtcctgactgctggaccctcttcccccataggacaaaggaaaggagctctctgggcttggcagtgctctaaagaatccctttgggaatgctggcctcctgctaggagaggcaggcaaacagctgaggcggtaggcttagggccagagccaggggagggcagggtggtgtatggcaactaaccagtcattctccctcttcctctcaggcgggcagggctgggcagcggcctgagtctcagcggacttgtccacccggagttgagtcggagtggcgagctggcagtacgggctctggagcagtttgccactgtggtggaggccaagctgataaaacacaagaaggggattgtcagtaagtgagctctacaccattccgcccctccctttcctctccttgaaactaatg

SEQ ID NO: 16566 - DNA, 888 bp, Homo Sapiens
gcacgaggcgaggacggaggccacgatacctgcgtggctggggctgcgggctccggggtcaccaccctgggcgacccggaggtggcgcctccgccggccgcagctggagaggagcgtgtccccaagccgggggagcaggacttgagcaggcacgcggggtcaccgccgggcagcgtggaggagccatctcctggaggagaaaactcacctggtggcggaggctccccttgtttgtcctcccggagcctggcgtggggttcttctgcgggaagagagagtgcgcgcggagatagcagtgtggaaacgcgcgaggagtcggagggcacgggcggccagcgctcagcctgcgccatgggtggtcccgggaccaagagcggggagcctttgtgtcctccgttactgtgtaatcaggacaaagaaaccttgactctgctcattcaggtgcctcggatccagccgcaaagtcttcaaggagatttgaatcccctctggtacaaattacgcttctccgcacaagacttagtttattccttctttttgcaatttgctccagagaataaattgagtaccacagaacctgtgattagcatttcttcaaacaatgcagtgatagaactggcaaaatctccagagagccatggacattggagagagtggtattatggtgtaaacaacgattctttggaggaaaggttatttgtcaatgaagaaaatgttaatgagtttcttgaagaggtcctgagctctccattcaaacagtctatgtccttgaccccaccattaattgaagttcttcaagttactgataataagattcaaattaatgcaaagttgcaagaatgtagtaactctgatcagctaccaggaaaggaggaaagagtaaatgaa

SEQ ID NO: 16567 - DNA, 149 bp, Homo Sapiens
caggcaccattttttataaaaacgcatagtctcatttttcactctttaaaatcacattcaaaaatcggcaaagaaacgccccggggaatgagtagacgggaggggagggtgcgccaacccagccccgggggggagaaggcgcctcgtgc

SEQ ID NO: 16568 - DNA, 349 bp, Homo Sapiens
  misc_feature (42)..(55): n is a, c, g, or t
gcacgaggatcatgccagggcaacagaatgagactttgtttnnnnnnnnnnnnnngtgacttgatttaagggaaaaaatgactggctatattcagtcagatatggcaaaaagtctcaaggtgttaatgtgaatgattaaggtcttggggggggtgtcccctatcagactacaggtgtttagaggcacagaaaaaggtgcagttgggttcttaatgtgaaatgatgagaagcacaactccagtgtgtctctttgtgtagaatgtcagcagacaccccctgctagatgtgctggatcatgggaaagcatttccatttgttactagattgttcagaagttttaatttatgat

SEQ ID NO: 16569 - DNA, 632 bp, Homo Sapiens
gcacgaggtgtgactgtaattgaaactggggtactagaacttggggctgaagtgtgagccagtgtttattataaagacatttctttttccctctcaattccaaggcattggaaaaagagaggaacaagcagaagatgcctgcaggtatcactttgatcctatgtgggagcgactgaaaatagaatgagcttggttaagcacctctcctttgcccttcaccctgactcctgtcactgtctccatccccaaataaagctgaaatatttttttaagttagctgccgagaaaacattttgcatgaaggataaagttctgttaaaatacatccttaaaaaaagtttttcctatgcattgcctatgctttaaatcaacaaactcttcatttctaaactatgatctcatatttttctaatttctttgccaaaaataattgccatgttttgtcatagaacatgaaattcatttaccttgatttttaagaacagaccagtgtagaaatgttccttttgacttatagcagtataaaagtttaatgtacagtgaaagagactatgaacagacatagatttatcttattccttgagcgctaaaaactttaataaaaaaaactgcactaattttttacagcaatg

SEQ ID NO: 16570 - DNA, 773 bp, Homo Sapiens
gcacgaggatttccctgatctttttctaccaccctgaggggtggtgggaattatcattttgctacattttagaggtcatccaggatttttgaaactttacattctttacggttaagcaagatgtacagctcagtcaaagacactaaattcttcttagaaaaatagtgctaaggagtatagcagatgacctatatgtgtgttggctgggagaatatcatcttaaagtgagagtgatgttgtggagacagttgaaatgtcaatgctagagcctctgtggtgtgaatgggcacgttaggttgttgcattagaaagtgactgtttctgacagaaatttgtagctttgtgcaaactcacccaccatctacctcaataaaatatagagaaaagaaaaatagagcagtttgagttctatgaggtatgcaggcccagagagacataagtatgttcctttagtcttgcttcctgtgtgccacactgcccctccacaaccatagctgggggcaattgtttaaagtcattttgttcccgactagctgccttgcacattatcttcattttcctggaatttgatacagagagcaatttatagccaattgatagcttatgctgtttcaatgtaaattcgtggtaaataacttaggaactgcctcttctttttctttgaaaacctacttataactgttgctaataagaatgtgtattgttcaggacaacttgtctccatacagttgggttgtaaccctcatgcttggcccaataaactctctacttat

SEQ ID NO: 16571 - DNA, 987 bp, Homo Sapiens
gcacgagggccaatttatttttctacccaatccagtatcaacgatatacaaaaggatataaacagactatcatgaatatttacaggatgacacaccaaacaattaccaaggaacaaatcctgcaaagtaacaaattgttgcttatccatgtccactcaactgtacaaggtttatttctaggacaatttcccagttctctgggaaggaagttctgtggatttataccttccataagggtcaagcaaacatgctaagagctgataccatcatgtttttatactaacagccgagaaaggcttttaaagaacactctctttcaggccaatgttacagcattagtgggctcatagacaggatgtgacttcatcaaaggaaatgcttctctcctcttggtctccctaaggtcctcctcctagtacacaggaggagttccccataataacaccctggttccaacagatggtgtgtagattatcaacacacaatgagaaaaagaaactgacccccttacctaccaaatacaatacagatctggggaggcagtttccagatcttcaacaggcagacactatgtggcctgtatttagtacacagcacattctcttaagagaaaacaggaatgaacattctcagaaacattcacattgctcatcaaatgtagctttacccaaagtatataggaaatggcaaaaacctaacctagctggacattttatacaagtaagtcaaagttcaaaggaatcatcctatctttattctcagaaatccaatgttgaatatcacagttcttctttaatggaagcagaagattcagagtccttgtctcccaaaatgcctcagccagggtcagcacagagagtggaatataaaagcttaattgtgttatacatggaagacacagttctcagtcaacctagccacaattttctgtctggccatctgtaagaaatgactacgtttgaaattcaactttcacattcaaaaaaa

SEQ ID NO: 16572 - DNA, 1330 bp, Homo Sapiens
  misc_feature (293)..(305): n is a, c, g, or t
cacccacgcgtccgaaaacacttaaactttgttaggactccgatgagtttgggacttcaggaaaaatcaacccagcaccagcagctaccaaccaccattccatctcttcacttgaacagcattagttaagtccagatgtgggaacccttctcttggaagaagttcctaattgtgtctcagaccggtgtaaacaaaccagccagccgccaccttgctaaacctataagctttttaaaatccaatatattctgccaagaatatgccttgatagttagccctcagcccataggtgnnnnnnnnnnnnnaacagaattatatatgtctgggggtgaaaaaacccttgcattccaaaggtccatactggttacttggtttcattgccaccacttagtggatgttcagtttagaaccattttgtctgctccctctggaagccttgcgcagagcttactttgtaattgttggagaataactgctgaatttttagctgttttgagttgattcgcaccactgcaccacaactcaatatgaaaactatttaacttatttattatcttgtgaaaagtatacaatgaaaattttgttcatactgtatttatcaagtatgatgaaaagcaatagatatatattcttttattatgttaaattatgattgccattattaatcggcaaaatgtggagtgtatgttcttttcacagtaatatatgccttttgtaacttcacttggttattttattgtaaatgagtacaaaattcttaatttaagagattgtatgtaatatttatttcattaatttctttccttgtttacgtaaattttgaaagattgcatgatttcttgacagaaatcgatcttgatgctgtggaagtagtttgaggaacatcctatgagttttcttagaatgtataaaggttgtagcccatccaacttcaaagaaaaaaatgaccacatactttgcaatcaggctgaaatgtggcatgcttttctaattccaactttataaactagcaaaaaagtgtttgctcattccaccagttctactgtgacatactcgagtataaagacatgtagcaataacggggagtggggggggagtctcacagtgcctttggaagggcccgaacttgccttaaatcttcctcaaccaaataagtattttattagtgcttgagagaatctgaatgtaggatgggttcaactgcacaaaaggaaaagatttttaccactttttttatatagatataaagtgaagcaaccgccttagtgctgaaatatgtagtacatgaatatgccttgtttaattacagaaaattccaaaacttgtacta

SEQ ID NO: 16573 - DNA, 138 bp, Homo Sapiens
cactgaatgcataaagtcctttattgaaaatattgggatagcactgcattacatatagtcaatatccataaatgaagggtcacacatttctgaatggacaatactgttttacatagagaacacagcatctcctcgtgc

SEQ ID NO: 16574 - DNA, 126 bp, Homo Sapiens
gcacgaggctcgtaccagccaggatcccaagcgtcccgtcccttggaaagttcagccagaatcttcgtcctgcccccgacagcccagcctagcccacttgtcatccataaagcaagctcaaccttg

SEQ ID NO: 16575 - DNA, 664 bp, Homo Sapiens
gcacgaggcaggattcaaaggcaaatccaagcccaaccttctgaagcaggagaccagcagcctggcctgtgggctgcgcattctcttccggatgtacatggatgagagccgcgttagtgcctgggaggaggtccagcagaggcttttgaatgtctgcagtgaagcactaagttacttcctcactctaacatcagaaagtcatcgagaagcctggactaacttactgcttttgtttctaactaaagttctaaagataagtgataataggatgtcctgttgtcccagcattatttgtagagaagactatcttttctccatcataatactgcctttggtcctttgtcagtactgcctttggtcctctgtcagagatcagctgactgtatttgcaccaaacggaccctgtgagcatggggctgccagtgaaaggaggatgcctgggaatgaaatcaatagaagagatgcagaaagcctacggaaaaacagcgtgctgatactatttgacacagcaatgattatttcttacctttggcaccttcctgcatttttattctgttcagcctcttctgctgctctcttagcagggcttgctgctgaatctctaaggtgtgatgatctcttggaggatccaggtacataaatttcagatcaactcgtgtttctg

SEQ ID NO: 16576 - DNA, 3349 bp, Homo Sapiens
  misc_feature (3007)..(3023): n is a, c, g, or t
gcacgaggggggaaggggttggagggggctgttgatcgccgcgtttaagttgcgctcggggcggccatgtcggccggcgaggtcgagcgcctagtgtcggagctgagcggcgggaccggaggggatgaggaggaagagtggctctatggcgatgaaaatgaagttgaaaggccagaagaagaaaatgccagtgctaatcctccatctggaattgaagatgaaactgctgaaaatggtgtaccaaaaccgaaagtgactgagaccgaagatgatagtgatagtgacagcgatgatgatgaagatgatgttcatgtcactataggagacattaaaacgggagcaccacagtatgggagttatggtacagcacctgtaaatcttaacatcaagacagggggaagagtttatggaactacagggacaaaagtcaaaggagtagaccttgatgcacctggaagcattaatggagttccactcttagaggtagatttggattcttttgaagataaaccatggcgtaaacctggtgctgatctttctgattattttaattatgggtttaatgaagatacctggaaagcttactgtgaaaaacaaaagaggatacgaatgggacttgaagttataccagtaacctctactacaaataaaattacggtacagcagggaagaactggaaactcagagaaagaaactgcccttccatctacaaaagctgagtttacttctcctccttctttgttcaagactgggcttccaccgagcaggagattacctggggcaattgatgttatcggtcagactataactatcagccgagtagaaggcaggcgacgggcaaatgagaacagcaacatacaggtcctttctgaaagatctgctactgaagtagacaacaattttagcaaaccacctccgtttttccctccaggagctcctcccactcaccttccacctcctccatttcttccacctcctccgactgtcagcactgctccacctctgattccaccaccgggttttcctcctccaccaggcgctccacctccatctcttataccaacaatagaaagtggacattcctctggttatgatagtcgttctgcacgtgcatttccatatggcaatgcgatgaagaacgatacagatacagggaatatgcagaaagaggttatgagcgtcacagagcaagtcgagaaaaagaagaacgacatagagaaagacgacacagggagaaagaggaaaccagacataagtcttctcgaagtaatagtagacgtcgccatgaaagtgaagaaggagatagtcacaggagacacaaacacaaaaaatctaaaagaagcaaagaaggaaaagaagcgggcagtgagcctgcccctgaacaggagagcaccgaagctacacctgcagaataggcatggttttggccttttgtgtatattagtaccagaagtagatactataaatcttgttatttttctggataatgtttaagaaatttaccttaaatcttgttctgtttgttagtatgaaaagttaactttttttccaaaataaaagagtgaatttttcatgttaagttaaaaatctttgtcttgtactatttcaaaaataaaaagacagcaatgactttatatccaagaaaggaatgtgaatgagtcacttaacagggaatctaaagagctgtgttagctgtgtacatacacagattatctgagaaaaggtcaagggttccacttgggccacagtttttttgttaatcaaacaccactctcttaagaggctgcaccacaaaaggcaacaaagggcccctctaaggcttgagattaaaactagtctttatcattactgctgtgacactcttgcttagtatattaagagactcatacatttttgatatcacaactttttgatggcttttcaatattctaaatttgggttcctggtgaaaccaaatggggtacactttcatatccaaattaataaaacctataaggcatctgggtggcctctatgaaataaattaattacccatagtgtagtttctaggaggcatgtgtacacacactcttcattgtggcacaaatttaaatcgcctcatgaccatgtctgtgagccagggtcaagctggtttggccttcttgatgcattttccaaggcccactggtggagcagcatgagtttttatacagttactaacgattgtggaaaaaaagagctttagccatttcttactaaaaacaaaacaagtttataattaattctctgagcgagcatttttagggataagcctaggaggtattcatcggtgatggtaacaaataacatggtatttgaaagaataaattactaggatcttttaaatagtgataatacaaaagtaatcttaattagtatcacatactaaaagacaactataacttctgaaaaatatttattcttgtttgatgaaagcaacgtttctcagcaatgcattttaaaaaatattttagctgtaaattaaaaatggccataatgtacccttggcagacttcagcatataccaaattttaaatttaaatcagcttgaattcagtggggtatacaaatcattttagttgttttagggctttttattgaatagaaaaaatataaacaatgttgtagagtaatgagaaatcctccacactgaaaaaaaactagtagttttaatttttttggaatcatattttctgaggtgtaactggctttcattagatgatcatacttttcctgacatttttacaatgtattctttctttaaatataaaaactgacaagataaatatagtgtttcaacttcttagcctatttgtgatttttctgttttcctctgacccatcattgattctataaaaaagtgccaggccaagaaacaatagttagagtaattcttcctttaagttctttcagcagtcttgccaagcaagcatgtatcattcctgatgtacttctaccattgacagcaagaagaatatcaccacatctnnnnnnnnnnnnnnnnncaagatacgattagtattttaattcgttgctgaagttaatgcaagtttatcttagtggtgctagattttgctacatctgaccattttaattatgttaacttctaattgagatatttcttgcctcttatttacattctcaaactcactatccattcagcttgtgttagaagaatgctaaaagtatggggagttgtagtatgggacccagaatatgtgtattattttggatttctcagaagttgaatgctacgtactacttttaatcctcacaagttaataaatacatgccttatcctcaatggggccagcttttgcatttatgaaac

SEQ ID NO: 16577 - DNA, 1228 bp, Homo Sapiens
  misc_feature (95)..(121): n is a, c, g, or t
gcacgaggctatggagatggcctaggcgatatccctgagctgagagcatcaccctgtccccgaatccttctttcctctctgttttgtttttcatnnnnnnnnnnnnnnnnnnnnnnnnnnnagtccacgacgactggctgttgaccctgttcaggcctcggtgaaggcttttggttactccccttcccaccccatcccttaattttattcttttgaagagtgcatttcaagctgccaaggtggagagagggattacagaaaggagaacaccttatttcagaaaaggtgtaccatacctgagagcaccaggaagtcgcatgagagatcacctgatacatgaacgtatgatgttccatctgcgcattgatgaataggcagcatttacaaattaactgatgtgttgctgtatatcatctctttgatgattgctcctcttctttgtatcctgtcttataatttcaacacatttgcgatactcaatgtctattctaaattaaccatgttttgtaccacaaactcattgcccatggatctgttgctgaaacaaggaagtcttaaacaagaagtggaatctttctgttatcagattgtgtctgaatcaaatgatcagaaggttggaatattacaaagtgaagataagcagttgcaaccttcagtttctaaaaaatcagaaggtgagctttccagggtcaaatttatatccaattccaacaaaataacatttagtaaaaaaccaaaaagaagaaaatatgatgaaagttatttgtcttttggatttacttacttcggaaatagagatgcacctcatgctcagtgtgtattatgtaagaaaattttatcaaatagctctttagcccctagtaagcttcgaagacatttggaaactaaacatgctgcatataaagacaaagacataagctttttcaagcaacatctcgattcacctgaaaataataaacccccaacacctaaaattgtgaatacagataatgaaagtgctacagaagcatcatacaatgtaagttaccatatagcgctgagtggagaggctcatactattggagaattgcttatcaaacctttgtgcaaaagatgtagtgatgcggatgtttgatgaacaatatagtaaaaaaatagatgcagtacagctatcaaccagtactggtgcacgtcaaattaagatctactgctgacattgaagaaaacttgttgtaaactgaaaatttgc

SEQ ID NO: 16578 - DNA, 1135 bp, Homo Sapiens
gcacgagggcccatgtctagtctggtacctttaaaccaggccatctccaacttttcaaaatgactcaaaagttgagctagccttattttaaaaactaaaagttcaaaatcagtggtgacatgaggactgatttatttaaagtgcttaagccttggttttagagtttctaagagacctagtggaatttgctattatgaaaagcatgaaaagattaagaaacctggctaaaggtcaggtgcccagcttcgaggaaaagttgggcttttagggaccgggaagcattaaaggcacagaaactttacattttgggggtcattttgttgagtaggtgaagtgagggatttgggcttgatatttggctgccccatctctatgtgggaactcaaagttaaaaacccactgtaggtaaattagaagggcagctcttgaatctgggccagtctatatcccttctgtgaagtgctaacagccaggctatctgtagcctgggtgggagcccagataatgtgagctggtaaagggtattggaaaagtgccaagaaatgccaagcttttggttcgtaaccactataaaaagtttatgaacatgtcagaggaatggatgagtgatttgtgagtcttaactagataccccggtttcttccttgttttggcttcttttcagaatgccgggagagtacatgcagggattccatctaatcaccctcagcactctttctctggtcctgctggatagatttagatttcctttctttttttagggcctcagtctgctatctcctttggtggctaccaccactcactcccttgatatcttctactcccttgccttcaccttgcttaagactgagaagggagttagattttgtcactagctcttctttttcctcactgtgtaccccaccaaacaagattagttcaagttaaaaagaacctactggaggtaaactgggagagcaagtgttggatctgggctggtccctttcccataaaattaggtccctggttgtatgttcccatagcaccccatacttcctctctcagaataatcatttcccttgtaatgctcagcatccgcatcctgcttgactgcaaacttgctgaaggtagggactgtttgtcttggacttcgctg

SEQ ID NO: 16579 - DNA, 114 bp, Homo Sapiens
ccatcttgcccaggctggccttgaactcttgggctcaagcaagcctcccacctctgcctcccaaagtccaaggattacaggtgtgagccattgcccccagccagtataacagtt

SEQ ID NO: 16580 - DNA, 805 bp, Homo Sapiens
  misc_feature (224)..(252): n is a, c, g, or t
  misc_feature (564)..(579): n is a, c, g, or t
  misc_feature (763)..(772): n is a, c, g, or t
gcacgagggtttatgttaccattaagttcctctaaaaagtttttcttcctctcttcagagccaaaataaaagtgaactacactgttcagataaggtcacaatctgatgctgtcagtttgaccgagctggttttgcttatggtcatgctgcaatttgttagaataatagggatcaagttttaaatcctcctccttcccttttttctggagtcttgagggccagannnnnnnnnnnnnnnnnnnnnnnnnnnnncctgcttgctactgttttgtggtgttgaaaagtggtttaaacctgagactaacttaaacacttccttgaccttcttgttgcctgttcatttttgtgccaaggaagtagctgccccagtgtatgtcttgccttctccgcgtcattgttggaagaggagagatgcatcgagcagtcccagctgcttttcatttattacttcttctttccaggacctgacagaagtcagggaagagtccctgggttatgtccaaacttagcacctgcaattgttgggatgtggatggatgtgtgcataagagagagagagaatannnnnnnnnnnnnnnncgtctgcgagcgcacacacatgcacaagtgcgaaggagttgcggttgctccatgttctgacttagggcaatttgattctgcacttggggtctgtctgtacagttactcatgtcattgtaatgatttcactcctaactgtgacatttttatcaaatgtgtgaataaatacataaagattggtacnnnnnnnnnnggaaaacctcgtgccgaattcctgcagcccggg

SEQ ID NO: 16581 - DNA, 1319 bp, Homo Sapiens
  misc_feature (753)..(776): n is a, c, g, or t
cctattagaaggggcgggctgcaggaattcggcacgaggattaattacagtgctattaaagaatatgtgctcctttttattatattatcagatacttatgtttaattgtacattttttaaatcctgaatatattgtgttttgttaacaaatgtaatcaggggaacccttcttacgttttgattattagcagttaaatacattttgtatacatgaagcttagattaattcccatcatcatcatctcctgtttttatatgtgtccctatgtgtttcatgcattcctctttgatcagattggaatttgagttaaaatttacctttgtacattacgtgggagagttacagactagcaagtctaattactttgccttaccttgagggtatgccacagggtcagataacacattaaacatttagttacactggattactcttccaaagctgacctcctgctaatgttcaaaggtaactgcaatccggaaagaaataatatcactgcagaaagaatgtgactctaaaaataaaccaggacctccctgtgatttgccttgcctgcagatgaccagttgactcttgtgctgtcagccctggggttgctaaggaagctgcttcagggagttgggggttagttgcccgctctcaacaggaatgcctcctctactttgtcagagatgctgaacaaatatcaaactctgtggcagtcatgctggcctcctaagaataacctgtgagtcagagttgatgcacattannnnnnnnnnnnnnnnnnnnnnnnaaggaactgctccaagggttcattatagaacaggagtgtgtacggaggacttaggtccccacatagagtggccgttctgtggcggctccaaccaattccatccctcctttcctgcggacacacacctggcccctggcccctgccctgtgtgtctggaggaggggcactggggaggctgtggagcagagagaagaggccggatacattgaggatggcacctggcaagccaggcttccttctcaaaggccagactgctttctcagtgttacttactaaagctctctttttatactgttaaaaagatatataaagttcgtataaacaggcttgagaccactttgatgtaaaagctgtcatagtagtttttctcacagtggcacaattcatttgattgatggaatattcagtgacgccatgtatgccctatcgcttttttctcatccatctttatgctataactcatactgatttaagaaatgatttctccttttggcaaagcgaccccattcaatatggttataataaaagactaatgtcaaactg

SEQ ID NO: 16582 - DNA, 1179 bp, Homo Sapiens
  misc_feature (157)..(180): n is a, c, g, or t
ccacgcgtccgctaaaactttaagtagtgttatagtaaatgctacttgctgttagagtgaataatggataatgtgagaataattttctaaacgacttctagaaactagacagttcttccttatatcctacccttttccacatttctctaatgtgggnnnnnnnnnnnnnnnnnnnnnnnngagggtagagggaatcccctccttatttcctctaaaattgtttttacttaagataccttttccctataatcttagcatgctttctgctctttctctttggaagtagcattaataagatagatgtaataggattaagatgtgtggaagatgagaaaaagaaggtttttgtagagagagtgcttatgttttgtttactcatgtttcaacttgctgtgtatgatcataaatctatgatcttgagaaaaatcctaaaacaatttaaatttagcctatgcagccaattacataaagagaaattaaggattatattcagaggagaaattaaggattatatttagagcacagaggttatacaaagaatataaccttgtttggtcaaattcttaggtaaagaaaagtaatcaatgcttgcattgctgttggagattctaaaagatgtattgaatgaagaggatgtacacatctcattgttactgcgtatttttttgcttggtattcctgcttgcattaaagctggacaatgtactgtgatgtaattacaaaatttttattccttctaacgattgaactcttcttatccctattgataaaactgtattacaattgatgagtgtggctgccagaaaataatacaaaactgggcatttagctgttccacattgtgtagtaaatgttttgattatggggatttacagtgtatattaaagtagaaatgcttttgcacttgttttcagtctcaaataataatttttgtttttaattaaggatactttaaaagcaatgacagaaaaatctaaaatatcagaattaattattgtgaactgtgtgtaaaatatcttgtgagttttatacatactttggttgtctgatgtttcctaagtataaatgtctttatagaaaatttcagtttctctgtgaagagtaggaagtgtactgtatattgaactagttctttgtgttactttgatatttaaaataatataaagttctttggtccct

SEQ ID NO: 16583 - DNA, 740 bp, Homo Sapiens
gtgtgagccaccacacccggcctcagggcaattttgcataatagaaattcaagaaagactttaggaaatcagtacccccttctatgatgctgagaagtcaagatattagcttgatataaaagctagatattagcttgatataaaagactcagttctaatcaattagacatttgaaatgtcttagacaattgaaatcaattaggcaattgaaaatatgcacattaagagtcatggataattagaaatacacattaagagtcccaagagaaggactctgggtttccagcatccctttctataatgtaaaaggggtagaatataggtttaaagggagagaccatgaacattggaattttgcacattcatagtcccagggaaaggtaacataggtaattaatatcccttgctgtaaaacaaggaggataaaatggatctgatctgaaagacattgttgtgatcagttgccatggttcacattaactatcctagtgcaaaggtcttgactagaggtcatccactgctgaacactagggaagtgagtggggtctttagtgcacaggaagagggacaaatgcaagtagcacattaacagtacaaaagaaatgtccttgtgattagcaccctctactgtaatgctaagagggtgtgagcagttgggatcttaatttaatggaaaagaccatatttgcaattatgcgcattaacagtcccaagttaccccctgctgtaagacaaaagga

SEQ ID NO: 16584 - DNA, 1190 bp, Homo Sapiens
  misc_feature (335)..(359): n is a, c, g, or t
gcacgaggctcagtctttcctgaagaagaggatctgagttatcttctgaaacagcgttctcccttcccagttgtatcactcttataaaaagactgtccagtctatgtcatgccctaggagacaaactgttcctcccagccccctttgagtattgagcagaagaatcaaattattaaatacgtatgtttgtacagaatggtatttgtgtatgtgtgtgggcttagagattcacaagtaaatattcctttggtgaaggaatttcaataaaaacatctatcaagtgtcagcggtgagtgtgtttacaccacagaaattggcaaattgacaaatcagannnnnnnnnnnnnnnnnnnnnnnnnactttccataaagttcgtttaccagcataccactagagatttcggtttacaaataaaagccatcttggtttgagcaagactatgcaactatgaaaatgttcgtttaaaaaaatcttcatgatccttttgtaaatacaaggtggttgccaagcttgttagttttgtttattttattgatagatgtaaaatattattgtaacttatttggataaagttcttcaaaagaaacagagctatacaatgaggtaggatctggattatttgtctaagtgagagattgcgaatatcaaaatatctgtctcacttcttctgtgaatgacacagagtagaaataaattcactttaaaaatatgactgaatttttgaaaatcaagactgaatctcacatagctgcagacaggaactaagccagcctctttgtatgtggtaacaagtacagtataagaatgaaagatttaccatccttgaaagctttaatgaaaatcaaatccagcaatatatattcaactgtgtacaggatttaagaaacttattttatgaaggaaataattgtgtgtagatatagattttgaagtctttaaacgtgtcttaataaattaagattcactggcattgagctgagctaccaggtgacccttggggacaaaaaacccacacaagtgaatttcacacaccagtataccttcaacaatatacttttgacacacacaaacctttgatttggtttcagagattttgcaaaatagtaccaatgtaatttacaactgtcatctttgaaattgtgtaaaagtggaataattttttgaagaaataaatcatggtttgtcaatg

SEQ ID NO: 16585 - DNA, 1310 bp, Homo Sapiens
  misc_feature (224)..(344): n is a, c, g, or t
  misc_feature (379)..(405): n is a, c, g, or t
gcacgaggtatttataggcatatctttaaagctttcttctcttttttgaacaaatgaagagaatccagttagtttttgcctttcagaggtgatttgccacgtgcacaaagggtctgtaggtgaaaagacaggcttttgggtttcttgaaacatcaaaaactgaatttagagaatggttatctaacactcaagtcaatgttttttttgaaattactagctattgnnnnnnnnnnnnnnnnnnnnnnnnnnnnnnnnnnnnnnnnnnnnnnnnnnnnnnnnnnnnnnnnnnnnnnnnnnnnnnnnnnnnnnnnnnnnnnnnnnnnnnnnnnnnnnnnnnnnnnnnnttttgcctatagctagcaattatttcattcagatnnnnnnnnnnnnnnnnnnnnnnnnnnnggctacttaaaatagagagtgacttgagatatacaaaaacaggaagaaaagccctggaggtcatatagctaatgtataactgcacagcaagcagctatgtctaaagctaacaataaaaagaaaatgtgggagttgtgcaattagttttattctcattttttggaagaatatgttcctggtttctctaactaaaaggaaaaaattcaaaggaaagttgtaaatattaggaagtaactgaaaaataagaagcaagataaagtggggaggctatgagatcatataatgagctaataaacttttcaacaggggacacctgttctcccttctaactgaagacactaaagagaagctaagatcctatctttcaatcatttagtaattcataaaatcccattatttcataactcaaagtttacctttgaggttgtatgtttacctcatttgaactcgaaatagaagaggtttaagtatttgaataagttgggaaaaaaaggaaaaatagtcttccctgcccttgtcactgatggtgacactacttgtaattactgtattttttggcagaacactcagatgaacagattcctatgctgtggacttttatcattctttttgatggctgatagtagaaagcacacagtaggtactccataaatgtaagactatggcagctgtctagtacaagtgcttctcactgattcttggttaccaggaaaaccagaaagcccgtcacttgccttgcctgcaaaggcgagcctaaagaaatttctctaaccaaaattggcaggttctttccaccacaaaggctcttggaaatataacttatggggcttaggctaatttgagttgaaggtatttgtatttttgatttgcttttagcgaaaaacaataaagaatcccggaaaagt

SEQ ID NO: 16586 - DNA, 467 bp, Homo Sapiens
cgtttccccagaaatcccctcggctggaactgggaaacctgccacttctctgtccacagcagctacatgtccctccccaggggttctgcgctgcttaccatatgtcttattgaaaagctcctggacctgctcccttagcgtgttggcaatgtcaatccgtaagagcctcgcgtcgtaattttctgcaaagcgcaaaatgattatgggtttgggctgttcagtgaaaaggcacttggtgacttttaaggaagatgattttctaattatggggaactccttctctggcaattaacggatctttggagtgggccgctcaggttcttcagcaccaacgtcttgatggagatgtgttttttccagaaagacatgcactgttgccacaacagtgatgagttggaaattcagttaattgttgacttttgaaaaccaccaaatcaataaataagcccggagaggagggacaccat

SEQ ID NO: 16587 - DNA, 886 bp, Homo Sapiens
gcacgaggctgaaaattaactggtcatcccagtagaaacctgcacaggcatctgcttgtctccgcatattacataaatcagaggagttatgaagaaaggccttgccctattaatgatttaattacgtaacattcctaagcagggctgtgacagaacatcagaaaaacacaccaggtagacttctaaaattcagatgctctgaaaacaccaccacctttgactgaaagaattgttccatgattttatttgctaaatagaaactgtctaaactcctttccatcaaatcaatccctcttatactctcatacatttgcataaaaactgaacacactcaccagacaacagtgtatctgttaaaagaatttgatttctcttttccattcttttatgtcatatgccctaaagatattgcctagaatccactaaatgctgctgcagaatcccttttcttcactgatttgacgaatggtgcatgagggacatctgatgctgttacattttatttggctgtaaggaggactgaaaatcccttgagaccaagcctgagacatacccaacctaatctcaaaaaagtaactttaagaatgtagtatttatccggaggggggctttgcatttagatttcagaatttgttgtttgcttaaaagtgtgctgtgaaggtggaatgtttttctctaaaccaatgaaaaagaataattccgtacttcattgggaaaaacaacagaaggccaagatttcccaaaaagccattgctgcatttctggcacctgcaaaatgtgcttgcaatgagatttttgttttaaagtaccaaacctgcatttggcagtcctgccacaacatggtttaccctcaactttttgcagttaacaaatggcttgctcccca

SEQ ID NO: 16588 - DNA, 291 bp, Homo Sapiens
aaatcccccgggctgcaggaattcggcacgaggcttgaatacattgatctggtcagcagtgatgatgaagagcctagcacctcttatactgatgagaatattaaacgtaaagaccatattgattatcagaaggataaagttgctttaactctggctcgtctagcccgccatgttgaagtggagaaacagcagaaagaagagaagaatagagcattcagagcctttgtgaattgttggtgtcttcactattaaagtaagttatcttacttttgtgctggagagttttcaaag

SEQ ID NO: 16589 - DNA, 1439 bp, Homo Sapiens
  misc_feature (410)..(419): n is a, c, g, or t
gcacgagggagatcttgtacttaactcactagtctgggatgttttatttatgtcacctaatattaactattgctaaatttcactttaataaaaaagtagatacaaagactcattttacttagcgggactgcaaataaaactaagacataaattcacatgttagtattgtccaaaacaattcctccagctatcaacccacggcaatcaatccagcagtatcatttatagaaggattactaaaacaagaatcatttctcagttacaaatggggtcattaagcccttggggctctttgaaagtagaagtagtttgcctacttaatcatcagtctacacaaaggcagaaataaaaaggaatggaaatacaaacacaaaatgattggttattacctgttttataaggaaacaagnnnnnnnnnncagtggctagaaacaacaaaaaagcagtggctggaaccctactgaatagagcttaaagaagtactggttacattcacagacacagtagccactagccaagatatagtttatctccatcaaacttaaatagataaagtcagtaagtatgaccatcttactttcactatttacgctctttaaatagtaaaggatcggtttgaaagatacatagaaccataggaacagtgaatgatcatttataaaacagctccttttcctgaatcaatatattgctaaaattctttcagtaaccctccctttttatatgatcacagatccctccacatctattttattttagttatataaaaattattaataaactttggtttccttgcattcggtccttatattttaaaaagtgattaaaacagtactgaatatgaatcacttctgcaaagtttaatgagtgagaaacattcaaccaaggtgatttttccttggaaaaccctacaaaaactgaattttataaacagttacttattttgatagatgttccatttataaatagcagccattacttcactgtctacaaaattgcaggctgtcacattttacatgtttagaattcaaatgttttaagattagattttctagtaagagttaaaataaaaacaaagttacacagacaggttagttgtcctatgcaaataaaacagctgattttcatgattttgctatttagacagataagagacaaccattggattgacactaatgtgtaggataacatattttttgtttaaagaggaaatgatagaaacttggggtggggcagctgcagcaggacttgactctactgaggctcttctgtgctcatgggacaagctatcgcaggatgttagtaccggagaggccctcaagttaagacctgagcaaagtgtgctattcagagaagctgagctatccctgctcccggttctactgtggtgaattggtgttttctgaggtctaggcaacaagagctcagagtcctcgtgc

SEQ ID NO: 16590 - DNA, 353 bp, Homo Sapiens
gcacgaggattacttttatataaacttcaggctttattcagcttctggactttttctgttccatgatctaatccaggatatcacattaaatatatttccagtgtgatgtttattttcttccttttacttactgggtttgatttgttcttctttttctagcctctcaaagtggaagcttacaggattgattttagacctttcttcctttctaatataagctctaaagctatttatttccccgtaagcattgctttgctgcatctcataaatttttttccatacagtgtcactctcaggatatcatactttttttatgttgtgttttcagcttcattaaacttggcatcattttt

SEQ ID NO: 16591 - DNA, 790 bp, Homo Sapiens
gcacgaggcaaaccaaatgagtttgtatacagtatttcagctgtatgtcaggagaccagatgatggctttgcttaggaggaggggtttgtcagtgatgatgacctcttgttttccaaaaaagcaggatgatctgatctcacccactgataccctctaggaggcaggccacatctggttcatctaattactctgtttaaagcaacaaggcttatgaatgatcagcaaagagcaattttcaaaatcttggatgctcagtgtttgttaattatgttatcacaaatgtattaaattggtaaatcaggtatttttagtgaaagttacttatctttttgtttctgctccccttatcagatgtcacccagacactcccggaaaaacgagttcttgtgttatcagttctacattgtcatcaaaaaagatgacaccactgcttgcctaaaagtctcaaaggtcatttgttacaaagtttcccgtgatttttaaaagaatatgtttttattaagccttctttttagaaatgtccataggtttgacagcttttcttatattattagagtttctattgggctctcattaataggggttaaaattcactcctttggctaagttatcttctctgatttactgagttttctacttcttttactgaagtacaaatgtgcttagtatgaaccttttgaaaagaatcagcctcctaagtagctgagactgcaggtgccctccaccacaccaggctaattaaaaaaagaatattatgtgtgtgaagatgaggtcttcctatgtttccca

SEQ ID NO: 16592 - DNA, 617 bp, Homo Sapiens
  misc_feature (78)..(372): n is a, c, g, or t
  misc_feature (374)..(411): n is a, c, g, or t
gcacgaggacacaaataagacaatttattttgttgatgacatgattgtaaacctagttatgcctctgctccctcattnnnnnnnnnnnnnnnnnnnnnnnnnnnnnnnnnnnnnnnnnnnnnnnnnnnnnnnnnnnnnnnnnnnnnnnnnnnnnnnnnnnnnnnnnnnnnnnnnnnnnnnnnnnnnnnnnnnnnnnnnnnnnnnnnnnnnnnnnnnnnnnnnnnnnnnnnnnnnnnnnnnnnnnnnnnnnnnnnnnnnnnnnnnnnnnnnnnnnnnnnnnnnnnnnnnnnnnnnnnnnnnnnnnnnnnnnnnnnnnnnnnnnnnnnnnnnnnnnnnnnnnnnnnnnnnnnnnnnnnnnnnnnnnnnnnnnnntnnnnnnnnnnnnnnnnnnnnnnnnnnnnnnnnnnnnnncattttaatacaagataaatatacaaaaattagtaacttcccactcctctagcaataatcacctggaaattttaaaaaaagggagtcaaaatattccctttgccatggcaactgagtagttgggggtgaaggttaggatgctgtatggagcagctccggccatggggagctcgacagaggcgtcatttctctcccacatggtggct

SEQ ID NO: 16593 - DNA, 148 bp, Homo Sapiens
acagtgagagaaaaatggaattccgttttattttgtcctctctgaaacttccatttacaccatggcctcatctatcaagaagaggaagaaaaggctctgccttataccataaaaatcaagtactcatgtacttgttagagcctcgtgc
